United States Patent Application Publication US 2022/0102000 A1 - sequence listing, part 3

SEQ ID NO: 386 - DNA, 30730 bp, Unknown
  16S sequences of unknown bacteria
gaccgaacggtcgggcttaatttttatatttatatatcctcgttttcgacaatattgtcaagcacggcaacggtatgaccgcagagcgggcactctacattgtcctcgtattcagcgcgttcaagaaagaatatttcctggcagaacgggcattgaaccgtcagaaaatcttcaaacgaatcgtcgccgcaatcgtgttcacactcgtcacaatcgcagccgcagccgtcatgctcatgctcgtgttcgcagccgcagtcacaaccgtcgtgatgatgttcgtcataatcggcggtgtaggcgtccgtatcaacggtcacatcgccgacgatacagtcgcgcagcgcttgcagggacgctgaaagatgttcgttgtatgtctcgaagttttccgtcttttcttcaagttcgtcaaggcgtgagccgataacgtccacctgctgcgccgttgcggacacaaggtcgtaaagagattcataaaacgatttttcttcctctgttgcggttttgcagagagtattgagcgtcttttttatagcatcaagtcgtgtcgaaagatacatattataacctccgttaaaaagactgccgccccgagggacggcagacaacagttaaaatcttatgctctggaaagatattcgccggtacgggtgtcgattttgataacttcgccctcttcgatgaacatcggaactttgatgtttgcgccggtttcgagtgtcgcgtttttgagcgcgttcgtcgcggtattgccctttacgccgggttcgcactcggtaacggcaagttcaacaaatgcgggaggctcaacgctgaaaacttcgcccttataggaaaggatcttaacgataacgttttccttaacaaacttgaagttgtcgggaagtttatcagccccgagaggcatctgctcataggtgtcctgatccatgaagtaccaaaggtcgccgtcattgtaaaggtactccatatcttttctttcgatgaaagcctgcgggaatttttccgtcgggctgaaagaatgctctataacgccgccggtgataacgttctttatctttgttcttacaaaagcagcgcctttgccgggtttaacgtgctgaaattcaacaactgtataaacgttgccgtcccactcgaacgtaacgccgtttctgaaatcgcctgctgaatacataggaatatcctcctgaatagaatacataatttacaatttattatacaacatatcaaggcgtttttcaagtcccctcgacactttttttttgaacttttttattttttcgttccaaattgacttttttgacgggtagggcatgttcggttttatgtaacgtgcctgtcgttgaacgattcggaatcaaacgtaacgacggcaaaatatttcattttatcgtttttaagcgtctgatttatcagttttttcagttcgtccgtgagcttctcgtattcgtgcgggataacaacgtcaaaaatcacgtttgtatgtccagtgccgcgaaccatgcggaaatcgtggattccgagccgttcgtcaaaacttttcaacgcatcggtcacttttccttttatctcgttcagttccgcgtcatcggtcacaatggggtcatagtgaatgacaagatcgacgttcatcgtctgcttgacttccctttcgatgtcgtctatcagttcatgcgcgtcaagcacgtcttcacggtggtctatctccacatgaacgctggcaaagcgtctgccgggaccgtaatcgtgaactataaggtcgtgaataccaaggattttatcgtagcgacatatatgcgcggcaagtgcgtgcacaagtccctcgtcgggcgcttcgccgagaagcgggcttatcgtgtctttggcaatgcctatgcccgaccagataatgaacagagcaacggcaacgcccatatatccgtcgatgcgcagccccgtcagttttccgacaatgcaggaagaaaggacggctgcggtcgttataacgtcgtttcggctgtccgcaacggttgcggtcagagcgggagaatttatctttttgccgagttttgaattgaacagcgccatccatgcttttaccagcatcgacgcaataagaacagcagcaagcggaacagaaaactcaacaggttcgggagaaattattttctcaaccgaagtttttataagttcaatgccgatgaccactatcataacggcgaccgcaagccccgaaaaatactctatacgatgatacccgaacgggtgtttttcgtctgcgggtttggcggcaagacgaaagcctatcagggtcacgacagaacttgacgcgtcggaaaggttgttcactgcgtcggcaacaacggaaacgcttccgctgataaagcccgccgcaagtttgcctgcgcagagcaaaacgttgcagattattcccacaactccggaaagaaccccataagccgtgcggaccttgggagaggtcgtgtcctctcggtttttcacaaacagtttcagcaaaagcgatgtcaaatcaatatccccttttaggttttttcgcatatttcttttatagattatatcacattttaagcggacaatcaataagttagcgccgactaattttctaagacgaaaaaatagtggtttataagaaaaatattgattgccaacgtctcgggaacaaagtttgtttcagaacctcgcataagcctttgaataaaatatttgcggaattttttttacgacacacttgtgtgcggccggcagcgttcaggactttgccaaaagggcaaatatccgttgtaaggacggatatttatgacggtattgacaaaaacatctcgcatataaaagtaaaagcgaaccgtattaaccgttacatggaacggtatccatcgccgcaatatctttcacaacgtcagctccgccgcatcgcaaccgtgtgactacgccgtaatattatccaccttttgcaccgtgttttcaactgaattcgtgtgccatttcgtgtgcccaacactttttttgtcgtgtttttcttctcgtttatgtgatattacattacacacagcgccataaagagatgtcaattacggtactcaaaaaaaaccatagcatcagatattctatagctaaaacaaaataatattgcctttatgggaagcgatttgaacccgcattgacttttaggggaaacggtgcgcttcgccgaattgcgaccgttgatacggtgcccgcaattcattgctcgctcccgacttcgcggcggaaaaagttccttttttcgccgttccgacgaacccttttcgcagcgcgaaaagggttctcttgaccgcttcagcgcataaaaaaattcctcacatgttgtgtgaggaatttttttatggagctgatagtgggaatcgaacccacgacctgttcattacgagtgaaccgctctaccgactgagccatatcagcatacaaggcgcaagatgtcttatacccgcatagtataccacactttgcgccgaattgcaataggtaattattgaactattatcaaattcttcgggctgtgggtaagactttcacagccgtcctttttgatatgaacgatatcttcgatacggacaccgaatttgccctcgaaataaagtcccggttcatcggaaagaaccgcgttttcagggatttcgcccgtatatctggggctgaaattcgggctttcgtggatataaagtccgagagaatgtccgagagaatgtccgaatgcttccgctacgccgtgttcggcaaacagatttcttgctattgcgtcgatgtcgcagcctctgacgcccgcttttatttgtttcatcgcggaaagttgcgcttcaagaacaagttcataaatcttgcgctgttcttcgctgacgtgaccgaccgcaaaagttcttgtcatatcgcttgcgtaaccgttgtaagacgatccgaaatcgagtgttacaaaatcgccttctgcaatgattttatcggagggaacggcatggggacgagaagtgttttcgcccgatgcgcagataatatcaaacggcatttttccggagccgtttttgcgcaggaaaaattcaagttcgagcgcgacatctttttcggagatgcctttcttgtaattttcctttacaaattcaagaatatgcgcatagcctttatcggttattgcctgcgattttttgatatattctatctcctcgggtgtcttctgcgcgcggagagaggcaaatatatcgtcgccgggaacgaattcgtaagcgggcatcgctttttgcattgcggtgcagtacgaataaggagcttccgcttcaaaataaacttttttgatctcttctttatcaaaaacacttatgcaagcagcggaatgagatgcttcgagaatgcggacttctgccgattttatcgtatttttcgcggcttcgatatatctgaaatccgtgaagaataccgcattcgttttcgtaacggcaagaacgccgttagacgattcaaaaccggtgaaatatcttctgttgtactcgtcgcagattatcgcgccgtcgccgacgttcatttttgcctgcaatctttcaatgcctgtcatatatcaatcatcctttcggaagttctttttaatcaatttttcggcaatacgtttgagtcttatccaaacggtggtttttgctccgccgacgggttcgacaagaatacagcgtatttttgcccttttggcggcggcaatatccgtgaacagttggtcacccataagaatcatttcgtcttttccgacaccgaatttgcggcttgcgtcctcgataaatgcggtcgagggcttatgcgcgtcgtgttcatattcggtcttcaattcttcggcaacgggtctgacacgctcttcggaattgttggaaacaatacaaacgcctattccattttccgacagcgcggcaacccaatttttaacttcgtcgggaatgaccatacagccgtgcggaacaagcgtgtcgtcaagatccgtaagcaaagccctgactccgagagacgaaagaagttcgggagttatctttttgaaactcgaaacgtatatgtcgggtctgaaattcatttttacctcaaaaaaaagacaaaggttgcgaccgaaatcacaacctttaaaatcttacttatatttgcgttttctggcagcctcggacttcttctttctttttacggaaggcttttcatagtgttcgcgtctcttgacctcggtaagaataccggatctcgcgcactgcttcttaaaacgacgaagagcattgtccaaagactcattctctttaagttttacttctgccatatcagactaccctccctccatcgctcggaaaaccgcaacgactttgcacattacaagaaaaaaaaatgtataccattcttgctaaaccattatacaccaaaataaggggcttgtcaataggaaaacaagaaaatatgcggcattttttttaacaaagattttatcattcgaaagaaatctgtttgaaatcctctttcaaataattgtaagcgaatttggtgttcgcaaaacgttcgatatgcccgccgtcatgcacgactttggatacggcgtttgctcctatcccgataacggtctgaatatcgtccatcataaagatattgtaaagacactcccgccacggttttgcgtaaccgacattctcatgatttccgacggtgtttttctgccgataaagataatacggtaaataccctttttcatcaaggtatttttccgcaaatccgaccatcttgcccgcaagttccccgttcgctttttccgccgcggggttcaacgaatgaatatccgccgcgcgtttgacatacagcgtatgcaaggtcacattcgcgggatcgagagcggaaacgccgacaactgttttttcgaaactttcaaacgtatcggtcggaagtcccgcaataatatcgacgtttatgcggaaattctcttttgccgcaagttcataagcgtcaaaaaagtcctcgcttgtatgtttgcgcccgataacttcaagcactttgtcgttcagcgtctgcggattgacacttatgcgatttacgccgtgtgctttaagcgttcggagttttttagaagttattgtatcgggtctgcccgcttcgacggtgatctcttttatattatcgtaggaaaagtgcttttcatacgccgaaaggattctgtccaactgttcatcagaaagaacggtcggagtgccgccgccgatataaaggctcagaacttttaattttctttcctttaccagctgcgccttttgctctatttcctgcacaagacggtcaacataagggtcgaggaaccgcccctcagcagacgttgcggaagacacaaaagaacagtaactgcaccgcgtcggacaaaacggaacagatatatatacgctgcaagtgtccttttggcacatctgaaccgcacttttgcgcgtttcgagaattttttcgcaaaggtcgattttatcgtcgcggacaagataacgttcggaaaagacttttcttgcattatcgccgtgcgcctctttgagagttccgtagtaaagcgcggacttgatacctgtcagcagcccccacgggcttgttatgcccgttgcctcactcatggcgtcataagcgcagcgctttacagcaaggcgggcagaatcgaactcgtccctgacctctgcggttgcgttatattcattttcgccgagtttgaaaacggcggttgcggtgttgccctcgacggtgacggacaattcttttccgtcatcggaagaaaaatcggaaccggggaaaaacaacaaagaaagacattgcaggtcatattctctgtccgtgcccgaaagataaatcctcatatcaaagccccaacgcctgtttcacggcgtttcctatcgcttcggcaagtctcatgtgtccgatatccgacggatggtttctgtcaacggtgcattctccgcgaaaaaaatcgtgtccgaaaatctcttttccgtcaacgaagtatacgtttttgtcgcctgccgcaacagcgttgtcaaaggttctttttatcacaagcctgcgttcttcgcccgaaacggggtcatcgtcgtaatcgcatttggaaacgatgattatcggcagcccggggcgcgcctcgcgtaagatcttaaagaatttttcgtgcgttttttcaagccattcggcgttcggggcattccagtcatagtccataacgaaagcggcaaggtcaagcgtcgcgaaagactgcgccatatattcctcacctcttgcgttcgacgaaaagcccatgcatatcgtctcaacattcagcattcttccgataagatttgtataaagcaggccgggacgggtgcagcagccgccctgcgttatcgaagagccgtaaacaagcacgggacggctgaccgcatattcggacggagcctcgatacgcgcgtcgggagaaagccctatttcgagtttgtcgataccgctgtaaagaggcagattaacggtatattcgttcattttgccgtctgtattaaatgtcgaaaggctttcgctctcacggttaaagcaatagcagacgtgccagaacttcttttctttgcccgagccgatgtaaatatccgttccacccgttgcgtcgtcgcacatatgctccataaattcgggagtgttgcgaacgatatgaaccgagaaaacagaagaatccgttttgaaagagacctgtgcgcccgatgtattgtttgaacgtactttcagaccgggcgaaagtttgtcgttcattctgtcgtcaagacggtgatagttgccgtttgagttcttccacggaagccccgtcaaacggaatgcgtcgcagtcaagaacgtcaatataaactattccgtcacgttcttcttttttcgatgtaatatcttttacgcttatcatttttcaattcctctttgtttcataacggattgttttcgatttcggagcctatcgtcgtagtaaacccatgcccgggataaacgcgggtatcggggtcaagcgccgcaagtctttgcaaagacttttccatatcatcggcatttccgagttcaaaatcggttctgccgcaactgcggtaaaacaaaacgtcgccgcagaaaagagcgtcctcgccgtaaagagcaattcctccgggagtatgcccgggaagttcaagaacgcggaatttgtaatcggaaaaattgacctcgtcgccgtcttcgagcaagacatcaacgggatatttcctgttttcgcagtatgccatgcaattctgcggagcatacagagttctattttcaagcaacggtgcgtcatgcttgccgatatatacttttgcaccgtatttttctcttaacacaggcgcttcgtatatatggtcgatgtgtgcgtgcgtcagcactatatccgtaacctgtttatcgccgacaaaatgctctatacggggaatgtcgaacgacggatctataagcataacgcttttttcgtcggctgaaatgattatatagcagtttgtcgcatattcgccgacagcaactcgtttcactttcattttttaatcaagtcctccgaattgacaacaagggttataggaccgtcgttgacaagttctatctgcatatccgcgccgaaaactcctgttctgacaggggttgaacctcgcaaacgctcaacaaacgcttcgtaaaggcggtttgcttcctcgggcgctgcggcgggagtaaaagacggacgcttgccttttctgacatcggcgcaaagcgtgaaattcgaaacgaccattatgctaccgcctatatcgttgacggaaagattcattttgtcgttttcgtccgtaaatattctcagcccgtcgatttttgaagaaagaacttcaacatctttatccgtatcaccctcgcgcacgccgagcagaataagaagtcctctttcaatctccgaataaggctctccgtcggcgacgagagaacaacgcaaaactctttgtataacggcagtcattaactgagagttcccctttctatcttgaaaacgctccttatcttttcaaggcgggagcaaacggaacgcaggtggtcaagtccgtgaacgtctatcgtaatataaacttcactgcatccgtcgttcatttctttgcttgacattgaatgaagcgctattcgcattgccgcaagcgcggaggttatatccgccataaggtcgatacggctgaatgcggaaatcacaaggctcgttgcaaaatagccgttgtcatagccctcccaatgcacgctgacaaggcgttcggggtcggcattcttgacgttgggacagtcgcatttgtgaaccgcaacgccgtaacctcttgtaacaaagccaattatatcgtctccgggaagcggaacacagcatcttgccaaacgtacaaggcagttgtctataccctcaacaacaacgccgttgaccgcttttttcggtttttggagcgtcggcgaatcgggagttgtcgcttcgcgctgtctgataagttttgtataatcgtctttgattcgcggaagtattttcgaaatggaaataccgccgtaacctatcatcgcataaaactcgtcaagagtttcgacctgataatgtttcatcacgttggcataaacttcttcgcgtgtgaacacgttgaaagttacgtttatgcggcgaagttctctttcaaggtcttcgcggccgttgacaatattttcttccttcttctcttttttgaaccattggcggatcttgctctttgcttcattggtgcggacaagtttgagccagtcacgggaaggacctgtactgttggaagaagtcagtatttcgcaaacgtcgccgttacgcaggtgcgttgtgagttcgaccattctgccgttcacttttgcgcctatcatcttgttgcctatggcgctgtgaatggcgtaagcaaaatctatcggattcgaatcggcgggaagcgtttttatattacctctcgggggagaaacaaatacctgatccgcaaagaggtctatcttgaacgtctgaacaaagtcgtcgtgttcgttgacgttatcctgaacttcgagaagtttgcgtacccacgcaagtttcgagtccatttcggcagaagcactttcgcccgatttgtatttccagtgcgccgcgatacccatttcggctatacggtgcatttcttccgttcttatctgtatttcgaaaatatgtcccttgtaggaaacggtcgtatgcagggactgatacatattcggtttcggcgttgcgatatagtctttaagtctgcccggaatggcgcggaatatatcgtgcatatagccgagcgcattgtaacagtcattcaccttttcaacgatgatacggaacgcgtaaaggtcatatatctcgttaaactgcttgttctgattgaacatcttgcggtatatgctgtaaatgtgctttatacgtcccgttacgcgggcttttatgccgacctcagcaagtttatccgtgattatgccgcgaatctcgttcaaaacatcgctgtttgcattgaacgatttcaagtccgccactatctcattgtaacccacggggtcaaggtatttgagtgacgtgtcttcaagttctgttttcaggctctggataccgagacggtgcgcaagaggcgcgtaaacctcaatcgtttcaagcgctttttcgcggcgtttttcctcggactgtgcgtccatggttctgatattgtgaagcctgtccgcaagttttatcagaataacgcggatatcttttgccatggcaagcagcatttttctgatattttctatctgctgctcttcgcgggaattgaacgaaagtttgttcagtttggtaacgccgtcaacaagttgcatgacgttttcgccgaactctttttttatctcatctatggttacgggagtgtcttctaccgtatcgtgcaaaagtgcggcgataatggcgtccgaatcactttcgtaagacgcaagaatctttgcgacatgaatggggtgcgtgatataaggctctccgctctttcggaactgcccctcatgggcggcggtcgcgaaatcgagcgctttccctatccgctccatatcgtagtttccgtttttttcaagcaggtctataagacctattccgaaatcattcactctcattcacctccgacggctcgccatgttcggctgtcggcaagatttttcttgttctgtgtatctttgaacgtaatgtttacgttgccgttatatgtgtactctattatcccgagttcggaaagaatatctagacaaagcatgagtttgcagaaatcgaatccgtcaaagcctcttcttgcaaaacctcttgcaagagcgtgcggcatatattttgtctgttttgaattgatataatttctgtgaagatgtctgtataccgcagtaaactcctttcgggtcaatgaggcacagtcaacgggcgcgccgttcgaaaaagcgatgtaacgcgcttccgcttccgactcttttctctcggtatcggcacaaagtcgcatacgctttatgctcatgttaagagaatatctgttattgaaaaagttctccgacatcgagaagaccatatccacggtatctcccaccgcaaaatcaaaatcctgcggggtcgtgccgaaaagcattgcggaaaagtcctgtccgccgtaagagaacgtcaatttaaggtgcattcccgcgccgacagcaagaacatcggtcagaaccacgttgccgaatgcaaaactcggtgtggggttgcccgttccgaacggttccaaacggtgaagttcgtgaaccgtgtcgagagagatttccgaaaaaggaataacgcattcggactcaaccacgggaatcatcatatcatcgttgattttttcgtttgcgatagctgttatgtcgcggacgaaagcatcaaaatcttttctttcaagtgtcagtcccgcagccatctcatgaccgccgaatttttcgagatgttcggaagcctgtgtcagcaactcaaacatacttacttcttttatgcttcttgcggagccttttgccctgtccccgtcaaagcataccaatatgcacggcaaatgatatttttcaactattttggaagcaacaattccgataacgccgtgatgccaattttcggagccgacaacgattattctgtctttggaatttctgttttcaagcattttttcaacgtcgtcgattatatccgcttccatcttgcggcgcgttctgttctcctcgcaaagcccctccgcaagtacggcggcattttccgggtcctcacaaagcagaagctcgacagactgtttggggtcgcctatcctgcctgcggcatttatgcgcggcgcgacctgaaacgctatcgtcgaagcggttatctgtccgtgcttatatccgcccgaagcctccaaaagcgcgcgaataccgcaggacggacgtttgcgcagaagttccaaaccgagagacacaagtatgcggttttcgtcaaccagcggcataatatccgctatcgtgcctatcgcaacaagatctccgtaaaaagaaaacgcctttgaactgtcgccgataagggcgcagacaagtttgaaaacaactccgacgcccgcaagttccttgtaaggataaacgctgtcaggtcttttcgggtttacaacggcgatacattcgggaagcgtcggtttgcactcatggtggtcggtcacgataacgtcaagcccgtatccctccgcctcggctatttcttcaacggcggttgttcccgtatcgaccgtgacgataagagacgtgcccgactcatatatggagcgaagcgccgcggtgttaagcccataaccctcttccgttctgtcgggaatataataatccactttcgcaccgaccgaagtcagatacctgtaaagcacgacaacggacgttatgccgtccacgtcgtaatcgccgtaaacggttatcttttccccgttcgcaaccgccttgtttatgcgagccgtcgctttttccatatcggcaagcagcaacgggtcgtgcaggtttgctatatctatatcaaaaaaggactctatgctcgctttgtccgtcaatccgcggttatacagcacacgggcaacggcgtcgcaaaagccgaactgtttccttatcgaggcaacagccgcttcgtcctgtttttttattaaccatttaatcattagaaaaaccctgattttcttatttttcagatgcctttatatattctttcgcactcgttaaggtcgagaggttcgaatacatgattgttcagactcggcatcgtaagccctatttcggagaactttttcgcatcgtcgtccgaaatatccttttcggggatatattttttgaaaaggttctcgataaagtcgctcaattcaagcgccgtcatatccgcatacgccgccagaccgtccgcatcgctcgcttttgaaataaatgcgggcatcagcgcggcacaggcaaaaccgtgttcgtaaccgagataattcgtcaactgatatccgagagagtgagcaaacgacgtgccgccgtcatttatggcgcagcctgcgtacaaagagcctatataaagttcctcgcggactgctttcgaacttccgtgctccgtaaattttttaagagcgggaactataacagaaatcgcttttcttgaatacattctgccgaacgaaccgacttttttgctgtaatacgcttcaacggcatgacagattgcgtcaagcgcggtcgccacggtggttctttcggacaaagtttccgtatacgtcgaatcgcaaagagcgcaagtggcataactttcggcggatttgacggtctttttcacaataccgtcgggggtgttaaatgtcagaaccgacgcggaagtaacttcgctgcccgtacccgccgttgtgcctatcacaagaagcggaagcggtttgttgacaaaagcggaagcattaaaaatatccgtttccgtcacctgcggatttgcgcaaagcaaagcagttgcctttgcggcgtccatggaactgccaccgccgacacctacgatgaaatccgcgccgaaatcgcgaaccgccgaaacggcacgtttaacggtttcgtaagacgggttattctcgacctcaaaaaatgttttgtaatcgacgccgcagttgcgaagccctttttggaggtctgcgaacacggaactgtgcttgtacagatttttgcccgatattataagacagcgttttccgagttttgaataaccgtcatatcttgcaactatcccctcgcccgaaacgagacggacgggcatatagtaaccgtatctcactttttctctcccgcgccctcgctgagcaggctgtgtttaacgtcccaaagtttctgcgaaaggtcaacgtaatacgtctgcggattttcgaaacgtttaacttcatcccaaagttttccgacctgttctgcacagtatttcttcgattcgataacggacggtgttttgtaaacgagtttgccgttcaggtatatcggtttcaatatctcttcaacacgataattttcaaacgtctttttcttccatgtgtaaacggggtcaaaaagcgttatgggctttgtgaaatcaaactcttcgtcatgcaatgcgataagatccgcaaccatatttcccgtttcgttggagaacagacggtatatctttttataaccgggagtggttatcttttcaacgttctccgaaagtttgatcttcggaatgtatttgccgtccttttcggtcgcaacaagtttgtaaacgccgccgaaaacaggttcggacttcgaggttataagtctttcgccgacgccgaaagagtttatctgcgcaccttgaagaagaatgtctctgatgatatattcgtcaagagagttggaaataaagatagtgcagtcttcaagtcccgcttcgtcaagcatctttctgactttctttgtcagataagttatgtcgcccgagtctattctgatacctttaagcctcttgccgagcggtttaagaacattttcgtatgcctttatcgcattcgggattcccgatttgacaacgttgtaggtatcgacaagcaaaatgcagttgtcgggatagtatctcgcatacgcttcaaacgcttcaagttcggtgtcatacatctgtatccacgagtgcgccatggtgccaaccgcaggaatgccgtaaagttgctcacagcaagcgcaggcggttcccgcacaacctccgacaaatgcggctcttgcgccgagtatcgcggcattgctgccttgcgcacgtcttgaaccgaactcaaaaacgggtctgccctgtgcggcgcggactattctgttcgcttttgtcgcaataagcgattgatggtttatggtcagaagcagcatcgtttcaagcagttgagcctgtatcgccggacctttgaccgtaacgagaggttcgttcggaaatacgggtgttccctcttcgacagcgtaaacgtcgcactcaaacttgaagtccgccaaatactgcaaaaactcttcgctgaactgatttttcgagcgaagatagtcaatatcttccttgtcaaaatggagttgttccaaaaattcgatcatttccgaaagacctgcggcaattgcataaccgccgttatcggggacttttctgaaataaaggtcaaagcacgcctgcatatcctttttgccggaaagcaggtaaccgttgcccatggtcaattcataaaaatcgcaaagtaatgtttggttataaggtctcataacgtccactttctttcgttatatatttacttgatattatatcataaatatatatttaattcaatcggcgtcataaaaaattcgtacaataaacaccgtaatctcaaaacttgcaccgagcacaaaagaacaaacacaccaaacaccacgaaattctttcattctcatataaaagaagaagagacccccgaagggatctctctcagaaaaaaaggattagaaatgaaaagaaaaaagcaactgtcaccgacaggctaacacaatctctcctttgtgtttgcaagtatagtatacgctgtattttcggcacatttttgacagatgataaaacagattcgggaaatttgaaaaaagtcgtcttccgtcgaaacgtcagacagggtacattcagcctaaacaatacgtcaattgtccctgccgcagagatagtccgcgaaagaaataagaaaaccgccgtcgtagaagcacgatatcgcagattttgcacgttcggtcagttcaacgactttgcgctgtgcgccgccgacaccgaagatgtccacgaacgtggtcttgccgctttccctatccttgccgagcgtttttcccatattgccgtcagtgcccgtaacatcgagaatatcatctcttatttggaaagccagaccgatgtttttcgaatattcaagcagcgccgcacgctgtttttcggtcgcgccgccgcagatagcgccgacttcagaagatgcttcgagcatggcgcttgttttataatcgtgaaccctttggatataatcaaggtcggtatgtttgcccgccacattgtcgatgtcaagtacctgtccgagaactattccgttcatgcccgacgctttgagaagagcctttataccgtctatcagttgcgtttcggtcaatccgaactccttgtatgtatcggtaactatctcaaatgcgcggcaatagagtcccatacccgccatgagagcgatgtcctcgccgaaaacaacgtggtttgtcggttttccgcggcgcatggtgtcgttgtccatgcacggcaggtcatcgtaaatgagcgaatatgaatggattatttcaagcgcgcacgcaaaggcggtcgcctttttgtaatcaccgcagcataggcggcagcattcgagcgcaagaacgggacgtatgcgtttgccgcccgccatgacgctgtaattcatcgaatcgcaaatttttgagccgtccgttgcaacgtaagcggcaagtttttcgttgatatatgcgcggtagtcgttgaatctctgttcaaaatcaatcattttgagcgaactccttttctcccgatgatgttacttcataaatgcgttgtttgaaggcttcgagttttgaatagcaaaactccgtgagttttacgctctcttcgtaatactttattgattcgtcgagcgtaagttttccgctttccatctgcaaagcgatctcttcaaggcgttttatcgcctgttcataagtcatctctttttcctgcgacacagtcaatcaccccatcggtaaatctgagttttattttgtcgccctcggatatttccgaagcgcgtgatacgttttttttgccgattgacacggcggcatatccgcgttttaacacggacagcgggttcatcgcctcaacttttccgacaagcctttcaagcgtttgtcccaaaagtgcgacgtcgtgttttgcggcggatgaaatgcgggcggaaagtccgtcgagcaatatcgttttttctccgactaaacggagaggcgaagagcgggagcaaagcgtttcaaccctgttttgttcggctcttatctgcgaaacggcggcatttgcggcacgggtcttcaaagaagtcaccgaatttttcagttcggatgaagacgggcagataagttcggcggcgttcgacggggttgcggctcggacgtctgcaacaaaatccggaacggtgaaatctatctcgtgtcctattgcgctgacgacaggcgtttttgcctgaaatatggcataagcaagctcttcgtcgttgaaacaagcaaggtcctcgtatgaacctccgccgcgggcgatacagataacgtctacgcctcggtgttcgaaatatccgataccgccgataacgctgtcacggcacccgtcaccctgaacggttgcgggataaacgattatctcggcagacggaaaccttgctttcgagattgaaagaaagtcctttacggcggcacccgtttttgatgttataagccctatcgtgcgcggaaagcgcggaagaggttttttatattcgggagcgaaaagtcccgttttttcaagtttttctttgagttgaagaaaagccagatacgccgcgcctattccgacaggcgtcattttttcggcatagagttgataagcaccatcacgttcatacaaagcgacgcttcccgtaacaaacacttcaagcccgtccgacacgtcaaactttactttcgaacacgccgaagaaaacataacgcacttgacggcggcggaggaatctttcaaagtgaaataagcatgtccgctgcgggcgttgcgcgtatagttggaaatttctccgcgaacggtaacgcctttcagattagggtcggaagtcaacacggacttaacatacatattcagttgtgagaccgtcacggtcaaagccatgataaaccctccctactctgccgcggggctgaaaatatcaatatcgccgtttgcggcggcaagcgtcagataagcggtgccgacggcattatcgcttgaaagagacggctcggcaaaatacgattcgtaccttgattcaagccgagggcgcataagcgcgtttgacataacgccgccgacgaaaagaaccggtttttcgccgtattcgcgaacggcgtaatcggtcatggtctctatatttttataaacgctctcaaaaacaaatgcggcggtatcgcaaggcgaaacgccgtccgaaatcattttttcggcaatgttttcaaagcccgaaagactgcattttccgtttttgaaaacgactttcggttttcgcggcgatgtgccgtcacgcgcaagtttttcaagttccgcgcctgagggaaaaccgagcccgagacggactccgcagcggtctatgagttgtcccgccgtaaggtcatcggtctctgcgactattcttattttatccatactttcgacttcggcaagttccatcgtgccgcccgaaagatgaaacgcataaaaaccgccgttcagcaattcttttttgccgcaggaaaaaatgcccgcagcgatatgaccctgctgatgcgaaaattcatacacgggaacaccgagcgttttggctacgatgtgaccgacgtttttgccgacaagaaaacacggcatatatgagtcctcaacgctgcgcgggcgcgttgaaacaccgacagcctcgataccgcttggatcgaggctttgaaaaacatcatataattgcttggtatgcgcaaacacggcatcagactgccgcagtccgcgtttgccgctttcgacgggcaaaagtttttttgagttgaagacctctcccgaaacggtgagcgttgcggcggaggtggtgtaattgcttgtatcgaaagccagcgctttgtcagccgacatctttggagcgaacataaccgccgagaacgccgtttatgtatttcgcgcttgtatccgtatcgaattttttgacaagttcgatagcctcgttgacggcgactgcgggcggaacttccccgcccatgatttcgaaaacggctatctccgaagcgcaaagagcaacgcgggacagtctgtccgttttccattttgtgctgaactcgttcagaacggaatctattttttctttttccgagacaacgccctttataagtccgcggcaatagtcatcgaactcatatcccatattttcggcggcaagcgtcattgtttcatcaacgtccgcatcgtccgaaaaagatatttcaaaaaggaccttaaaagcgttttctctggcgtcttttcttttcatataaaggcaatatccttccgttttacggttcagtcgttgttttccgcaacaggttttttatcggtatgaacgccgacaactagaacgttgacttctccgacgcaaagtcccgtcatggtctctaccgcgtccttgacttttttctgcacttcggaagacacttcctgcacttttacgccgttttcaacgactattcccacgcagaaattgacaactccgggcgcagccgcggcatagacgccttttgctatctgtttatattcggtaacaagttctttcgctgccgcaacgccttttgaggaaagacgggtaacgccctcaacctcgcaagcggcggtcgaagcgatgcctgcgataacttcttcggaaatctttacggaaccgatgttctcatctgccataatgtacagcctccttggtctttcggataaaatgccgcaatgccgaaaacggcaaatacggggttttaaaaatccgtttataatgttccgagtatattatatcacattttttcccgtttgtcactacttcatctcaataatttttatgacatttgagttcagatgtgtggcagaagcgattatgtcgagtatctgcgccgcctgtgcggaagtcagaccgtcggttttgacgacaacgcaggcgttatcctcgccgacaaacactatacagtcctcgaacccttttgcgattatctgattttctatcgctttttcctgttcgctgcgcacggcatacccgtttatcttatcggcggcttcaagtcttgattggtcgtcggcgttttcgttgttgacaatacttttcagcacacctatcgcctcgtcgcgggactgctggcgtgtgtaacgggcggtgtcaaaataatcgtcgtccgcagaagtcttgacggttttgtccgttcccacggtttcgggcacggtctttttgccggaagagacgcgccagcctatgccgacggcaacgataacggcaacggtcaggaatgctatcaaccaacgtgtttttctgaatttcataagagttctccccaaaatcatttacgttttgcgaccgaaacaagggttctgtctatgccgagaacgccgctgacaacttcggcaacttcgcttctgacgctgacgcttcccgcgccctcgcagacgacggcgacccccgcaacggcgggcatataccgaaattccgcgacagcctgttcgttcccgcccgtttttatctttatgtgtgaagtcgaagaattatcaccgtttttctccgtgtcggaaagaaatacgctccgttccgacgtcgaaacggttatcatgacttcgcatcttcccacgccatctattttcgatagcagttcgcaaaggcggcgttcgatatcggcgacataacgttcgacggaggtgctttcagcttccgtcacagtttctttgtttctcgagccgaagccgaaagcaaggaacagaaccgcgacggcgcatatcaaaacgggaatcagagtttttttgtgtaaaaaccgttttttcagttctttcaggtcaaattttttctgtctcattcaaacgtcacctcgcacccgaaaatctcgcggagacgtgccgcaagaccgtcgtttttttcggtgcccagcgtcagtttttccacgcttttgccgttctgcgaaacaatctgcacggaagatgccgtaacgccgtattcctcgcatatttccgaaacgtgctcttcgcaggctttgcggaatgcgtagtcggacatatcgtcatacgccacgggtgcggacggaggaaattcaaagccgtccgaaagagtgaatgcaccgagtacgcagacaacgacaaaaagggagcagagcgcgccgagatcgcccgcctttttcggcagcagacattcgagaagagcgcaaaccacacagagaacaatgacggtgaaaaaaaattcgttcatcacatcaccaacccaagactgataatgacaagcacgccgacgcctgcggcaagcgcggcaacgagagaatacgcgtcgcaaacgacagagaaaaaacggcgcatacggtcaagcccgaacatttccgcaacagcacccgaaaccgaagacaaaagccacagcacgccgacggtgaccagcggtgaaaagagcagtaaaacaacggcgaccgcgccgaacaccccgatattttttgcgacggcttccgcgcttgcaaacacggcggacattgattcgcctatgcttccgcctacgacggggataccgttacccacagcataagcggcggaacggacggaagttgcatcagcacccgacgcaagcgcatgccgtgcaccgacggaaagagagaaaacgagagagcagacgccgagcgcggaaacgcagatttttttaagcgttttggacagcgaataaagagccccgttcgacaagacggaagaggtcacgcctattgcgaaaaacgtattaacgcatggaacgacaagttccgtcccgacaaaagacaacgcggaaaacagcactcccgtttcgacagaagccgctgcggcacgggcggctcgtcccgacgcaccgacacatgaaagcaggacggggaaaagagactgaccgaacgcgcagacgtcgcttatcgaggtgcgaacggcggatgaaacgtcaaaaaccgaaacgaaagtcgaaacaagcgaaccgaacgcgaaaacggcgcaaagcgttttttgaagaggactgtctttgtccgacaaaagagcattcaaaagataaagcgcgacaagaaaggcaagagttgccaaaaacggaacgaccgccgccgaaaaagcctttttgagtgcggataacagcaacgaaaacacgttaccgaggtcaaggaaatctgcggtgttttcggctgtcagaccgtattcgcgaacgctttcgggcaacgcatcttctacgtccgcaagtccttgttcaagagattccgcgtaggttgaaaacggcaatgtaagcgtaaaaacaaggacaatcgcaatgacaaaaacctttttcagcacaggatctcaccaaccgtatcaataaacgaagtcacgaggggcaagcatgtgaccagaacaagtattctgccgacaaaagtaaccttgtccgcaagtcctttttcgcccatatcggcacagacggacgcgccgaaagcggttatgtaccctattccgacacatttgagcagaacgccgagaccctccgccgcagtcggcgtttttgcgacaagtccgcgaagatacgaaacaagatacgttatatccgaaacggcggaaagcaaaacgataacgcctgcggcaacggaaacggcaagcgccgccgcaccgttttcttttttcagaacaagcgtcatcatcacggcggcaagagcgatgccgacgacccgaagcgcactcataatccgaatgcggagcgcatggctccgaaaaggtcggtcagactgccgagcaggacgagtattacaacaataagtcccgcaacggtcacgagcatggcatactctcccctgtccgtttttgtcagcagttgatttagcagcgcaactatcaagcccacggcggctatcttaaacaaaatggagatgtccattcaaaactcctaaataaagattataacaagtgccgcacctgccaaaagtccgaacacggcatacggtcttgcatattttgtcttgtccgcgtccgcttccgcaaacagtttttctgcggcttcgcgcacggaagaaacaagcgtcagttgattttcggtgtcagtctttccgaactccgaaaaaaacgtgtcgagcaaggcgacatcctgtgcaagaaagcccgtccgcgcaagatttttttcaacggaatcgcgatatgttttttccgtgtccgcaagcggtgtcacgccgtcaaacagagaaaaatccgaacgttcgactatctttgccgtcggagggttctccgttttcagaagcgtttccgcaaaatcaaggaacgctataaattccgaaagcgacttacgacgtttttcgagcgaaaacgcacgaaggagccctactgaacagcagcagacgaagaccaccgtcaaaagaaaaattttcacagcgtcaacacctctctgatatgcgtgggacagggcaaactgtcgagaaatatgactgtttcgacgagtttttcgcctataagttcgcgaagcacggcatttttcatcatttcgcaagcgtcggcgcaatgcagggtcacaacaaacggcacgccacgcgcaaacaaaaaacgcagagcggaaaggtcgtccccgttgcctatttcgtcgcagacgaccgcatcgggacagaatgcgcgaacggcgctttccataccgaacgctttcggataaccgtcgaaaacagacgtcagcgcaccgacgtcaaagccgtgaacgccgtttttcatggcggctatttcggagcgtgtgtcaacgacacagacacgaaaaccttttgcggaaagcagacgcgacaggtctcggacgaaagtcgtttttccgcagccggggcgcgacgctatcacggtattttttattcgtttgccgtccgttatataccgcgctccgagttcggcacagccgaaaaatgcgtgagccacgcgataatcgagcgacgaaatattttttacgcgcagaacctgtccctcatcggtaacggcgctgccgcaaaccccgacgcgatgcccgccgtcaagaggaataaacccatcccgtatgcgcgaagcataagtatggacggagtattcgcaggcgcgcagaaaacattcgtcaaaaatctcgtccgatatgcgtatcggattgccgtcggcacgtcccacggaagaagggaacacgttcttaccgccgatgtcaaaactcagaaaacccgaacgggaaagtcttatctgacgaagcccgtccccgctgcgggcaaaagtgcgtccgacaaccgcggacagcggatatgggaaatatttttcggtatcaaaatcattcatcttgttccattcatattaaaccgtgttcggaattattcgtaacatttcgaaaacggggttgacatttggcaagccgtcggtatataataatcagtaatattaaaaagaaatcaaggagaatcgttatggcatttatattcgaagaaccctctcgcacattcggagaatacctgctcgttcccggttattcttccgcagaatgcattccgtcaaatgtcagccttaaaacgcctttggtcaagtaccgcaaaggcgaagaacccgcaatctcgctcaatattcctctcgtttccgccatcatgcaggcggtttccgacgacagaatggcgatagcactcgcacaggagggcggcatatcgtttatctacggttcacagtccatcgaatccgaagcgcagatggttgcccgagtaaagaatcacaaagcgggatttgttacaagcgattccaaccttacgcccgacgcaacacttgcggacgttatagatttgaaagcaaaactcggtcactcgaccatggcggtaacggaagacggcacgccgaacggcaaattgctcggcatagtaacttcaagagactaccgtgtttcgagaatgagccccgacaccaaagtcaaagagtttatgacgccgttttcaaaactcgtttacggcaacgaatcgacaacgctcaaaaccgcgaacgacataatatgggacaacaaactcaattccctgccgataatcgacaaaaacggcaatctcaaatatttcgtattcagaaaagactacgactcgcacaaggaaaacgcgcttgaactgctggactctcagaagcgttatgttgtcggcgcgggtatcaacacaagagactttgagcagcgtgttcccgcccttatcgaagcgggcgcggacgtgctttgcatagattcttccgagggcttttccgaatggcaggccagaactctcggttggataaaaaagacctacggagatactgttaaggtcggcgcgggcaacgttgtggacaaagagggctttgacttccttgccgaagcgggcgcagactttatcaaagtcggcatcggcggcggttcaatctgcataacaagagagcagaaaggtataggcagaggtcaggcaacagctgttatggaagttgcaaaagcgcgtgacgaatattttgaaaagacgggcgtttatattcccgtttgcgccgacggcggcattgtttacgattatcacatgacgcttgcacttgcaatgggcgcggacttcatcatgctcggcagatactttgcgcgtttcgatgaatcaccctcaaacaaagtcaacataaacggaagttatatgaaagagtattggggcgagggcagcgcaagagcaagaaactggcagcgttacgacatgggaggcgcggctaaactctcgtttgaagaaggcgttgactcctatgttccctatgcaggtccgctcaaagacaacgtaggactttcattgagcaaggttcgttccacgatgtgtaactgcggagcgctctccattcccgaattgcagaaaaaggcgaaaatcaccgttgtttcggcaacaagcatcgtcgagggcggagcgcacgatgtcatgctcaaagaaaaacagcaattcaaaggctgataaaaaaccttttatatacgaaaagacaggcatttttcagatgtctgtctttttctgtcacattttgcacaagctttcatacgggaaacaatcggcaaattaagatttcattaaggtgattgactttaggaaagcctgagtgatataatattttcgtaaacggtatttgttcctcgaaggacttcaaaaaacttgttttgggagagaaaaaaatgaaaagaatcatacccctttttctgtgcttgatatttgtgctttcttcctgcggagttaactcgccttataaaaatgtcaaattgccttttgacggcaatttatatttttcaatgagcttttccgacttgaaaaatgtgtgcggcaacccaaaggaagtcaaagaccgcacggaagtctcaaaaacaaaatattatttgtatgaacagaatgttttcggaagaaaagcgagcgtcggctacggctttttcgaaacgcttctttcgtccgagctcgtaaatgtgaccgttacttttgattcgataaccaaagacgaagcggcttccgttctgcaacagttttcctccgttttttcgaaagaggcggcggaaatcgagggatacaaaaacaccttcgaagaacagcacggtcaaacgaattgcaccttcgccgtcggaaacggagcgacaggcttggagttcagaaccgattatgacggcaaaacgctttcaatcgtcggaattgcttcttattaggattaaaacggctcggcgtttttcgggttcggtcgtacctgcttcaaaaaaagagataaaaaattcggctatccgtccgagagggcggatagccgttcttgttttttgaaaaatcggaaaacgcgaattccgaaaagttacggtcggcgtcagttctgttttctgacggtcaaatattcgtcgccgttgcgataatatgggcaagtcggattttttcgcatttgcaggcggattatgtcgtcctcgtccaaatacatcgtgcacatatattcttcgtaatcttcgtcgtaaatataataaagacaactcggacagtcggcgtaaggcgcgtcattttccgattttttctttttgtctttctcttgcatatttgcaatcccctttcagcgcacagttttcgcaatcgggacgctgcgccttgcaaacggcgcgtccgtgagatacgagagcatggcagaacgtcatactcttttcgggaggaagcacggcacgcagatcgcgttcgacgactgcgggattcgtgctttgactgtaaccgagcctgtttgacagccgtatgcaatgagtgtccgcaacaactgagccctttgcaccgtacacttcgccgagaatgagatttgcaatctttctccctacccccggcaggcgcaaaagatcctgcatattgtcgggcactttgccgtcaaactcatcaagaatcatttgcgacatcgcttttatatcacgcgcttttgtgtgaaaaagaccgcatgagcggatataattttctatctcttcgacgggcgcagacgcaaaatcctcgggcgttttaagttttttgaacatttccgcagtgacgatattgacgcgaacgtcggtgcattgcgccgaaagacgcgaagcgaccagcagttcaaacgggtcgcggtattcaagcgcgcattcgccctgcgggtacagttcaagaattttttcagtcagtttttgattttttctcatcgttttttattgcgtcccaatattttttcgccgcctgttcggttttgttctcacccgcaatatagtaaacggcattttttatcttcgtgggcagatactgctgtttgacgtagtggttcggatacgaatgcgggtatttgtagcccgtgccgtgtccgagtttttttgcgcccgaataatgtgcgtcgcgcaagtctgcggggatgtcgccgcattccgtgttttccacgtcggaaattgccgcgtctatcgcatttatgacggagttagacttcggcgcggtggcaagcagaataacagcctccgcaagcggtatccgagcctcgggaaaaccgagttggagcgcgctgtcaacgcaggtttttgtcacagcagccgcaagcggataagcaagtccgatatcctccgaagcgataacgagcagacggcggcatatcgacgcaaggtcgccgccttttataagccgcgcaagatagtgcagcgcggcgttttcgtccgaaccgcgaatggatttctgaaatgcggaaagtatgtcataatgcatatccccgtcacggtcgtaacggatattactcttctgcgcgacggatacggcatcttcaagagtgaccgtaaccgacttttgccccggttttcgggctgtcagcacttcaacgctgtttatagacttacgaacatcgccgccgcaagcggacgcgatgtattcgacaacgccgtcctcaaccgtaagatccaccttatcctcgtcgcgcacaaagtcaaacgccctgcgcacggctttttcaatgtccttgcccgaaacaggtttgaactcaaacacagttgaacggctcaaaattgcagaatagacgtaaaaatacggattctctgcggtagatgcgatgagcgtgatacttccgtcctcgataaactcgagaagcacctgttgctgtttttttgtgaaatactggatttcgtcgatataaatgattattccgttctcgtttccgagcgcgccgatgtcggaaataacgcttttgatgtcgcttgtcgaggcggtcgtcgcattcagtttataaagcgttttgtcggtcttttcggcgattatgctggcaagcgtggtttttccgatgcccgaatagccgtaaaatatcatattgggaaccgaaccgctctcgataatcttgtaaagcggttttccctttcctatcaaatgctgttgaccgaccatatcctctattctgtgaggacgaagccttgcggcaagcggcgtatacatttcgtttcctccgtgcgggcgaaataccttttaatcttcgtaaatcgggtgttttttgcagagagcatctacttttgcaagaatgttctcctttgtgtcgttgcccgaagcgacattgtaaacacactctgcaacaactctcatatcgtcctcgttgaaacctctcgaagtaactgcgggagttccgagacggataccgcttgttataaacggcgactgcgggtcgttgggaatcgcgtttttgtttgcggttatgcgtacttcgtcgagctttttctccatttctttgcccgttacattgaaggtgcgcagatcgacaagaataaggtggttgtcgctgccgccgctgacaaggtcaaagccgtagccgagaagcgcgtcggcaagtgctttcgaattggcaagcacctgtttctgatattccttgaattcaggtttgagagcttctccgaaacaaaccgctttgcccgctatgacgtgcatcagaggtccgccctgcgttccgggaaatatcgccttgtctatcgcctttgcgaactcttctttgcacattatcatacctccgcggggaccgcgaagcgttttgtgcgtggtcgtggtaactatatccgcaaacgggaacggcgacgggtgaagccccgcggcaacaagtcccgcgatgtgcgccatatcgaccataagaagcgcgccgtttgcgtgtgctatgtttgcaatgcgctcaaaatcaataactctcggatatgcacttgcacccgcaacaacaagtttgggtttatgctcttttacaagcgcttcaagagcgtcgtaatcaagtctacccgtttcggaatttatgccgtaaggaacaaagttataatatttgcccgacatattaacgggtgaaccgtgggtcaggtgtccgccctcggcaaggctcattccgagcaccgtgtcgccgggattcagaagcgcaaaataaacggcaaggtttgcctgcgcacccgaatggggctgcacgttgacgtgttccgcgccaaaaagtttttttgctctgtctcgggcgatattctccacaatatcaacgcactcacagccgccgtaatatctttttccgggatagccctcggcatatttattcgtcaggaccgaacccattgccttcaaaacggcttccgaaacgatattctcggatgcgataagttcaatgttgtgacgctgtctgtcaagttccttttgcattgcctgtccgacctcggggtcgtaatcgcaaagataatcaatattttccatttatatactcctccattgttcataaatctatattacatataagtatatcatcaaataaaagatttgtaaagtacctttgcaaaaattcgtttttcaatcaaagcaaaaaaccggtcgccgcaagttgcggc

SEQ ID NO: 387 - DNA, 7680 bp, Unknown
  16S sequences of unknown bacteria
gacccctcaccgcagtgagatttaatcaatctgaaagacggcagtctttcttctccattcttcacttaggatttaagtgaaacttacatcagggaagtctcttagaatacccccgtcgtctaaggtaaagaaaattgctgcgctctttcttagccctccgcaggagaaacctcaagcatttcgcaaaaatttatactttattttcgtttagcttctttactacacggcgttttgactgtataatatagtagtataaatattttcaggaaaggtattgcattatgaatacatccgaacttaaaaagaaaatcctcgagggcggtatcgactctaccctctgctccgagctgtccgtccttcccgataacgtccccgctcagagagaaagatatgctcgcgctgtcgatgagtttgaaaagctctacggcgacggagacgtttccctctattccgtcggcggcagaagcgagatctccggcaaccataccgaccataaccacggtagagttatcgcggcggctgtcaacctcgatatcctcgcggtagtaaagcccgcaggcgacggcacgatccgcattaaatccgaaggcttcgacgaagacgttgttccgaaggaagccgtagaagctcccgacgagaaaaaattcttcacctccgcagccatcatcgcgggcatggaaaaggcttttcttaacgctggctacaaaatcggcggcttctcggcttataccacatcaaacgtactcaaaggctccggaatcagctcatccgccgcttttgaagtaatggtcggaaatatcctcaactacctctacaacgacggcaaagtctccaacgtcgaaatcgcgaagatggcgcagtacgccgaaaacgtatacttcggtaaaccctgcggacttatggaccagactgcctgcgctgtcggcggattcatcacgatcgacttcgcagaccccacaaaccccgtcatcgaaaagctcgacttcgacctcacaggcgcgggctttgcactttgcatagtaaacaccggcggcaaccacgctgacctcaacgaggactacgcttccgttcccgccgaaatgaagaaggttgcggctaagcttggagtaagcgtgctccgtgagacaagccgtgaagctctcgacaagctcgtctgcgaaaaaggcgtaagagaagagcttggcgaccgcgctatactccgtgcgtaccacttcttcgcggaaaacgagagagtggacaagcaggttaaggctctgaagggcggcgacctcgaaggcttcatgcagggagtaaaggagtcgggtctgtcttcgttcagattcctccagaacgtgtacaccacaaagaacgtgcaggaacagggactttcactcgctctctgcctgaccgaggagttcctcagaggaaagaagggcgtttgcagagtacacggcggcggattcgcaggcacgattcaggcgttcgttgcgctcgaggacgttgcggagtacgcggctaagatgaacgcagtgttcggagacggcgcgtgccacatcctcagcgtaagaaaagccggcgcttgcagggtggactgagaacgacgcaggggaactttttaaaaaaagctcccccgcaccccctaaaaaactgaaaagaattatcaagacaaagttagtctaaatcgcacgaattagaatttgtaggcatgatgcacgacaccttgtccagtgaaaagttttgattgacctttttcaaaaggtcataggttcttaggacaacgtcctaagtcgaactccgcagagttcgaaatctcaggcgtgagaaaagaaagttcctctttttttgctactttttttcctcctcgctaaaggagaaaaaaagtaggatgaacgagctgcacacgcttgattttgtctgctgtaggataaatttcagaataaacaaacgccctgcacccgcttgattttgtcacaccccccaccacatcatgccaatgcccacatcaatacataacatatgaaacaaaccccacaatccccggggaataaggctctgcgtaaaatcggcattcttctgctcaacttcgctctgttttatgccctcctccgacttgtcatcaccctcgccgaaagaacgggtcagctctggatctactacgccggaactaccctctatgccctattcggcgcaggctgcttcgtcgctttctatgttttaaacggctttaccttcaaccgcgaggaacgtacaatcgacgagctgcccgaaaaatggtcgagcgacaggaaaatggagttcctcggaaaacaaaccgaaaataaacaaagggcgcagaggctcgtctatatcaccctgccaatgctcctcaccctcgccgtcagctatatagagctaatgttttttaagtgatgttaaaaattaaaatagtcgctatgggcaagctcaccgaacccgccttcaaagcagcgtccgacgagtatctcgcacggctgaataaaaatttctccgtcaccgtagccgaaccgaaacccgaacccctcccccaaaacccatccgataacgcgataaagctcgccctcgataaggaagcggacaaaatcctcgccgaaatttccccgcgctccgctctcgttgccatgtgcgtcgagggaaaagagctgtcctcggaggaattttcacagaggctctccgacttcgcgctgtccggcttttccgaggtcgcgttcgtcatcggctcgtcccacggtctctcggataaggtcaaaaacgcggctaagctgaagctttccgtctcgaaaatgaccttcccccatgagctgttccgcgtgatgctgcttgagcaaatctaccgcgcgggcgaaatacagtccggctcaaagtaccataaataattatgaacaattttccccataaactcaggcacctcgcggcgttcgtcctcatcttcggcgtggcggctctcgttatcctctacttcctcggttactatgacctctcgttcctcgacagatataaaatcttcgcacaggatgataacgcgaccgaaaccgacagctcagacgtcttctcttccctcgccggactgaaaccggactccgatgaaacttctgcggagacttcacaagagacaaaaggcacgcaaagctcctactcctacgccgacagaacgacaaacgtaaagaaagcctactccgccgacgagcttgaggacagaactatcgccgtcccccgcgtgtctctgcgacttgacgagggatataccccgtccgcgacgtttaccacagggtcggtgctcgcgaaaatgacctttgactataagctcccacaaaaattcgcgcttagtaagagaaccgccgaaaaaaataccgtcgtttaccccgaggacgactccgaaccttatgtcgccaccaaaaccggagcagaaatacgccccgcagtcgaggtctacatgggatatatcctcatggacagcggcgacgagattttcctaatagactccgacggaaacgcgctctcccgctacgcctacgataaatattcgcccgcgtatatgagggacaaaagcggcaatcccatgttcatgcgcaccgacgaggacggaaaaaagctttactataccctatccgacgacggaaaaagcttcgtcccgtgcgatatctccgccgacggcgacaacgtgggactgtatttcgactaccccgcctcgttcggtaagtccgactccacagcagtctaccccgaaaaatactcggtcgatgagggagaaacacccgacgcaagactcactgacctctgggcttatgccgtgaagaacgcggacggagagaaaacaggtatgctcaccgagtataggttcaaaaccgcgcataactttaccctgaaccgcggagctgtcatcgagaataactccgagcgcgactccatgtcatttgtcgacgaaaacggcagaaaagccttcgataatacccgcgtctacgtcaatcagtacgacaggtacgtcaaggatttcctgctgccccccatgacaaacggaatcgagagcataggcttctactacttcgacagcggacttacaagagtgagactacagacagtagactactataactacgccgtgagaggtgtcgtaagagtggtcgaggacagggatatcctcatccacccagacggaagcgagtacgatctccccgcaggctataccatgacgggatattccgagggcgcggtcgtactgaaacgtgactccgacggtatgtacggcgtgctcagcgtcgagggcgagtggattgctcagccgatttataaaagtgcaaccccgttcatcggcggactcgcaacactccagaccgacgacggcaggtacggcatgatagacaagagcggaaacatcgtgctcccgttcacctacgactacgtgtcgcagaattcgagcggcgtcgtgtcggcgttcagaaacgaaaacggctggagcgtgtttaaggtcatgagaaaaactaaaattttgggatgaaatcttccccccattaaccaaataaatcatatcatttgattaaataaaatcacagaatacgaaaggtataccacaatgtcaatcttcggaaagaaaaataaccctaaggaaaacgaaaataaaaacgaaaataacgcggctgaagaagctaaggcaactcccgcagctgaagaaaaagaagaacccatagccgcacccatccccgacgctactatgacgtcagttaatcccgaaaaaccccgctaccatacacccgagggattcgacttcaatagatacttcctcgccgagagaagaatcgtcctcgataacgtaagctacgaaaccacaagacctacaccaggaactgctcagttcaagctcggcgtaaaggataccatcgtcgcgcaggtcatgggtcaggctggagttaagactacaatcaatagaacgctcagattcgaccccgacggaccgttcgtgctttccgtgtcgttcgcggtgatgctcgtgttcaaccccggaacgagagacgagatcgactggcatacgatagacctcgcggacgagtttaagaagaactgccccgtgcttgttcagcagatgagcgcaaaggcggctcttgtcgtcgcggagcttaccgcacagaacggcggcgtcccgataattccgatgaagtaacaggcgcacgttgtgtagcttaaatttagacaatagtaaacatgatgcacgacaccttgcccagttgaaagttttgattgacctttttcaaaaggtcatagggtcaagggacaaagtcctttgtcgaactccgcagagttcgaaacacccaagacttccaagaaagttcctcttttttgcttctttggcatttacttgtaaatgcactcctcgctaaaggagaaaaaagaagaacgagggaattgcaaccgctaaaaattcatctgactaaagttaaattttcagcataaactaaacccaagcactatctctatttaaaccaaataccgccgaagaatcccgtttgacgctgcttttgtcgttgccgcgggattctttgagctttgttaatataaaaggaaaacatgagaaaatcaacaaaacaaaccacccccgcttataataatcagtcgattacctcactaaaaggcgcggatagagtacgaaaacgccccgctgtcatattcggctcggacggtcttgaaggctgcgagcattccgtattcgaaatcctctcaaactcggtagatgaagcccgcgaaggctacggtaaggatatcatcatcactgcctaccgcgatcactccgtcgaggtcgaggacttcggccgcggaatcccgctcggttggaacgagggtgagcagagatggaactgggacctcgtctactgcgaactgtacgcgggcggcaagtaccagaataactccgactccggcgcgtatgaatactccctcggactgaacggtctcggcgcgtgcgctacacagtattcaagcagctattttaaagtaaaatcctataacggcgcggaagtctccgaaatcagcttcgagaagggcaaacccgtcacagagctgcaagtccgtaccctcgacaaaaaggaaagacgcaccggcacggtccagcgatggctccccgacctcgaggtcttcaccgatataaacatcccccgcgaatattactccgacatgctcaaaagacaggcggtcgtcaattccggcatacgcttcatcttccgttgggaaaacaacgacggctcgttcgcggaggaaaatttctactacgaaaacggaatcaccgactacatcgccgagcttgccggagacaccgcggagacaaaaattgccaaattccaccttgaaaccaaaggacgcgacagggaagacatgaaggactacaagctcgtcgcggatatcgccttcaccgtctcaaagcaggtcaacgtaatcgaatattaccataactccagcttcctcgagcacggcggctcccccgaaaaggcagtcaagctctcgttcgtctacgccatagacaagcggctcaaggcgacggggaagtacaacaaaaacgagtcaaaaatcaccttcgccgacgttgaggactgcctgattctcgtcacaaacagcttttccacacaaacctcctacgccaaccagacaaaaaaggcaataaccaacacctttatagccgacgcgatgaacgagtttttacgcaatcagcttgaatatttcttcgcggaaaatccggtcgacgcggacaggctctgcggacaggttctcgtgaacaagcgctcccgcgagcaggcggaatccacccgaatgaacctgaaaaagaagctcgccgcctcaacggacgtgtcgaacagggtggagaagtttgtagcctgccgctcgaaggatccggagctgcgcgaggtctatatagtcgagggagactccgctatgacgtcctgcaagctggcgagaaacgcggaatttcaggcgataatcccggtgcgcggcaaaactctgaactgcataaaggcgtcctacgagaggattttcaaaagcgacatcatctgcgacctgctgagagtaatcggctgcggagtggagctgcaagggaagcacaagacggacatggcggcgtttgacatagcgaacctgcgctggaacaagattattatctgtacggatgcggacgaggacggcttccagattcggacactgctcctgacgctgttctaccgcctgctgccgactcttctccgcgagggaaaggtgtacattgcggaaactccgctgtttgagataacaccgaacaagggcgagatagagttcgcgtacaacgaattcgagaaaaacgagatagtgaagcggctcgaagctgcgggcaaaaagtatactttgcagcggtcaaagggacttggcgaaaactccgccgacatgatggcgaagacgacgatgaatcccgcgtcgcgcaggctgattcgagtaatgccctccgacgcggcggctacagcggagatgtttgacataatgctcggcgacaatctccccggaagaaagcggtacattgccgagcacgggcacgaatacatgaaggacgcggatgtgtgatggaaggacgcagtcctttctaccttagacaacttgagttttctatgaaactttccttgaatgaagtttcacttaaatcctaagtgagggaatagaagaaagagctgcgctctt

SEQ ID NO: 388 - DNA, 9591 bp, Unknown
  16S sequences of unknown bacteria
cggatgaaaatatcatcaagcgtttgagcggccggcgcgtgtgcaaggcatgcggtgcaacttatcatgtggacaaccacaaagaagctacctgcgatacctgcggcggagagctgatccagcgtaccgacgatgcaccggaaacggtggcaaatcgtttacgtgtgtaccatgaacagaccagccccttgattgatttctatcaggcaaagggtgttttgaaatctgtggatggtacgcgcagcatcgatgatgtatttgcagacatctgtgcgatcctggataaggaatttggcaaatgatcaagctgaaatcggaacgtgagattcacctaatgcgtcaggcaggcgctgttgccgcgcaggcgatggagctggtgggaaagtccattcggccagggatgactacacaagaggtagatgatatcttttggcactatgtccgctcccgtggcggcaaggcttccttctatcactatggtggatttcccggacatatctgtatttctatcaatgatgagatcgtgcatggcattccgggcgatcgtgtgattcaggaaggggatatcgtttcggtagacctgggcgtggaattgcacggctatcaatcggatatggcacgaaccttttttgcaggcgattgctctgcagaggcgcggcggttggtggaagttacagaacaaagcttttttgaggcgctgaagttttgctacccgggcaaacgcttgggggatatcgggcatgctgtgcaagcattggccgaggaaaacgggtattccgttgtgcgtgtattgacaggacatggcataggcaaacagctccatgaggacccggaggtgcgcaactacggaaagcctaatacaggagaagtgctcaaagaaggcatggttttagccattgaaccgatggtcaacgaaggaacgcaccgtgtttatgaattggatgacgactggacctgcgtaacggcagacgggaagctatccgcacattatgagaacacggtagcgattaccaaagatggaccagttattttgaccgctttgccggaggaatcctgatggaagaaaaaatttctctgggaagtgttgtaaaaagcaaacaagggcgagacaaaggcaagtattttatggtatactcatacgatggttgccaatatgtaaaccttgtggatggcgtttaccgaaaacagcaagcgccaaagcgaaaaaagatcaaacatattgatttaacaggaaccattttggaaggacttgcggaaaagctgcaaggcggcattcatgtgtttgatgccgagatccaaaaggctctgaaagaggcgggcttttccaacaaggccgcggagatgcaaaaggagggccaacttgtccaagagtgatgtaattgaagtagaaggccgtgtaacggacgcgtttcccaacgccacgtttgaagtagagcttccgaacggccataaggtattggcgcatatttccggaaaactgaggatgcattacatccgcattttgccgggagataaggttaccattgaactatcgccctacgacctttcccgcggtagaatcacctggcgcggcaagggccgctaagttgtaaggaggaatcaccatgaaagtacgtccttcggtcaaaccgatgtgcgaaaagtgtaagatcatccgccggcacggcaaggtgatggtcatctgcacaaacccgaaacacaagcaaaagcaaggctaaaatccctcgcgcgggcggctgaagcgggtttattccccaccgcgcgtttgtatacatgaatttttctgggaggtgttcatacacatatggcacgtattgcaggcatcgacttgccgaaagaaaagcgagtcgaaatagggctgacatacatctacggcatcggccgtaagacagctcaaaagatcctcgaagcgaccggtgtggatccggacatcagagttcgcgacctaaccgaagaacaagaggctcttttgcgtgattatatcgacaaaaacattcaggtcgaaggcgatctgcgccgtgaagttcagctgaacatcaagcgtttgatcgaaatcggctgctatagaggcattcgccatcgccgcggcctacccgtacgcggacagagcacaaagcagaatgcacgtacccgcaaaggtccgaaaaagaccgtaagcggcagaaagaagtaaaggagggagtatcatggcagcaccgaagcagaaaaaacgcaccacgacccgcaaacgtcgtgaacgcaagaacgtggagcgaggacaggtccatatccactcctccttcaacaataccatcgttaccatcacggacatgggcggcaatgcaatttcctgggctagctccggcggcttaggattccgtggaagccgcaagagcacgccgtttgccgcgcagaccgcagcggaaacggccgccaaggctgcaaaagagcatggcctgcgtaccgtggaagtgtatgtaaagggaccgggttccagccgcgaggctgcgattcgttcgcttcaggcagttggcctggaggttaccctgatcaaggatacgacacccattccgcacaatggatgccgtccaccgaaacgccgccgcgtctaagataaggaggagaaagcaaagatggcaagatatacagattctgtttgccggcaatgccgccgggaaggcgcaaagctcttccttaagggggatcgttgttttggagcgaaatgtgcgattgtaaaacgccccacgcccccgggacagcatggcgttagccgcaaaaaacaaagccagtatggcattcagctgcgcgagaagcaaaaagcgcgccgtgcctatggtgtattggaaggacaattccgcggatacttccagcaagctagccgcatgaggggcgtaacgggtgaaaacctgttgatgctgctggaacgccgcttggataacgtagtgtaccgtttgggcatgggcgacagccgtgcgcatgcgcgccagctggtcacccatggacatattcgtgtaaacgggaagaaggtaaacattccgtctttccgcgtaaagctaaatgacgaaattacaatccgttccgggtcccaaagcatggagaacctgaaacagcttcgtgaagaaggaaaccgcatggttccaaaatggttgtccttggatcacgaaaatctggtgggcaaggtcatcgctatgccgcagcgtgacgatatcgacctgaccattgaagagcaccagattgttgagctctactccagataacacccttgacccataggggggaaaaagcaaaggaggagcaacacgtatgatcgaaatcgaaaagccgaaccttgaaagcgtgatcttagaacctacgtatggcaaatttgtcgtggaaccgctggaacgcggttttggaacgacgctgggcaattccctgcgtcgtatcctgctctcttcgcttccgggcgtggcggctaccaatgtgcgtattgacggtgtgttgcacgaattcagcacgattccgggcgttaaagaagatgtgacggatattgtgttgagcttgaagcgtatctcggttctcttgcattcagagggcccgaaaaccctccggatcgagaaaaagggtccctgtgaagtaacagcgggagactttgcttcggatgcagaggtagagattttgaatcctgatctgcatattgcaacgctgggcgatgacgctgtgctgaatatggaggtcaacattgaacatggccgcggctatgtatatgctgacaaaaataagaagcagggccagcccattggggtcattgccattgattcgatcttcacgcctgtaaccaaagtgaatttcactgtggaaaacacgcgtgtaggccaagtcacggactatgataaactgacgctggaagtttggacggacggcacgatctcgccggaagaagccgcttccttggcagccaaaatcatgagcgaacatctgatgctgtttatcaacctgacggaccatgtaggagatgtcgagatcatggtgcagaaggaagatgagcgcagagacggcgtttatgaaaaatccatcgatgatctggatctttccgtgcgcagttataactgcctaaaacgggcgggcattagttcggtagaggaactggtcaagatgactgaggaagaaatgatgaaagtgcgcaatttggggcgtaagtcgctggaagaagtccagcaaaagctggaagaactcgggctttccctccgcgcaagcgatgattaaagaggaggaacgtacactatggcataccgtaagcttggccgcagaagcgaccaaaggaaagccattttgcgcaacctaacgacggcgctgctctggaacggtaagatcgagaccaccgaagcccgcgccaaggaagtgcgcagcattgctgaaaagttgattactcttgcaatcaaagagtataacaatacggaaatcgtaaccaaaaacggcgaacaatacaccaacgacgctcctagcaagctggcggcgagacgtcagatgttggcgtacctgtacaatgtaccggaagcaaaaggcgaaaaagaatccaaatcggattataaggcacgtaccagtgacgtgaaaaatccggttgtagaaaagcttttccgtgaaatcgctccgaagtacgagaagcgtgcacaggatctgggccagggcggcggatatacccgtatcatcaagaccggcccacgccgcggcgatgcgtctaacatggccatcgtagaattggtgtaaacagacaagcgaaagggagcccaactggctccctttgtttgtatggaaggggaaaaagccatgaaggcagtagagtgcgaacacctgcaatttcgatacggagagcagcagcctgcactacgcgatttgacctttgatatagagcaaggcgaatacgtggcgattgcagggcgcaacggatgcgggaaatccacactggcccgacatatcaacgcgctgttgcagcccacagagggcgtgatgcgcgtatttggcatggatacaaaagacgaaagtaaaacgctggagattcgcaaacgcgcggggatgatttttcaaaacccggacaatcagattgtggcctcggtggtagaggaggatgtggcgtttgggccggaaaacttaggcgtgccaaccgaagagatccgaaagcgtgtggatcaagcgctggcgcagacaggaatgacgtcatttgccaaacgcgcgccgcatacgttgtctggcggacaaaagcaaagggtgggcatcgccggtgtattggccatgcagccgcagcttatcattttggacgaaccgacctccatgctggacccgagcggccgtgagtccgtgatgcaaacgttggatgagcttcacgaaagcggcatcacattgatccatatcacccattccatggacgaggcgctgaaagcacagcgcatgatcgtcatggatgcaggcaggattgtactggacagtacaccggaagagatatttaccaaccacgcagacgagctggtatcctgggggctggagcttccgatgttgatggaaacagcgtatgagtgcaggcagcgtgggctggatgttggcgcaggactttcaatggaagagatggtggagcagatatgtcaattgtgatagagaacctttgccatgtctacgggaaaggcacgccgtttttggtggaagcgctcaaggatgtttcgctagaaatcgaaaaaggacagctaaccggtatcattggccatacaggaagcggaaaatctacgctggcccagcatttgaacggattggaacaggcacaaagcggccgtgttgtggtggacagtgtagaactttcagggaaatatgataaaaaagcgatccgtactaaggtgggtatggtgtttcaatatccagaacagcagctgtttgaggagacagtagtaaaggacatttgctttggcccgaaaaacctgggactgtcggaagaacagcagattgaacgagccaaatcagcgatggctttgatgcagatagagtatgaaacctttgcagagcgttcgccctttgatctatccggtggacaaaaaaggagagtagccatcgcaggggttttggcgatggagccggactatctggtgttggacgagccaacagcaggcctagacccagaagcgcgcagaaaccttttgacgatcatccgcaggctgccggaacaaaccggcatgggtgtgctgatggtatcccattctatggaagatatggccatgtatgcggacaagttggccgtgatgcaccaggggaaattggtgcgctttggaacaccggaagagattttttctcatgaagaggaattaaggcaggctggcttggcggtcccgacgttgagcaggctgacaaaggcattgcaggccagggggataaaggtgcccttttcgcgcaatcccatggagtttgccgctcatttgaaaaaagcgctggaggggaggcaaaaccatggcgatgagtgatatgacattgggtcagtattttcccgctgagtccgtaatccataggctggatgcgcggatcaaaatcgtactggcaatcgcctttatggtgctggcctttttggtaagcacgctccagggatatggcatggtgctgggccttctggcagtgacgattttgctatcccacgtgccgatccgatttgtcttgaagggcctaaagccaattctatttattttaatttttacatttgttttgaacctctttttaacgccgggacagacggtgtgggtacactggtggatctttaccatcacgaaggagagcctgctatttgccgttcagatgtctgtacgcttggcgttgctggtggccggaacttcgatgctgacgttgacaaccgcgccgctgcagcttacagacgggctggaatcgctgctgagaccgcttaaggcgattcgctttccggtccatgaaatggcgatgatgatgtcgattgccttacgctttatcccgacgttggcagaggaggcggatcgcatccgcaaggcacaggcggccaggggcgcggactttgatacgggcggactttttaaacgggcggctagcttgattcccctgttggtgccattgtttgtgggtgcgtttcggagggcagaagagcttgctacggctatggaagcgcgctgctatcacgggggagaaggccgcacaaaactcactgtaatgcacatgggagggcgcgactatattagcttattgatcatggtagcggcctacttgcttgctacagtaggagggttttgatgcgcatcaagctgatcgttgaatttgatggcacggaatatgccggttggcagcggcaaaacaacgccgttacagtgcaacagaggctggaggaagcgttggaacggctgtttggtagtccggtatgcgtacagggcgccagccgaacagatgccggcgtacacgcagcagggatggtatgccattttgacatagagaccaaaataccgccggaacgcattgcgtatgcgctgaattttacgctgcctaaggatatacgcatcagagaatcgtcgagggtatcggatacgtttcatgcgaggtttgatgcgaaggcaaaatggtatcggtataccatctataaccataagcatgccagcgcactgaaccgcaggatggtggcgcatgtgccctatgcgctagagcctttgaaaatgcagcgggcgctgggtacgctactgggccggcatgattttgccgcttttgcggcttcgggaagcgtggtaaaggatacgacaagggagatttactttgcgcagctgcaaaagcgtggcgatcttttggttttggacattgtgggcagtggatttctttataatatggtgcgaatcatcgccggaacgctgattgatataggccgcggcaaactgcaaacggacgcgtttgctaggatgcttcggacaaaggaacgcattcagggtgggatcacagcgccgccgcaaggattgatcttacagcgcgtatattatggcgcgccaccgagctatgaacagtatttgtgcgaaaaaagcatactagatggggtctttcccgcataaaatcgggttttttttaagttttggttgacagaaaacctgcgtttggataaaatatataagcgctgttttgcaccattagccccggagtaaaacgcgaaattagaatcttatcaatttcttctgtacacggccttgctcacccgtggacagagtacaggaggaagtatcctatgaaaacctatatgcctggggaagatgccctggtgcgcaaatggtatgtagtggacgcggaaggcaaaaccttcggccgtctggcaagccgtgttgctcacattttgagaggcaagcataaacctgaatttacgccgcatgcggatatgggcgattatgttatcgtcgtaaacgcagacaagctggtgtttaccggcaacaaattggatcaaaaagtatattaccgccatacagggtatccgggcggtttgaaagaaactacctaccgcaccctgatggaaacccgtcccgaatttgcgctggagcatgctgtaaagggtatgctgccgaaaaattctctgggacgccaaatgattaaaaagctgaaggtctatgcgggcccgaatcataaccatgaagcccagcagcctgaaacgctggaagtgtaaggaggcataacagatggcagcaaaagcgcaatacctgggaaccggcagacggaaaaagagcgtcgcgcgtgtacgcttggtgccgggcaaaggtgctttcattgtaaacaaacgcgatctggaagaatattttggcctggaaaccttgaagatggcagccaaagcgccgttggtggtaaccggtctggaagataaattcgatgtgcacgtcaatgtatgcggcggtggatttaccggacaggcgggtgcgattcgccatggcgtgtctagggcgctgttgcaggcagacgaggatctacgccctgcgttaaagcaggctggattcttgactcgtgatccgcgcatgaaagaacgtaagaaatacggcctcaaggctgcacgtcgcgcgcctcagttcagcaagcgctaaaactgtttcaaaacagctcaaaaaccccgaaaccatgcggttttcggggtttttccttttcagattgtttggcctattttggcatggtctgacctgttttgaaccgatttttatgggttaaataaaggacaaccacccctaaaatgagggctaatgggttaaattataggacaacttttttgcccctgcaccctcccatgaggtcatttttgcatttttgcccctccgaatttttatgcaaaatcggtttggcaaagtttgaccaaatctgaacaaatgaatatgattttattgcgaaagcgctcagtgttcctgctgggcgctttttgcatttccggggattgatgttccgggatcagaaaaagccgtcactctttttaacgaaagaagtggcggctttttctatttccagaaccgaacgcaatcaacagaaacgaggtgaaacataatgaacacgcaaatcatcgccatcgccaaccagaagggcggcgtcggcaaaacgactacttgcgctaacttagggatagggttggcccaggca

SEQ ID NO: 389 - DNA, 2389 bp, Unknown
  16S sequences of unknown bacteria
ggtctttttttgtgtttcgatattcgggaaaaaggagggaaaaatcagacattttttccgatatggatataaaacgcctctcccgagggaaatttcatttccaaatgattggaactcacggaacggatctccgcgatgaagaaatcggacagggcgattcggatctgctcgctgaggtctttgacggtgatgggggatgctgcttcggcgtttttttcttttgcgttgttttgtgcctgggcggaaaactgaggggcgataggggacatttttacctccgaagatgatggaataatttttatggaatttctatatactttaattatatggttttcttacgtctttttcaagcatatttcgacagaaaaaaatgtcgtatttccacttcttttgccgaaatttgtcgaatgcaaattcaacgcattgaatttttgattcaacggggtgaaattatcgaaaagagaaatgggaaggatggttgattcgcgtcattttttgatttgggaaaggaaaagtatttcataataggcataaaaaagaggaggggcggatggaaaccatagagatatttcaagaaaatctgaaagaactcatgcaggataaaaatctcgatattatcggtttatccaaagctgtcggctgcgacaaaacggcgattcgccgttggttttacgggagatattttcctcagccgcagacgcttatcaaacttgcggactatttcgaatgttcggcggactacctcttcgggctgacggattctccggaatttgtgcctcaggagagcgggagcagttttcaagagagatttacggagatgaaaaaggcgctcggcgtcaccgattaccgtatcgccaaagcgtgccacgtgagaaagagcaccgtctgcaaatggaagcgcgtggaaactcccggcacgatcagtttgttcaatctggcaaaatatttcaattgctcgatggaatttctcctcggcagaagcaaggaatagagcgcaaaaggtttcctttgggaaaaaccgcgaaaacaggctcgggcgttttatgtctttgcaaagaggacggaaaacggagaagcaaatcgttttataattctatgcgcttcgcggatacgaaaaggacaagggatacgtaaaatacgcgccgagggatcggcgcgtatttcgttttctatctcgcagtttgtctgcttatgaggataaaggcaggtttgaataggttgctctgctttttatgcgtcgcagcttgtctgctcgtcagaataaaagcgggatggaatacttggttctgttttttatacgcctcaaatcgtccgtcccctaaggggatttcggaatttaaaagtcgatttactttttatgaagcacagctctgtgttcgcagggctaaatcgccgcgggcttcaaaattttgttcgcttttgaagcgaaggcgcgttccgttttcccgcctgcaaggcgtcattttatacgggcgatgtcaaattccgtttcactgaggccttttttcttcgcattccacagttcctcggcggcttgcctgtcctgcggctcccgaatttcgccgataaagtcctctatccaattcacgacggtgcgataatcgttcttcaccgaagccagacagcgcatgacttcgtcgtctttgctctcgtattccgcttctcccaacaggtaaacgacgacgcctctccgccccaatgccgtcgcgatgagcgtgagtcggacgtactcctccgcctctctgcctttacaggaagggtcgaaaaactttttgtccgcctcgccgcataggggaagaaaggaagcgagatcgcgttccgccatttggcttaaaatgtcgttttttcttttgttccgcataattttatttctcctcggtaagatttcaatctattgaaattttcaactatacgatattgtacaccattttcaaaaaaaatgttgcataattgagaagttttataaaaattttttcaatttttttgaaaggggaaggagaaagagggaattcatgcttttttttcgcgggtaggaagcaaaatttttcgctttttcgaataaacggaaaaggcttcgcggggaagaatgtgccgccctccgtttctttacaccgtagtagaacgctccgcctttgtggatagcgcggccgtcctctgctttgtgactgggatcggcgggcgctttattccctgctcctcttttcttcggggctttcgggcggcgggagttctattttccgtttaaaacctgtcggcgggtttctcgttccgacgacgggtgcggacggtttggaaaaagagaacatacactgtattgcataaatgtatatcaatagtaaaaagggttattaaaatattctttgtttaaaaggggtatataaatttatat

SEQ ID NO: 390 - DNA, 6796 bp, Unknown
  16S sequences of unknown bacteria
gcgaggtcctccgcgtcagagcgtgagcttaccctcgcgagacagaacctcaggacaggctccacaaatcgtataagttcattgtcttcccgcattccgccaccatacctttcaaacgttttcctttgattgaaacactgaatatcaaatcagtgtttcctgagatctcgcatatatagtgccggaaatcactttcggataggcaaagagcggaaaattcttccgaattcccgctcttttatttatcagacgtcaatcgattcagcccagccggcgagctccttctcgctgacatttgccgggaagcgcataccgtcgaccagctttgctcccttgcagctcggcgcgagcgcttcgttcgtccttcccatgccgcttgaaccggaggtcgcgaacggtatgaccgtctttcccgtgaggtcatagctctcaaggaaggtgttgatgatagtcggcgcgacataccaccatatcgggaatccgacaaagacctcgtcgtagaccgacatatccttgaccttctccgcgatcgccggtctcgacgccgggttcttcatctcgacagaagagcgggaattcccgtcccgccagtcgagatccgcggcggtgtacggaacctccggctttatctcgaacaggtcagctcccagcgcgtcggcgagcttcctcgcgacctttgcggtaacacccgcggtcgaaaaatacgcgacaagctttttcatgatatcatccatcctttcgttatatgtatttatattctacatcacagattgtcagatgtcaaccgctttgatcattcgccgaaaaaaagttacaatttcccgccttttcagtccgccgccgcttgacaaaaccggtaggcgtatgctataatgaattataacatactgagtgaggtgctcttatgataatcagaaacgctgttatcacgatgatcatatcgtcggttcttctgccattcccgggcatatccgccgatatcagttacactctgacgccggtcagcttcgagggggatgagtattttcttgaccctgaacaatgggaaagcgacgccggctgggacaccgcgcacatgatgaaaaacgggtgtgtcctgatagctcactcccgttcaagaggcatggggctcgactaccgcgactactacatcaagaccgcggacggcagagacgcgctcccggacgacggtcgcaactgctaccgcgcggtactcgaaaccgacgacggaaggtgtttcgtcactgatatgaacggaaacaccgacatttatgacaacaaccttgaggtcattggctccggtcttcacttttatcacgcgtacgcgctcgacggaggaagatatttcgcggtcgacgatgaaaccatgaacgactacagctacgcgcgcggcgtcgacgccggaccgctcgttgaaaagtacgcgctctaccgatacggcgaaaagctgaccgactgcgtctatgataatatcaccccggtacagggcggtttcctgtgttcattcagggacgaaaacggagcactgcgcgcagagcttgtccgtgcgtacgatattgttccggtggaaaaaacgctctccctgactttcgatgagacaagcggcagatacatctacacactcacggatggcgagaacgcgcttgacatatctttcgacaaagcgtcaccgctcgtgaacagttcggctgttgtcgtacaagacgggagctttcagattctcaggcttgagtgacgctcacccgatatctatcacgagaatatccgtcacaggtatccgcgcgccgttctccattatgacgatccgcccgacctcatcaatgtcgctgacctttccgttcagcgtcagatacgtgccgccggatttcttcgcgtccgggcggaaataggtcagcgtcaccggaagatcctcgtccgactccatgatctcgcgcagcttccggtcgatcgcgtccctctcgtattcgtcgagatcaggtcttccgtcggtcagccgcgccgtctcgctcaccgcgtcctcgtaaccgttcagagccgcgaacggagaaaactgcgccgcccgctcggtcatcgacatatgcctgtgctttgccgagacatggtgcgggagtcccataatgctgtcgtattttccggacgtttttctctcttcgctcacgccttgtgacctcctatctgacggtttctgtccctcgcggtcgcgccctcctcgaggttcatgccgcgcagtatcgcgttcttgccgaatctctcacggatgccaagcatcgcttcctgcatcctgcgctccctttcccggagcgctttttcttcttccgatcttctctcttccgcctcgacgtcggtgaagagcgtcagctgtcctccggacgacggcttcgggatgtccgcctcatcgatcacgttgttcgcgactacatacagacgtcgcaccgtcagattccggtcgacaatccggtcgaacagctccgacaccgccgctaaaatctccttcgtcgacgacgtgtagccggaaagatcattgctcccgtgcgcctgcttcggcacttccctgccgtagcggtcggtctcggttctgccggagtagccggatctcagatcctcggcgtcgtagcctatcgtcagctctattctgttcgtgaccttgcgcttcccgacgaggtcgagcacgagaagatccgccatctcacgggcgactagcttcgccttcgtgaaatcatacgggcaggacagcacctgtccgctgcccatactgtgcgagcccggcttgtagccctttatgtccgcgataccgcacggttcccatccccaggcgtgatcgatcagcagctcggcgttgacgccgaaaatcttgtagagcagatcctcattgtaaaaatccctctccccgccgaccgagcacagcgcgacgtcccccatcgtgtacattccgaccttttcaagccgcttcgcgtatccccttccgacccgccagaagtcggttatcgggcggtgatcccacagaaggcggcgatagctcatctcgtcgagctcggatatcctgacgccgttcctgtccggcgggatgtgcttcgcgacgatatccatcgctatcttcgcgagatagaggttcgttccgatccccgccgtcgcggttattcccgtctctgcgagcacatcaagtatcatgcgcatcgcgagttctcgggctgtcacctgatatgtcttcagataatcggtcacgtcgatgaacacctcatctatcgagtagacatgaatgtcctccggcgctacatatttcagatatacctgatagaccttcgtcgacacctcgatatagtgcgccatccgcggcttcgcgatgatgtaaccgagcccgagctcaggcgattcattcagcttcgcggcgctcgacgaaagtccggaaaaacgcccgtccggcgcggacttctgtcttacggcgttcgcctgccgcaccttttcgacgacctcgaacagccgcgggcgacccggaacgccatgcgccttcagcgccggtgagaccgcgagacatatcgtcttctcggtccggctcttgtccgcgacaacgagcatcgtgtcgagcgggtcaagtcccctcgcgacgcactcgaccgacgcgtaaaagctcttgagatctatcgcgatgtagcttctctccccgcccaacactcacacctcctctgttctctgcgcgacgtcgtaatccttatctatcagtataaacccaagcccgcgcgcacggcattccgcgagattcctctcgttgtccgcgatgagctccggtatatcgaccgtatcgtcgggtcttttttcaatcacgctcccgaagcgggtgatatcatccgtatgcgtcaggatgtagcttctcgtcattacaaggcatatgtactttatctcgtcccgctggtcggctgtgaaatcattcatgaaatcaaacggtatgtaacagccctcgacaatgagattctggttgttctcaagcgcggttctgataatctcccgcgcgatactccacagatacggcgtcagcttttcgtcgtcatacggcgtcagcgcggtgttcccgctccgtatcagtcccatcttcagcagatcgagcgacaagcatgaatacacgcgtccctgatatacgtatttctctatgagccgggacgccataagcgtctttccggtatgcgacgcgccggctatcaggattatcattttactgtcttctcataagcgatgcgcggcgagccgtcctccatatagacgattccgcgccttgtgaagccgtttttcagtatctgcttctgcatgaccttattgtccgcgtgcgtgtcgatccgcaggtgctttatgattccctcacagaacggaactatcctgcccataagcccatgcgtctcgccgtcgctcgcgacgcggtgaatgacgccgtaaggctcgtccgagagccactcaccatcgtcaatcctgccgtaggtcgggtcctcgaagacgcggaacatgaagcacccgtgtatcttcccgtcctcctcgtcaacatagaaccgctcacccgcgatatcgtcggaaatgagctcccttgtcgggtagtttctcgcccactgggtcgggtttccggtcgctatcatgaaatcctgcgccgttttgtatatctccattatccgatcgagttcttccggtcttgctttgcgtatcatatttttctcactttcagacatttatatccaccgagcgcaggtcatcccacgctttttcggcggaatcctttattatttttatctcgtcctccgagagcgtccggaatggcataacggtgagcttcccgcccttcttccgccattttccggcaacctcgccgcgaaggagcacggcgggcatcacaatccccgcgaaattgaatatcccgcgcaggtgctccggcgggagaaagacgttctcctttttctcgtaaccgagcatcagcccgtcaaaaccggcgagaaaaacacagtccggaatgccgctcatgtatttcttcccgccctcgatatagaaatacgtcctcccgccgcactccgcgctctcaaccggcagcttgtcaagcagctttttcacccgggtctgcgggataccgaagtagtacgcggcgtccctcacggtcgcgggcgcgtaatttctgaaatatctctccgccatcctgagcatcgcgtcatcatccggcatcggcgtgaaatccgggctcagacggtatagcttcttctcactcacaacaccgtttataaatccgcgctcggacaggtcgcgtatcccgccgccccacgcgtcaaacatgaccgcctcctcaacagcgctcatcccgcgaccgcggcagacctccttcagctcgtcgcgcgacttctcaccgcccgcgagcgcttcaagtatcgcctcggagagctcccggtgacgctccggcgacaggctcacaacacgtctgcacccgccgtcgtcataccagttatagttcccgtccgatctttgccaagtgaaacgcggctcgaaatccagcgagcggtacccgtccgtacagcgcttaaacagcccgagatcatccgccgcgaagatatgtacggttccgcggatggtccagttcttgacgagcccttccgcggcgctctccgcatcacagccggagcatctgagacgcatcgaatgaagcgcattcgacatgaactgcgcctgaaagcccatcaggtcatgtatgacccggagcttttcgcccttttctgtcagatactgattcgcgagccgccttatctttatctcttcaagtgtcatatgccctcccggaactgccgttcaatacttcttatattaatgataccacagttcagttcatttgtcaaccgttatcccgaaaattcgttctttttgcctgaaacatttttatgaacaaaaagacagccatatcatatgactgtctcttgtgcgtttattttctgccgagtatcgcgtcgagatcctgctccggcgcggtcgtcggggtcagaccgtaggtgtcgacgagtatctttacgacgctctcggacaggaacgcgggcatcgtcggtccgaggtacatattcttcacgccgagcgagagaagcgtcagcagtatgcagaccgccttctgctcataccacgacagaacgagcgtcagcggcagctcgttgatcgtgcacccgaacgcgtccgcgagcgccagagccacctttattgcgctgtaggcgtcgttgcactgtcccatatcgagtatgcgcggcaatcctccgacctcaccgaggtcgagatcattgaacctgtatttgccgcacgcgagggtcaggatgagcgagtccatcggcgtctgcttcgcgagctccgtataatagttccgccccggatgcgcgccgtcacagccgcctatcaggaagatatgctttatttccccgcgcttgatcgcgtcgataacctccggcgccttcgacagcaccgtctcgtgcgcgaagccggtcatcatcatatgaccgccgtttattccgctcatcgagtggtcgtgctcgtagccgccgagctccagcgcctgctctatgatcggcgagaagtccttgtgcccgttctcatccgccccgatatgccgcagaccctcgtacccgacgacagacgtcgtccagacgcggtcacggtagctcgggcgcggcggcataagacagtttgtcgtgaacaggaccggcgccgggatatcgacgaactccttctgctgactctgccacgcggtgccgaaattcccggcgaggtgcggatatttgttcagccccggataaccgtgaca

SEQ ID NO: 391 - DNA, 1828 bp, Unknown
  16S sequences of unknown bacteria
gcttgcttataatatcaaacctttccctctttgtcaacccctttttcccttttttgttaaaaaagcccgcaaagcatgctttgcgggctttttctttttgtttcgccgaactcctcaacgtcctaacgatgcgctggacttgcgcgcaactttcaatttagccatcgcacgggccaattcggcttgggaatgggcaaattcgatctggctcttcttctcgcggatccgctcctctgcgcgcactttgacgcgctcggcatgctccacatcgatctcatccggcttctgggcaaaatcggtgatcacgacaactttatcgcgcgtgatctccgcaaaaccgcagccgacagcagcaacttgctgctgtcccgccgccgtaaaacgcatctcaccggccgtaatcgccataaccataggctcatggcttgccagaacgcccttttcaccatcgattgccggaacggtcagcgcctcgcagggaccgtcataaaatacgcgatccaatgccacaacctgtaaattaaatgtactcatccgcacacctcgatttcacagccgtacgcttaagcgttggcattgagcgcttccgccttctttttcacgtcctcgatggtaccgacattgaagaacgccacctcggggtagtcgtccatctcgccgtcaataatagctttgaagccgcgtaccgtctccgccacgggcacataaacaccgggcacgccggtgaagttctccgccacgtggaagggctgagacaggaatttctggatcttacgcgcgcggtacactgtcagcttatcgtcctcatccagttcgtccatacccagaatggcgatgatatcctgcagctcattatagtgttggagaatctcttgcaccttgcgggcaacattatagtgctcatcgcccaccacttcagcttccaggatacgcgaagaggattccagcgggtccacagccgggtaaatacccatttctgcaatctttctggacagaaccgtcgttgcatccaagtgagcgaatgtggtggcaggcgcggggtcggtcaagtcgtcggcaggcacgtaaacagcctgaaccgacgtaatggacccgtcacgagtggatgtaatacgctcctgcagcgcgcccatctcgttggccagcgttggctggtaaccaacggcggaaggtgtacgccccaacagagcggaaacttcggaaccagcctgcacgaaacggaaaatgttgtcgataaacaacagcacgtcctgatgctcgcggttacggaaatactccgccatggtcaggcccgcgtaggccacacgcatacgcgctccgggcggctcattcatctggccaaagaccaacgccgtctttttgataacgccggactccgtcatttcattccacaggtcattgccttcgcgggtgcgctcaccgacgccggtgaaaatcgaataaccaccgtgctcctgtgcgatattcgtaatcagctcctggatcagcacggtcttgcccacgccggcaccgccgaacaggccaatcttaccgcctttggcatacggcgtcagaagatcgatcaccttgatgccggtttccaggatttcaactgcaggactctgctcctcaaacgtgggagcctcccggtgaatttcccagcgttcctcctctgccgggataggggcgccgccatcgatgacgtcacccaaaacattgaacatacggcccagcgtttgatcaccgacgggcaccttgatgcagctgcccgtggcctcgacctccatgcctctggaaagcccttcgccggcgtccagcagaatacagcggacgatgtggttgcccatgt

SEQ ID NO: 392 - DNA, 3340 bp, Unknown
  16S sequences of unknown bacteria
agcgaagcgggtctcgtttgaaagcttgtcaaaaatatatttttgacaagcttcaaaacgcctggaagggcgttttttgtgcgcacttgatgcgaaaaattggagatttcggtaggaaggagtctgaaaaaatatgaagcaaaccactttggatatgacccgtgggccgcttgggcggcagatctttcggttcagcgtgccgctgatggtctcgaacgtggtacaggtgctgtttaatatgtcggacatcgccgtggtcggccggtttgccgggtcgacggcgctaggggctgtcggctcgacggcgacgctggtgacgctgttcaccggctttttaatgggcgtcggcaacggcgtcaacgccctgacagcccgctttttcggcgcgcgggatgaggaaaacctgcaaaagaccgtccacacggcgctgctgctctgcctgctgctgggcgcgctattgggcgcggcgggcagcgccctctgccgcccgctcctgacggcgctgcacaccaaaaaggtcctgctgcccggtgcaacgctttacctgcgcatctattttatcggtatgccggcggtggccctgtataacttcggcagcgccgtcctcaacgcggcgggcgatacgaagcggccgctgtatatcctgctgggagcgggcattttgaatgtgctgctgaatctgttcttcgtcattgtctgcaagcttagcgtcgcgggggtggcgctggcaagtattctctcccagtacctttcggcggcgctgattatcctgatgctcttccgcacccgggatggctacggcctgcgcctggcgcggctgcggctggatggcagcaaggcaggcgcactgctgaagctgggcctgccctgcggcattcagtattccatcttcgggctggccaatctgtttatccagatcggtgtcaactcctttgacgcgacggtcgtggctggcaactccgctgccgccaatgccgacagcctcgtctatgatgtcatggccgcgttttacaccgcctgctccagctttatcggccaaaattacggcgcgggaaaccgggcacgcatccgcaaggcctaccgctgcagcctgctctacagcttcggcgcaggcgcggtcctgggcgggctgctggtgctcttcgggcggcagttcctctcgatcttcacgccggaggccgacgtcatcgacgccggcatgacgcgactgatggtcatgagctgctcctacgccttctccgcgtttatggacgccaccatcgccgccgcccggggtctgggccgcagcatcttccccacggcgctggtcatcgcgggctgctgcgtgctgcggattgtctgggtgtatacggtctttgcctggtttggaacgatgatgagcttgtacctcgtctatatcgtcagctgggtcgtcaccgccattgcggagctgacgtattttgccgtcatctggcggcgcgtctcggcgcagctgaaagccgcgtgagatattttatgagaaaattttccccgtcagggcggaaccttttgcccccgccttcgtctgatcaagtaccgacacgataaaggaggcattgcagatgcaaaagaacgcaaaaacgccgcggtcccaccggcgggcaaaatggatcggcgggattgccgggctgctggcagtgatcctggccgccgggcttctgctctggccgggccagggtgccctgacggggactgcccaagcgctggctactgttgaaaagccgaagaccgtgccctacccccaggattccgactatttcaaaaccgacggcagctttgacgacgagggctatctcgccgcctacaacgcctggcttgccagtcggccagcaccgatggacgaagcccagcgccaggcactggcggattttatcacaaaaagtgtccccgtcctgctgcggagcgacgcggacagcaacgcggtctactccccgctcaatgtctatctcgccctggccatgctggcagagacgacggacggcgatagccagcagcagcttctgaacctgctgggcgcaacggagcttgcatccctccgcacggaggcggaagccctgtggcgggccaattacatcgacgacggccagtcctccagcctgcttgccaattccctgtggctgaacgaggatgtctcgttcaaccagagcgtgctggacagcctggcaaaaaattattacgccgagagcttccagggcaccatgggcgcggagaagacgaacaagctgctgcgggattggatcaaccggcagacaaacgatcttttaaaggggcaaaccgacggcttggagctaagccgtgataccgttctggccctggtctcgaccctttattttaaagcggcctggacagatgaattcaacaagacactgaccgcgccggacacgtttaccaatgcggagggcaaggccgaaacctgcgattttctgcatgagcgcgatcaaaacatcctctaccggggcagccagttcaccgctgtcgagaagtcgctgcaaaatggcggcggcatgtggctgattcgccccaacgagggcgtgacgaccgacgcgctgctgggcgacgcggagctgacccagtttctgcttgccaacggcgcgtgggaggacgcggactatgcccagatcaacctctccctccccaaatttgacgtcaccggggaggcggacctgcggggcggcctgcagcagctgggcgtgacggatgtcttcgccccgggtgcggcggacttctcccccctgtgcggcgcggccagcgacgggctgtatgtctcgaagctgcagcatgacgccagagtcctgatcgacgaagagggctgcacggcagccgccttcaccatcgcctccttcgaggccacatgcgcagaggaggacctggaggagatcgacttcaccctcgaccgtcccttcctcttcgccatcaccaacgccgacggcctccccctcttcaccggcattgtcaacaccacggcgtaatgcagcgaccgcctatcgcgtaagaaaccgcatgtcccccaaccggggcatgcggtttttgcggcttttctcaaagcttcttcgggtggctctcgcccagggggccgttgatgacgtcggggttcggctggggcagcccagcggcgttgcggcggacataggtcgtatgcagcagcatatgggcccggggcttgcccggcgcgtccaggaattcctcgtagagggtctggatgcgagggttatcgccgctcaggcgcagggcgtttttctggtcggcctgataaagcgcggcagagcgcagggccttgaggtccgtataattgcggacgctgtcactctggaccggctggccg

SEQ ID NO: 393 - DNA, 32759 bp, Unknown
  16S sequences of unknown bacteria
ttcgacgacgccggaagcttcgacgacgccggaagcttcgacgacgccggaagcttcgataacgccggaagcttcggtcacgccggaggtttcggtcacgccggaggtttcgaccacgccggaagcttcgacgacgccggaagcttcgacgacgccggaagcttcgacgacgccggaagcttcggtcacgccggaggtttcgataacgccggaggtttcgaccacgccggaaacttcggccacgccggaggtttcgaccacgccggaagcttcgattacgtcagaagtctcgacgacgctggaagactcggcgctgggaacgacgctcggaagcaaaaatggcatagaaattcccaagctctcatcgcaagaatccgccgtgaccatggcgctctccgacgccgtcaccgcgcagaaatcagaggaagcgcctctgttggtgctcaatacccagcaaggcgaaacgtccactgcggaaacgccggccgtggacaatggcgaaacggaaacggaagaggactacgccatcaatgccggcagcgctacgctgaccatcaatggcgtagccatcgagggatccgtgtatctgaacgacacggccaacaacgccattcgcaacgcgctgctcggcgcggtagaacacctcaagaccaatttgcccgccgcgcccggcggcatcgtcgatatcctcgtcaccgtgggtgaaggtacctacgaaggcggcgtcgatcttggcgcaagcgaggatgggaattcgctgcgcgcaaaactcctggaggcgctcggcatcacgggagaaagcgaaggcaccatcgccaatatctccatcgtttccggggatgctatggaaaccagcgcggatggaaccaatgtcccgaatgcgaacgccaacggcaaagccatcatcgaaggcgatctgatcttcgacggttttaacacgctgctggcgggcctttacattggcatgaacagcaagatcaacgccaccaacggcgacagcttcgcctattatggtacgcaggaagacgacgatgtgaacatcgaaatcgatagtgtgggcgaagttatcgtagataccggcgatggcgatgatgcggtgaatctcactgttcagcaagaaccgaccgtgcgcgtgagcgtcgatccgcaggcgattcaggacattatcctcatcgaagggattgagcacgttacctctggcggaacgggtggcgtgcaggagattgcctcccaggagggtttcaaacaggtcgtgcgcgacacagtggaaagggtcgcggaagaaagcgtctccggctccggcgagcgcgaacgcgcccaggtgaccgtgcgcactggctcgggcgatgacgtggcggagatcgaagtcgtcaacgccacggccttcgaggctagcggacagggcgttggccaaaccgctacatataactttgcgtttgacctcggcgccaccgatgtgaacatcgacctaggcgacggcgcggacgaagcgaccgtctccggcggcatgcgcacgctctacggccgcaaggccattcaggctgcgctcaattacgcgcaggaggaactgggcgaaaagattgaagttagccacatcgttatcgacggcggcgcgggcgacgacaccatcaatgtggataccaccgccgcttactacgatctcttcggcgcggatgtgaacatcgccgcgggcgagggcttcgaccgcgcgcacctcaccggcgaattggctgagagagtgggtgtggcaggtcgcatcactggcgatgcctccaaactcttccttgagacgcaggccgaagtgcagatgtttgacgagattctcggccacttcaccgacgagaatcccgtgaccgcggcgctggcgctgcgccaaccgctgcagatcggaatggatggtgtcgaggctgtcaccgaccttctgaacaacaagaatagcgtgaagctgaacggctacgagacgcagatctccatccagccgttcaccgattaccttctctccgccggcatggatggcaaggtcgccttcgcggtcaccgtgacgggcgatggcttcctctccaatctgctggttacggcggcggagaacgccgcggaaaaccgtctcagcgtcgaaaccctccaggcggatgggctaagcgtattcctcatcgccccgcagattgaggtgcatggcgcggttgccggtgaaaacgtcatctttgtggccgaatcgcttaactccaaggcgctggatgcggccctcaccattgcagaagatgaactgaccggtgaaaagttggagttcggcttcaatttcattgaggcgaaggaaacggcttccatctccgtgggcgcggacgcgtccatcgcggcggatggttttgtcgatttgcgcgcgcgcacgttgcagaacggtgcctatatcgatccttcgctctatgagtccatcagcatcccgcacttcgtggtggtgaagcttagctcggcgaatgtggatatcctcggcaccatcacggcgaagaatggctttgtccacgcgctggccacggcccgcaacgaattcgatgccgccgatttgctctcgctcatcccgctttccttcggcatgggcgatgtggaagccaaagtgacgctcgggggcgaagcgcagattcgtgcgggcgcgggcgcgcgcctgatgagcgatacgttcgtctatgtgaatacctttgacgatggcagcttccccaagttcaacgtctccctggcgggcaacgtcgtcaccgcggacaccaagaccatcgtttccggtaatgcgaaaatcgaagccggtggtgacgcgcgcgtggacgcgcgcagccgcgccgcctcttacgcggtgagcatggccgtgcccacggatgtggtgatgcccacggcgcgcagcggcatcttcctcagcgcgaacttcgcctttgccgagaccatggcgcaggtgctggacgccgcttccgtcatcagccaggcgtgcaacgtttctgtcgaggccgacggcattctcagcacgcgtacctacgctatctcctcgcctgtgagcgtttatgctgtggatgagaatggcaacacgatctatgattcggagggcaatccggtcaaagctacgcagaccgccaccgtcctcagccttgtgaccacagtggaagagatcctcggtcatgtgcccaaggaagtgaatagcgtcaaggccaagctgattggcggcattacgggcagcaatcgcctcgccctcaagttcgattccgccactgagcagcccaaggacgccgtcacgcaggcgagtacgcagttcgtcggcgcgctttccattgccgttatcgataacgaggtcagcgccctcatcaacacctccggcagcgttcgcgcggcaaaggagatttccttgcgcgccgcgggagacaccacttcgcgccagcgcgcggacggttctctctatgaaaacgcttccatcgtcaccatgcccggcatcggttcggttacgcgcacgctcgatcccagcaacaacgctgcgggtgtcggcgtggccattggcgtgttcggccacgatgtgagcgccatcgcccaaaatggcgcggtgagcgcgggcgacggcctggacgtttccgcccttagccgccgcgtggaatcctccgccgccgccaaagcgggccatattcccgccacgtccacctttgggctcggcggcgcggtggcagtgcacatcgcctccgtgcgcaacgaagcgcgccttgccaatgcagtccggtatgtgcttaatggcgcggtcaatgtggaatctgtgattggccacggcttctttgaaaccatcggcgacgccagcggcaagcgcgtgcgcaaggcactcgcgctaggccccatagatataccgcttatcgatatgcccacctatcgcgcggacagcgttggcgttggcgcgggcattgccgtgggcgtcattggcgtggacgtttccgccgtggttgaagacaacgtgaattttaacaatcaaaagaagctcaatagccttcgcgttgcggccgctttctccggtacggaggaactgcgcgcggcggcgggcgcgtccggcggcatctccgctacgcccgtggctgccacggacatctccggtgtgatggtcgaagcctatctgggcaagagcggcgaaatggcgcaaacgcttggcgacatcgccgttaccgcgcacagcagcattgagcgcacactgaccgcggacgccgcggcggcgggcgcccgcgtgggcgcgggcgcggcgctggcggtgagcgtctttaacgacagcgccaccgcggacgtgctgcgcggtctcgaagccggcggcgatgtgctcgtgaacgcggacagcgtcagccgcctggatgaaaccgtcaaagcttctactagcggcgctttgcccgcgagttccgcttcttcgggcggctccactacgccttccagtaccacagaggaacgcgacggcgtgctcagcggccaaaccgctccttccggcaccaccgtcaatccggacgtcaaggatcaggccgataagcaggtcgacgaagcgctcgcccgcggcggtaagctggctggtgatgtcaatacgaaaaatgtcaatacgcagaacgtctccaccgctgccgcctcgcgccagcgcgcgcagacctcggaaggctccatccaggttgccgcggccatggcggtcaacatccagagcaacctttcccgcgccaaggttttcgacggaaacagcgtgcttgcccttggagatatcaccgtcctcgcccgcaacgatacggacgcggtgatcgccgccaacgccagcgccaccgatagcctctatggcctcggcgtggccgtggccatcaacactgtcacccatgaaaacatcgcctatctgggcacggggagcgtctcgggccgctcgctgaccgtagcggcggagatctacgaaaaagaagacgcgcaggcgctggaaagggcctttgaggatctcgtgcagttcctggccgccaatggcgctatgggcgatgtcatcgatagggttcgcgcgcgcgactatgagagcagtgccgcccaccagctcgacgaattgctcaaaaagagcgattggacggaggaggagcgcgtgcgcatcgccgagtacgtagacgagttgatcgaccgcgccctctggacggaaggggacgaggtgacgctgcgtgagcgcgtggacgacttcatcctcgccacttgggaaggcgactacgccggtacgcccctcacccgcgaccatgcttatgctatggaagcttacgtgcgcaacgcgttgcgtgcgcactataagcaggaagccgcgcctgacggaacgctctatggcgacctctgcgcgccgctcatcgaggaactgatcgcgaaaatcgacgcctatcgcgctgagcaagcgcacaagcagcgcatgatcgacctggcctgcgaccttgctgagggcaagacgctttctgccgaagaccaggccgcgctcaatgcctatctgggcatggaggcggacgcggagaacatgaaggccattcgcgagatgatcgtggaggaggccatggcgcagttgacaggggaagagagcgtcctgcaatcggcttccctctatcccgccgcatttggtacgcttcttgcggatcagttcgcctcgctcgccaatccgcaggcctggctggagatttacaacgtcggctggcagcccgacccggcgctggtgatggccacggaaaagacctatacggcgctcatcgagctgctctctgcgcgctttggtagcggcggagagatggatggcgttggccacaggatttccacacaagcgatttctggcgtgggcgcttccagcgtcggcgtggcgggcgcggtggcgattggcgtggtaaacgcccgctctgaggctactgtagccgcgcaggacaataccattgtactcaccggtgatgccgccatccgcgcggacgaggcgcagaaggtctatacaacggccagcggctcggcggataaggtactgggcgacgccgctaagattcgcacgatccataaccccggcacttccgtgggcgtgggcgcgtccttcgcgctcaatctgctcaccacggatgtgctcgccacgctgggcgcgggccgtgatttcacggccgcttcgctggacgtgttcgctcgcctgcgcaacgacgtggacaccatctccatcgccggcagcgatcccattgcccgccgcgacaatgcgctgcgggctgtgcctacgctgggcaacgccgggaacgcggcgatgctcaaggagcaggccgaagccgccaatgccggcaccaataccaagggcatctctgccgacgcctctgtggcgctcgccatcgtcgaaagcacggtgaaggcgctggtggaagcgggtgcgacggtggaaacgacgaatcccacggataccatcgaaaccctgcgcgagggcgcgcagggcgcgaagcatgccaacgtagcggtgcaggccatgcaaagtggcgattcctacgctgagggcaaggccttctccgccggttcgcgcgctgccgtgggtgcgacggtggccgtcagcctgatgagtagcgacgtgcttgccgccctgcgcgccgataccaccaacgccgcgggcagcgtgcgcgtctacgcgctgacgaagaataccgacgaggtcaacgccgtcgccaccagcatcggcgcgagtctcgaccgcgtgctggagaagttccgcctgggtctcaactacgtgagccccggcgcgggccccagcaacctgagcggcaagatcgccactgccctcagcgaaaagggcacgcccctggtcggcaagtccatgagcaccctcaagcaggccagcgattccctgccgctttcgagcaacatcctgcgcgtattcaacgtcgatctggacgcagccaccgcgcgtgccacaacgccggcctcgtcggcaaccgccgcagcgggtgcgcagagcggcagcgcggcgcagccgcagcagattgccgccaattccggcacgctcaacgttgccgccgccatcggcgttgcctataacgcccacgcggccacggcggaaatcaccggaaaggtcatctccggcggggacgtggaggcgcatgccgaaaaccgcgccaatttccgcacccgcgccaccggcgcaacggcgacttcggctgctatcgccaatgtggtgggcaccgcggcggcgatcaccatcaaccgcaacggcgcggaagctaccgtctccgggaatgtggaggcggagggcgatctcgacgtttccgccgccaccacccagaacctggacggcaattacatcgcttatctgggcgcgcaggctgttgctccggccatcgccgccagtccgggcggcacgctcaacgtcgcgggcgctgttgccgtgctctccgcacaggcacaggccgtggcaaagatcgcggaaaatgctgctatcacggcccaaaacgtctctgtcaccgcgcaggatatgagcaagctcggcgtgcgcgctcttggcgttagcatcggcggcggacagacggcgggcttcggcgcgtccttcgccctgctctacgcgggcaacatcgtccacgcgctggtgggcgatggcgcgcagatcacggcggaatcgctgaaggttgtcgcccgccgcgagcgcatggacgagagccagtacaagttccccttcgacatttccgacctcttcacggtcggcgcgaccgaggacaaagacaaggggctgtttaacctcaccattgataacgacatcagcaacattaccgatctcaagtttgagaccaccatcagcacggacagtatcctcgacgtgctggatatgatcaactacctggccacagtcgattactacgtcgaggccatctccggcacggtacaggccgggaccgccagccaggcggcgctggccggtacggtggcgctgctcttgacggaaaacgacgcgcgggcagatgtgggtgaaaacgtcgtactcatcctcggcgcaaacgcgggggaaagcctgcgcgtcgaggcgggcagcgcggcctcagcgcgcgtcatcgcgggctctatctccggctccaccgccaaggcgggcgtgggcgcgaccattgccgtggctgagcggcgcgacgccgcaaacgcggccgtgagcgccggcagcactgtgaccgccgcgggtgacgtcaccattcagtccactgcgcagaacgacatttgggctgtgaccacggcggacgcggtggctacgggcacgggcggagccgccatcggcggcggcgtcaacgtcatcctcaccggcaccaccgcgcaggcagtgctgggcaatggcgcaaccatcgatgcagacggcgcgttcgctctgaacgcgcaaaacgatacgaagtttaccctcatctccgcggatgtggggctgggaacgggcgcggccgtggccgcgggcggtactgtcgccgtgctcatccatgaaaacgccaccattgccgaggcgggccaggagagcgtcgtcaccgcgcgcgatgtgctgattcaggcagcgagcaacgacgcgcttctcaacattctggcttccgcctccggtgcaggcacatccacggctacggccgcgggtaccatcggagtggccattaccacttcgcagacccgcgccgaggcgctggaagggagcgcgctcacggccgaaaatggccatgtgcagatccgcgccaaaaatgacgcgcagttcatcaccggtatgctggcggccacggcgggcaatgccactgtcgccctcggcgcgagcgtcaatacgcatctgttcacgcagtcggtcatcgctcgcgcgagcgaccgcgctacgcttacggcgaaaaatggcaatgtttcgctttcggcgctggccaacaaccgttcctttgacgttactgtcgccggtgcggccacgggcggcacggcggcgctctctggcgtggtgttgaccactgtcagccgcacagaagccaccgccgaactgggcgaagccgttaccgtgcgcgccggggattccgtcggcgtggtcgccgacgcttccggtgcgctgggcgcggtcggcggcgcaggcgcggtcagtgtcggcacggtgggcgcgggcgcgaccgtgcataccatggtcgtggaaaatgccgttaccgccaaaatcggcgacctttccgatctcattgggctggcggcggtttccatgccctccatttcgggggtcagccaggcgggcatcgccattcccaaccgcgcggagcgccgtcggggcgtgaccgtgtatgcgggcggcgatttcaagctctatatgggcgcggctagcggcgcgctctctgttggcgcggcttccattgctggcgtggtgagcacggcggtggtgcaaaaccgcatccatgcgcaggtcggaaacggcgtgcggatcaacgctagcagcgcgggcggcgcaagcgcggcggaagggcagtttgcgcaggcagagggctcgggcgacgcgcaggaagtgagcgtcgacgcggaaggagaaacacatttatatcacttcgcgggcgctttggacattggtaacgcggtaggcgtcgggccgaccgtggtggtgcaagtgttgcaaaacagcgtgcaggcgcgcatcggcgatgacggcgcagcctttgccagcggcgatatccgcgtggcggcgcagtcgcgcgcgcaggtggcgctcgccgcgctctcctttggcattgcgggcacggcagcggttagcccgggcacgaacgcgctggtattcgaagacaccgtttccgccaacgtgggcggcaaccttactgcgggcggcgatgtggagattgccgcgctgggcgatatcgaactttacaacatcggcgcggcgctcgcgggcgcgggcaatgccgccgtcagccccattgccatcgttacgtacttcaacggcgcttccgaagccattgtaggcgcggacgcggtcctcgaggctgcgggcgcggtgaagattgccgcggattccaagcaaaatatcgtcaccgcagccaacggcgtcagcgctgcggcggtgggtggggtgagcggcacggtgtccgttaccgtatccaagcggcagacgcgcgctggtacgctggatggcgcgacactgcgcggcgcgcgcgtggacgtgacagccaacgacgtttatgatttcttcggcgaggcggccaccattgccgcttcgggcacggcggcggtgggcgtcacggcgatggtcaacgtgctgaaaaatagcgtcgaggccagtcttggcctcaacaatatcgtctatgccctcgcaggcgacgtcaacatagcggccaaagccgagcgcgacgtggccagctacgccgggagcgtttctggttccggcacggcggcggtgggcgcgaccgtcatggtcacggtcatcggcgataaactgcagcaggacgcccgcgacgcgctgctgatgcaatacgacgcgcagggcaaccgcacctccggcggccttgacatcgatgcgttcctgcagagctttgcggtgggcaacgctgccgcgcacgaggcgctgcaaggcatgacgctcgacgaagacctcgcgggcgacggccagagcaccgctggtttgcaggtgggcggcgaagacggcgtggacgtgaccgagggttacgtctccgatgagtttgcctccgctaccggcgacaaagcggcaggggagggcgagaattacaagatagacagcgacgcgaacggcgatttgaacgccgcggcggaactcgggcaggtgaagcgcgattacgcgcccatgagcggcgcaggcgcgaccgtcggcgcgggtagtttcgcctttgccagcggcgatattcgcgtcgctgccaaccagctacttaccgcggatatgatcaccggtacgctcggcgtatctggtgtatctggcgtgggcgctggcgtggctgtaatcgttacctattccgacatcgcggcgctcgtgggcgagggcgcgatccttgaggcgggcggcgacgtgctgatcgaggccacgtccgcttcccaggaaccggatgcgcagacgcagcaggcgcagagcgtcaccgaaggcctggccaaggaactgggcgaaaaccttgaaacatacggcgtgcgcgcgctctccgtcaccgcgggtggcggctatgtgggcgtgtcggtttcggcggcggtcatcgccctggacgatgcgttgcgcgcggaactgatgggcagcgtcaccgcttctcagaacgtttccgtccgcgccaatatggctcacgaaaacgtgttggcggccacgttggcggccagcggcggcttcgtggctgtgagcgtgccggtgtcgctggtgcgcgcgcaaggcgcagtgcgcagcggcatttccggcgcgggcagcgtgacaagcgcgggcacggtctctgtgaccacggacattctcttcaaaaacctctcggcggcggcggcctttggcggcggcgcggtgagcgtcaacgcggcgcttccgctctctatcagccgcgtcaccggcgatacgttcattggacaaggcgtcagcgtcgtggccgggaacgtggaagtggccgccaatgccgtaacttcgacgcgcgcggcgcttctcggcgtcaacggtggcgctgtggccgtgggcgcgggcgtggccattgccatcgatcaagcgaatctttctacctatattggcgcggatccgcagggcgtgtccgcttccagtggcatcggcacggtgcgagctacgggcgatgtgcgcgtgcgcaacaccattgcgtccctctccgaaccggtgatctttgccgctacggctggggcggtagccgcttctgtcaacgtgctgctggccttcaactgcagcaacgccgtggcctccatttccggtagccacatcaatgcggacggcgatatcgtcgtggaaggcttgcttagtgaagcgacggcccgtgcagacctctaccgcgcgggcgcgggcgccatcgccgcgggcgtcaacgtggcctacgcgcagatgcgcgcggacaacgccgcgcgcctggacgtcgcgggcgcgagcatccgcgcgggcggcgacgtgaagatttacgccggtacgcaggcagcgcccagcaaggcgctggccgaggcttccaccatgtccggcgatgtgggcgctatcgcgggcgcggtcaatgtggccatcgccgacaacgatgctcgcaacgaagcgtcgctccttggcaccgtaacggcggatggaagcatatttgtggaagcgtggctgcgcagcggcgcacccgccaacctccatggactcaacatcggtggcattgccgtgggcatgggtaccctcgtttccgtcgaccgcacgcgcaatcttgccatcatcgaaaacggcgatattcacgcagcttctttgcaggtcgtggcgcaggcagatcccattgagggacagaacgtcgctagcgttgaacttgtgcagggcgcgggttcgctcatcggcgcgggcgtcaacgtggccgtggcctactcgcgcgtggagaacatcgccagcgccaacataaaaaatatcgaactggcaggcgctctgcgcgtgctcgccgaaggcacggccaacgccgcagccagcatcgtcaatggcccgaacatccacggcatcgccgtgggtgtgatgactggctacgcctatgcgcaaggtacctacgcggcccggctcgcgctgcctgctgagggcaacgcgcaggtgggaagcatcgaagtatgggccaacaccctggcgaacgccgatactgtggtcgagccgtcactgggcggcgtggaattgggcgctgccgccgttaaggtcaacattgccattgccagcgtctctaccgaagtcaccgcgaccatcgaacgcgcgggcgaagggacgctccccagcatcaccgctgcgggccatgtgcgcgtgcgcgcggagttgaacgctgccgcgaacgccactgtgactacggccaaactcatctttgaaacggtcaacatcgccgtcaacgtctcctctgccaagttgagcggtacgcagacggcgctggtggagaatgtcgagatgaccgcaccctcgttagccgtggacgcgctgctcaatcagggcagcggcacgggcgcgcaggcgctagtgggcgcatccggcggggcgaacgtcactttgcagctgggcggtgtgggcgccaacacggccaccgcgcgcaacgcgcagacgagcgttgccagggtttctaccagcatgctgaacatcgccggcgctctcaccatcgaaacgctcggcgcggtgcgcgccgtggcggacgtggagagcggaaccacggtgacgcttctcaacgtagcgctgatgcagaccatcgcgcgcgctgaggccaatttgcgcgcccaactcgaactgggcggggccacggtaaatgcgggaacgctcaccgtgcgcgtacagtacaacgacgatgccacggccaaggtcgcccccggcggctcggcggtggatgtttccctgggcagcgtcaccaccaacaccgccgtagcggacgcggtcaccaacgcgcaagctcgcgtgagcggcaatggcgcgcttaccacctcgggcaaggccaacgtcaccgctactggtacaggtggggccacggcagaaggccgtaccgtaaaggtggacgtcaccgccctgcgcatcagtgtcaatacggcggtagccaacgctatggagaacctgcaggcacgcatcgaaggcaatgctgcctacgatttgggcagcctcgaagtcctcagtgaatacaagggcgaaggcgcgaaagccaccgttggcggactggccatgggcagcggcgctagcgttagcttgctggggaatatcaataccaacgtggccaacgccacggccaacatcacgaataatgccgcgatcagcggcggtatgaccattactgtgcacaatggcctgaacgtccaggccatcagcgcgggcaaggccagcgccgaggcgctcgcctccagcgtcaacgtgaatctcctcggcgtgggcaacctccacgccgatggaaccgtgcgcggctcgacgactgccgaactcacagcacgccaggtggacgtgctctttggcaacgcgaatgtttccgccaaggatgcgcccagcctccacgtgctcagccaactcccgggcgtcaatgtcagcgtcatctccgtcaacgtcgccacggcggaaggccgcatcggcggcgaaagcggcgcgcaaaggaacagcgtgcgcgtccaggtgggcgacggcactacgctcaacgtccacgatggcaacgccaacatactcgccttcaacgagccggcaaagaacgagatcgccatcgataacggcctgaacatcggtctcgtcaacgtcacggtgagctgcgcgggcacggagacgtacctggaaacctccgccaccgtaggcaagaacgcgaacatcaaagcgatcggctcgttcacgcagtttgcgcaggataagcctaacgcttccacgcgcgccagcggttcttccatcggcatcggtctcagcgccgacaactacttcgccgagaacatcgccgttagtgccgtgcgcgcggccgtcggcgagggcgcgaacatccaggccctgaacggcatttgcgtggaggcagtctccgatgctgtgctcaccgccattaccgacgcagaccagggcggcgtattcaccgagggcgtgctcaaatcgcgcaatgccatcgagcgcgagctgcgcgttgaactcggtcgcaatgtcaccctctacgcgctgggtggcaacattgacgtgcgcgcgacctccggccagcacgacagcatcaccacgcagacgctcgactccgccgcgcagttgttcggcatttcggacgtgcgcgcaaacaccaccatcaccaccaagcagtacatcaacctctatcccggcctgcatatcgagaacctcaccggcgacgtgttcatcgtcgccacggcaggcgcggacaagatcgacaactattctgagaaccgcaccaatgccgcctatgccacccagaccggcaaggcggaaacgacgctcgacatcaccagccacatcgtcttcaactacgagggcacgcaggaggaacagtttgtcttcatcggccgcgacctttggttcctcaactggctcaacgaaatcgatgtgcaaaacgagttgtatatcagcaacgccggcttctctggcagcatctatcccaccaacacggtgctggtggatctggacatgttgctggatgtctggtacggcaagaccgttgccaacggcggcatccgctatctgaacctcggctaccacgaggaccacaacgcgccgggcagcatgcgtttcgacaactacgcgcgcatcgacctgccgctgctctctctttccgccctgcgggcaatgattgagggcggcaaccagcgcaccctggtgagctttgaaggcagcctccacacctatacgaataggacccgcaacctcttcaccgtcggcgacgattgcgacacgcgcaccggcttcgttggcgaggagaacagcggcatgctccagcgctcggatatcgagtatacgttgctgggcagcgagcacttcaagtacagcgtgttcaattctttcgacgacggtgtgaacaacagcctcatccaccagtacgagttcttcccctggctgggcatcccgcaaatgctcgcgcagcgcccggtgatcgtggacatcaccgacgacggcgtgaccgtcactggcaacgaaaatggcgcggttcgcgcttcctatgacgaggccgccggcgcgtgggtgcttgagcccatcgtcggaaccgtcaatgagggctcggtcagcgagagcttcctgcccgacgatgtcatcatcgtcaatcgcagccgctcggatctcatccttcagggcatctccttcgagggcgatgtgatgggcaccaactcggtgacgatcgtctccggccgcgataccgacctctacgtgtggggcgacatcacccagcggatcgatcaccccgacgtgccgggcggctactactccctctttggaaacgccatctggtggggcttcgaaggcggacggctctatcagggccgcaagaacgatatcgacatcaccatcaatggcgacggccagtatgtgcgcgaaggcgagggcagcgaacgcgtcgagatcgccgcttcttcggatgcctacacgctcaaaaacatcctacaaaacgccgccaacgtggtcagcatccgtggacagatgctccttacgaattgcctggagcacgtcatctacaacggcagccatgtcaccatcaccaacaacacggccaaggatgttatccttgaaggcgcgggctttgacggcaactcatttgtccagtacatcggcaagaactcttatcaggtgatcaccgagcccagcgattccagcttccgcgtcataaacaacgagggcggcgatctgcatgtgcgcgggaatgtgaccaccaagcgtttcgaagccgtctggaacggcgcgagcggcgactttatccagcaggcgggcacgaacatccatgccgaccgagtggccatccgcaacgccgcgagcatcggcacgcaggcgggccggctcaacgtttcggtgctggcggacggcgttgaggccattgaagcctcgggcgatatttgggcgactttggcactgcgcgcttccagcgacatggccgcgcccatgggcgtcatcgagacggaaggcgacgtgaatatcgaattcctcaacgcctccgagtcctacgcttattcgcaggacgtgaccttcgaacgcctcgcgggccgcaacattaccctgtggatggatcggtacctgtcgctcatcggcgagcaggacggtatggcggtggaaatcgacgctgagaacgacctttccatctaccttagcgaaatttccgtactgacctccatcggcacacaggcggatccgctcgccgtctccgtcggcggcaaattcctcgccgccgcgttcggtgagaccggcgccatcatccccgcggacttcaagatcttcctcgaagtgccggaaggcgacctcgacgccacgcccacgagcatgaagctgtggacactggacatgccgctctacatcaacgtgcaaaacggcagcctcaccatcggcgacattgccgccaatggcgccatactgtgcgctagcggcgatatgaccatcggcaacgtctccctcgccacccagaccgagtcctacgacgtctgggccggcggcgacctgcgcatcgccagcatcacgctcgatagcgtcgtctctggcgacttgcgcttcgccgcgggcggcgtcctcactgtggaaaacggcctcaccaccgttgcgcccgttaccctgctggctggtggcgacgtcttcctgcgcggtcagacgagcgttcagccggccggacaccttaccatccttgccggtggcaatgtccacatggacgacctcaagagcaagcatcagaccaccatcgacgcgcagggcgatatcatcgccggcagcatctgggtctgcggcgcggcggaaatcaccgcgcagggtggcctcaccgccgaaaagctctacttctggagcgaggccgcgcaagtcgcgcacgatatgcgcgtcactgccgcggggaacgtctccatcgacgaaatggccatcacttacagcgacttttatctcgcaagtacgggcgggaacatcgaagtggacgcctactacgtctacattaccggcatcagcggccagttcgccatcgaagccccgcagggctgcgtgactctgcactccggcgacgcctccagcctatccgggctgacgccgggcacattcgccggttacgaggcaactgcgcgcatccacgcgggcggggacatcgacctttccgcggacggcacgatctacatagacgggccgcacggattcgtgtttgacctcatttccgacgcgggcaaaatccacctgggcagcatccttaacagctaccagagtctcgatttgcaactcaacttcactggtgacgctttcatccgcgacttttacgacagattcgtcctcaacgaagcgggcgcgctgcgcgtcaacgctacgggcgatctgaccatcgaggacacgatgagcttccgcgtcccgctggtggcggacgtggccggaaccttcgcggtgggcgcgctcgagggcaacagcgagaccatggacgtgtgggcgaagaacatccgccttggcagcgccaacctcagcatcaccaacgctgccagcatcgccgcggacgaagagatctccatgggcgacttctactatcgcggttccaaccgcggcacgctcgacatccgcgccgcgcggcaggcgggcacgatcgaaagcctcggtatgtacaaagggcagatggcgtttaccatcgccgagggcgatatccgcgccaattatgtgaacatcgaaagcggcggcttcaccctcacggcgcaaaccggttcgctgctcgtggacaccatgcacgccgtcgatatagccggcgcatacggcatcgagctgcacgctggtctggacatcggcagccgcgagaccccgctcaagttcgtctttacgcggcagtggatcgctgaggacagcacggaggatttcttctggacgcgcgatctctatctggactatgaccggcccatgaacactccgctcacgctgaacaagcagggcgagggcgacatctatctgaccattcgcggccgcgacgtggagattgcccaggaaggcgtgctgggcggcgtcatcgacgcctctggccagaacgtctccatcactaccaccgctggcggcatcggcacgcaggaagcgcccctcgtcatcgaggccgcgcgcgctctgacgcttacttccgcggaggacatctgggtgcgtggcggcgcaggcaacctgctccttgagaatgttatcgcccagggcagcgtatcgctggaagcggacggcgagcttgccgccttcgaagggcagcattcgcgcgtcacttctgcaacgggcgagatcgccctgcgcgcctctgagattcgctctatggaattggttggcgcggcgggccagaaattgaccgcgagcatagcggcggcacaggcagaactgtacgttgatcacgacgcggacgtctctctgctgctgaacggcggcatcctttcgggcgaactgcgcgccgatggagaactgtatattgaagaaatggcggaagcgagcatgctgcagatgatcgcaacgctggaagccaaagatgtgaccgtgcgcgttcctggcacgctgacgatgggcggcagggtacaggcggggaacatcgacgccgaggcgggcgcgatcaccattgaccgcgccgcccagattgccgccgccgaggatgtgcgcctccacgcggatggcaacttctcgaccggcttcctccttgccaacgatcccgagaacgacgcattgccgtctgtctctgcgggtggccttgcggaactgcgcgcaggcggcgcgctccggctgtttgccgacgttgaagccggcagcctcaatctcgaagcaggtgcggacgcctcgctcttcggcgcgttcaatgctaccgcgggcggtctcgacatcacgaccggcggcaaccttaccttcgtggcgaccgagacgggtgcgtatgagaacgatacgcgcgattcgctggcgctgcgcgcaaacggcgatataaacatcgcttctggcggcgcaatcggagcgctgtattatgaccgttcgtgggcagcgttgcaggaaggcagcggcgaagcggcgcgcaaggccgtgaccctcgaaagcgctgcgggcgatattgccattaccgccgccaccggcatcgacgtgggcgcgctgctcgcgcccgcaggcgatgtgttggcctcgaccgaaggcgcgctgcgcctggaacgcgccaaagcgcgggggaatatcgccctgcgtggcctggagagcatcgccgtttccgccgctacggatgcaaacggcgctcccatccccggcctcgaagcgcgcactttcacctttgagagccacggcgacatcacgaatggcagcggtggggaagcgcggctgcgctttacggacggctccacccccgtaaccctgcgtgaagtcggacacagcgcgcaggtgctgctcgccgacatggacggcggcgcgctgtgcctttcggctaccgctgatcctggcaaattggactacatcaccaccgccgaaggcctggcgcaggcgctgggcctggcgagcgccgagggcgataccgtcaccctgcagggcgacgtcaccctcagcaagggcctctcgctgctgctggacgcgaaccagaccattaccctcaatctcaacggccacacgctgcgcgccgaagcggacatggcatatgcggccatcgccctcagtggcgtaggcacgctgcggctcaccggtggcgcgctcgccggcaacgccgaagccctgccgctgctgttcgtcgccggtggcacgctggaagtggcgaatgtaaccattgataacgcggatggcacagcggcacgcttgctctctggcaggctctacgcaccggccacgcaggaaggcgcgcagacgcgcttctccggccagaccgctatctttgcgcagtacgatgctgaagtaatcacagacaacaccgtgcgcacgcagatcaccgatgcctctggcgaggcgcgggactactacatcgcgctcggtcacgacctgaaggacagcgccgcgggcgcgacgcgcgtcgtcttccgcgtattggcggacgatgcctacatcgtccacatcgaggcgcaaaacgccgcctccgaagcgggcagccaggagttgtggatgcccaacatcaccgcctactcgctggcggacggccagtacgagactctcgatcccgacgattacaccttcaccttctacaagctggacgcgaatggtgactggattgagatgtctgccgcgcccacgttgggcgagccgggcgcgtaccgcgcggtgcttacgctcatgagcggtaccctcgaagaaggcagcgtcgacactgtcacctaccacatctacagcaccggcgagacaggcgtgaccgtggagagcgtgacgcgctttgtggccgaaggcgacgggaaggcgcacagcctgttggtgagcggccttcaggagggagacgtactgctcttcagtctcgatggaaacgactttagtccggtgcttcccacattcggctttgaaaccctcaagggccaacactttgtggaaacgcccgtctattatctcctccagcgcgatggcctctccttctatggcgaggcggctgtgacgctggtgctggcggacgattcccttagcttccgggcggaatacgaccacgccggtgcgaacattccctacgcccacgaaatcgttcttgaccggccggaggtgacttacacctacgaagatgcggacggtacggttcggtcgggcgtcttcaccgacgagatgtggcgctactacttcaggggcgtacgctactgggtcaaagaacggaataacagttcgaccagcaccattttgcgggagtatgactttacgatcacggacgaggcgcaggccttcgatccgccctatgccagcccgaaaaacgcgaatgcctacccacaactgtggctggaggcctacgcgctgctctccgaggagggtgaagcgctggccaaagcgctggactgggataattctatgatcaatgaaaactacttcgaggatggcaactacctgtgcgccacctggcgcgaatggaaaattgtccagggcgaagagcaggcttgggatttcaaagacggcgcagacgagggcgtgcgccttgtgcgcgaagacagcgccatcgacctttccggcctcatcgactttgtggatgacggcgcgcggctggacgactacacggtgcgctacaccgtgacggatgcggaaacgggcgaggagatcctcaccaatgtgacgcaggaagaactgatcctcgaaccgggcaaatacaccgtgcagatcgcgctggaaagcgacaacttccatgtgtccgcacctaaggagtacgcgctgacgctctacaacgagtctgacttcttcgaactcgtcctccgcgacgagacgcgcggcgagcccgtggccgattatacctatgattccgccactggcgctttcgacgtcagcgcctggtacggcacggcgctgggcgagtacaccttctatggcttcgagcttcgggacaacactggcgacggcgcaagcttcgatcttacggatatgcgctttagccttacgggcgaggacggcagcttcgtatcgcttgaggagctagccttccgcgcagacaagccaggcgagtacgcgctctactaccagatgagcggttccgccgaaggcgagatattctctgtcagcggagcggtgacgctggtcatccagcccatcgaccttgcggacgtgattgatgcccggctcgatgtggagggggatccgcagtatcccaattatgaagtcctctacgatggcgacgcgccacaaacctccgacatcctcattcttgacgctgtgcaggccatcgaggcgtggggcggctaccggctcagcctggcggacctgactgtgactttcatcgaccgcaacggcgcatcccataccggcgtcgtggatttgcagatggaagatggttcgagttggttggagatcacggaagttctcgttcagtgggatgaataccacacaccgctttccttcgacggctttgagtggtttacctactggtacaaatcctacatcatgaatggctatggccccgagtatgtgctggacaacgactggcagacggcaaacctctgggagggaagcacaggggtgtatgtcaacggcggcacggatgatctggacgatacgctgcgcatcattccctacttgctggatggctacacatccgacttctcgggcaggcaatttggcagcgcctttgaggaagtgggccttgtgcgcctggattgggaactgctggtggaattctacgactatgatggcctcgccgcggggctgctgaacgctggcgaaaaacgccatctctccggcagcatgaacgtcacggcaggcaccaccgccgaggacctggcgctgctcgtggaggctttggaccgcgtcggcgcgtactttatcggcatcgcctacactggctacaatgccgagggcacgcaactgtttgccgcaaccgattacctcgccatccgcacgcccatctcgctgaatctggcggccgaagaggatacgcagatctactacgatggccgcgaacacacgatcgcgctggacggcctggaaaagggcgatattctcgaagtgcgctatcaagaagtggacgcgcagaccggcgatcccaccggtagcgagcggacggagttctattacatcgccggtttcgcgcccgatacgctcgcgccccttggcattgcttacgatcccaacgatccgaactggtatcccgattttgaggctccgcaggtggctgtgctaccggcgttcctcggcgacgcgctgcgcgatagcgcctaccggatcgcctacaccgtcacgcgagacaacgacatgggtgccttcgccgctatgtccctgcgctccacgagcgcctttgaggatagcgatatcccgcgcaaccagttgctctccatattcccgctttacacgccattccacaatgaagcgcaactcaccatcaagggcagcgcccatcaggaaatcgccggcgtgtccgccgagggatacgagggcctggcggatggccagaagcatggcttcaccatccatggcctcaacgtggaaaacgatacggtgctcgatacggtgcgcatcactgtgcgcgacgcgcaaggcaatcccgtaacaggactggaagacatttccctcgacgccctcgcgggcgtcaccgtaggcgcggatggcgcggtctatgtgccgctactctccgagatgggcacgtatcagatcgagtacacggttgagcgtggcctgctcttcaagcccttcgctgccacggccagcctgaaccttctcaagggcaccaccgtcatcggcgtggatacgagcgtcctctacgatggtaaggagcacaccatcggtctggacaacctcgatggcgcgcaagtggtctcctggtggacgagcgtggacggcacgccaaccgctgtgcagcccaccttcaccgaggaaggcgtgtacaccatctactttgaagcgcagcgcgaattgactggcgaacagggctcgtacctggaaacctatcttggcagcgccgtgctggaaattcgtcccttcggggttgcggccagcggttggacgggcgtatacgacggcgcaagccatggcgtcacattaaatgacatcgactggagcagcgatcgcgtcgaatacgccgtcggctcgggcgcgtttgtgtccgccgccagcgctgcggatctccccgccttcaccgaatcgggcgattacgacgtggtgctgcgcgtgacgcgcgaaaacgctacgctcgatattcccgtgtgggtgcgcatcctgccgcgccgcatcaccggcgtcaccgctgaaaccgtgcgcggatatgcagacggcagggattacgccatttccgtggaaggaatcccgcagggtgtggaaatcttctacatcgtaaatggcgtggaaacccaggaaaatcccgcttatcgcgacgcgggcagctacgaggtgaacttcgtgttgcgcggcccgaactacgaggactactatggctttggcctcatcgacatccgcgcgctctccggcatcgtcagcgagggctacgagggcatttgggacggcaaagcgcataccattgaactctatggccccgaggcggaggacgttgtttactaccgcgtcggcgagaatggggaagagaccacggtcaagccgcaattcaccgacgtgggcaagtacaccatttactaccgcgtggagcgctacctgaacggcgtgttctcccataccgattgcggcatggaaacgatcaacatcctgccgctcaacaatcccaccatcgttgtccaggggtacagcggcgaatacgacggcgcttaccacgatggcgtgacctttaccggcgatctcaccggcgtgaccgtccgctactttgacaacgacaccggcacatggctcaccgatccgccgcgctttaaggacgcgggcgaacatgccattaccgtggccctcgtcaacgccatgggcgaaaccttctccgtgcagccggtcacggtcagcatccgccagcggcagcttacgtgggatatcagcggccttgaactggagggcatcaccaaggtggaggacggcgacacgggcgttggcggcgtgcagggaacgctggccgtcgatggcgtgctggagggcgatagcgtcaacctgctatacagcggctaccttacctacctgctcaacaacgatctgggtcaggatgtgcccgcggccatcgaattctacggcctggacattgacaatctgaactacgcgctgcctgaggacgcgctcttcaccttccgcgtgcgccatatccccgggcttcccgcgacactgcccattcccaacgagacgtacgatggcagcgcgcacgagcccgagatcaacctcagcggattgattgaaggagtggattaccgcatcgatggctatgagaacaacgtggaggcgggtaccgccaccatccatgtgagcggcgccggcgcgttggcggggcagaacgtcgattacaccttcgtcattgacccggccgccctgccgcagcccgatgcgctggcggaccagccctacacgggcagtgccatcgagccgcctgtgatcatcgcgggcctcctcgaaggcagggactataccgtgcgctatgagaacaacgtgcaactgggcacggcaacggccatcgtcaccggcattggcaactatattggcaaccacacgctgcactttgcgatcattgaaggcggaaccgaaccagcgccggagcccacgcccggaacggtgccgggttcgacgccagcgccagagactacgctcacacctgctccgcaaaccggagaggatggggaagaaagcgcgacgcgccggtgctccatcgtcaccaacatcaactggcaacccgaggagtaccgctggcagaccctatggctgcgcgtggatggcgtggaggaaagcgcgcgcgtactggttatcgacgccctgccggtgctagacgccgatggaaatccggtgctgcgcgaagacggcacgcccctgtacgaattgcgcaacctgcacctctccactgcgttgcttgcgtgcctgaagaacgagggctacgcttacgtgctcttccgcctgggagacgccgtgttgctgatcccgctcggcaaactggaagacgccaaccacatcttcaccctggaacccattctgctgggcgaagaaacggcggtggagcaagaagccttcgcgaaccttgtgctgctggacgatttgcatcgcgtttgcgtgcgcgtcgacggcgcgatcgtggaactgaaggaagttgcgctgctgctgggcgaggtctgggaactgcccgcaacgccgccggaaagcgccgcattgcgcatcttctgcgaagagaccgcctatgaaacgttggacgccgggcaaacggtagacctcttggaagaggcggatgcggctgcgccgttctggcggctgcgcgccgctccgctcccgcaaatcgaagcgcagcgccttacattctccctcgtcagcgaggaatgagagcgggcttttgcatcgcaatgcaccaaaggttgggcaattgcgttgcgccaaaggattttccgaacgctgttttgttttccgattgtaagtgcaatttgggaaaattgcgaaaccagcccaccagtgcggacagccattttcgctgcccgcactggtggcttttcggccagaatgcgctttacagtctattttaacgggttctctgccgtttacagaatttgggccgaatcaaaggattgacttcctcgcaaaatcgtgctataataataaatccatgagggaggtggaatagcatgccgcaaaagggcgtcaaagtcatggtgcaaaaccgcaaagcgcggcatgactattttatcgaagaatcatgggaagctggcattgagctgaaagggacggaggtcaagtccattcgcctgggcaagtgcaacttgaaggattgctacgcgcaggtgaaggatggcgagatgtttgtgtatggcatgcacattagcccttacgaaaagggaaacatcttcaataccgatcctctgcgccctaagaagttgcttttgcacaaagcggaaattcgcaaactgcagcaggcggtaatgctcaaaggccttgcgctgatccctttgagcgtgtactttaaggatggccggatcaaagtggaattggcattgtgcaaagggaaaaagctctatgataagcgcgaaaccatagccaagcaaagcgcccagcgcgaaatggaacggcatatgcgcgagcgcatgcgctaatactaggggtattcgccactccctgatagggggccgtaatggtttcgacggggatcgtggagggatgagaagcgagcggcggccccgaaccgccataaaatcgggaaaaacaataactgcgaacgaagacaatctcgttctggcggctgcttaatgccgcctcgtcggccccgagcctcctgcggcgcggccagccggcgtcatcaaaagcagggaaccagttcgcttaagctttgcggcggatgggattttatgaagctactaaagcgctaagcctgtttgtgggcgtggcgcagagggaacgttaaaacacaaactgcgctcggagatgctcgtttcgccaggttttcggacaggggttcgactcccctcggctccaccaatggggtattaaacaaaccctatttcttcaaaggcggctttgccgtagtggtttggctttaataccgcaagaaaaatggctctcacaattatgctgtgagggtcattttttatggaaattgagggccgggaagtacccccgacccttgtatttgccttgtaacggcccatattcgcgtcttgtcccgctcgtggtaaaaagccctccaacgggcgggcgacgctctacggcctgttaaaagttctcgacgatgtttgcggtcagcgcgtcccaatgcgggatcatggaggcgttgttcatagtgcgccggaatgtatcaagcagcgtattgaacatatcaagctgggcttttccgctgctggcgctgccctgatgagctacagcccgcaattcagcggccagccgatcacccggcccgtatttttcgctcgcctccgctgcggcgctttcggcatatttggcaatgacacgctgcatggtgatattgcccgctatctgcgcgtccctcatcaggcttgcatattcggcgctccgtaaaatgcctgttttcaaaagctcaactgtcgccatgtccagcgcggtcgggtcaacgctacaatcgtgttctaccgcttcggcaagctcccggccaatgttttcgacttcattgatcttcattgccatgcggcgtcttacatcctccagccgcttctttgcctccgcgtaatcagccgtagcgcgggcactcctgtacgcatagtcataatctgtcatgccgtgacgttgcgggaggtctctgtgccgtttttcggccctatcaaattcggtctttgcctctgcatattctgcaaaaatctctcgcgccatgctgtcaacgcgctgcgcataagtgttgaatcttgacatatagttcctttctgccgttttacggctcaaaaaatgttaaacttctaaaagtgcatttagaaggcctgccagtctgtcgtcactgccggtaaagcgtccgcaacgatccggggacatttccagcatctagacggcctatttgccgaccaccatgcgtcgggaaacgtccgcaagggataaagtcagggacacggtgttcgtccaaacaagtacgttcagcagggctagcagacggcggtcaacgtcgcgccgcatggtatccatctaacatccgctcggcctgtgctggggtcaggatttgccgcccgtccccatcggccaaagcatcggcaaggctgaatgggtcaaggtcggcgagccaacggtcaaactcatccaacgaacaggaaagcgggtcaaccggggccatctgttccagcctccaccgctccaatgcggtcaagcgtgcgctaatatcgcgcatcggcgatcacctccactccatctccgcgcagcttgcgaaacaggtcaagcaccgtctgggcgcatggttgtgtcgggtcatattgtacgcgccgcacatcgtgcggaattacaagctgatacccataaagcgttcgagtggtgccgtccatatgttcgacacgaaaagccggtattttgctttgcggcaggtttgcaagccggttcagcctcgttttatatgagcgcatcttgttcgtcctcctaaactcttttcaagttcttcaattcgctgcaaaatatcgctttgttcgcccaatttcaaggccatctcgatacttgctcgcgctgctgataccctcgccgctgggggcgcagtttcgtccgctgtaatatcagcaagggcagacaatgcaccggtcaagtgctgccgggactgacagacggcattttctaccagatcggcctgtgccgctctgtatgcccgctgaaacgccggaagagcccggaatcgcttcattgtccgctcaccgacaccggccagttgtgccgcttctttcgctgtaggagcagccaggagcgccgccagcgcccgccgctgccgttcggtcaggccgtccgcatcggggccgtgcggggcctcctggggccgctgtgacatggtatcactcctttctctctgccccgccgtcctgtgagccaaaatcagcggggcaggcatcttctcaatatcgcttgtccaactttgccagcagttcacccgctcgcaggatttcggcgggggttgcgtctgcactctcaaaaacctttgtcaaggccagcagcgccgctcgttttgccgccgcctgttcctgatacaaagccatctttgctgcctgatttttaatccgggtttcctgtgctttcgctttcaactcttcagatagcaccatcacttacacctcctctcatctgccgcgccagctttttccggtaagggagataccattgcacatttccaaaagccggtcaataatggccactgctgtggtgctatctcctgttgccctgggggtcatgcgctttatcaactcatcgggcgcatagttcgttgtaatgatggtcggtaagtacgcctcgtacctgctgttgatgatgttgtaaaccgttgaaatggcccattccgtcggcggctctttcccgatgtcgtcaatcaccaagagagggacagttttatagatttgcagcacctccgcctcatctgcgccggttttgttgaatgtgcgtttgatccgctccagcaggtcaatcatggtcatgcagataaccggctttccatgagacaacaggaaattagagattgcagcggcaaggtgtgttttgcctgttccgggcgggccggaaatgaacaacccattcctccccggctctggctgcccacgctctgggagcagattgtcaaagccctctgcataccggcggcaagcggccagcgcccgtttattttcacccgtttcgatgaaggtgtcgaatatccgccgctggaaccgcacccccatcccgctctcgccgacgatcttgttaacgtgctcctggaatttgcggtttttctccacctcgcgctccgctttctcttgcgctatgcgttccgcctgtgccgcctcataagcggctacggcctccgggcaagtacagtgagttgcaacaggtgtccatagcactttattccccatgcggatccccttgtgatagagggttgccccgcaaaattcacataccttcggctccggaacgccggaaattccttcaaagtcgcaggacgatacaaaaccccgtgcgtcagatgtcgggggcgtggaacccggctgtccaattccggtcattcccagactgttgtccaatagtgcgttgctgaatgtttccatgttcatctcgtctttcccaggacacaagcgcctgtttccaatttttcatcttgttttttccgatataccagcctttcgacgcataaaatgcaacaaaagattcagcgtccacatgatagcccatttcatcgcagtacgtttttacatcttcaacggacggtggacaaaagcgtgtggacggcttgtccgtcccaatatttgaagttggagttgatattggagttggtgttgaagatgtagttggtaacgtgtccgtgtcgctctgtaacgtgccgttgtcggtgtgttcgcgccacgtttcaaaatccatcggctcgacaacttcctgtttacagcggcgacaataggtcaaccaatcaccacgcgcccgcttatcttcgtatcttcgactgtcacggtcaatatcgggcttcatcagttcccacgcaaaatcgagaacaatgtcatcaaaggacgggacctcacccgtctgtgcatatctcatcgacgccaaaaacagagtaccaaccttttcgacggacagtttttccaatgcgggcagaatatcaaaataaaacatcgtccccggcttgccgctgttcatccatcatcacccccaaacaaatcgcattgcccatcgagcagcattgtttctgccgcccttagcgctacccgtgctgttctggtaacacggcgatttgcagcgcatcggctgtcctgccgtcgcaaaaatttgcgcagctccaaaactcccttgcttccatcatcgggcagaaaatacccacgatctgaggcacaaatcggccgttttagcctctccaaatcaaccataacgcgcaacttgcgcggggttacaccagccatccgggccagttccgagccgggaaccgcgtgttcctcgcctctcagcagcagcgcggaaatacgtccgtcgggttgactgattgttggtgctgtggtaaaattacaagtggaaatagctgcttgccctgccgccgtttccgcctgtcccgttcccggttgccgccggggatgggatttctcttttgtgttcatgctctcacctcttgttcttttttccatgcctcaaactctgccgaatgttccttgatataggacttcaccccagccaaaattgaaagtgcaaagattttggcttgtttgtcactcataacttcccttcctattgtttcaacagccagagggtcaggcatgaacttcaccgtcctttaacgctgcaatggcgtcaagaatctgcatccgctgttcgcttgtcagttccttgcgaaaccacttgcagaatgtgtactcacttattccgatcttggcggcaatttcatactgcctgtatcggctttctttaataatctgtttaatgctatagttcatcactcgagaatttcctttcagttaatctgaacaggaagtgcgcacttcacaagttctgaccatattataaaacgattgttggtgttgactttggcgattttttgtgatataattcattgtatagatacgaaacattttgcgcagaaagtcacaggaagtgagtgatattatgagtgaagaattagagcaagtagttagttttgaagttgacgaaaacggcatacttgtttattcaacaaaaggagtatggggttattataccaaaa

SEQ ID NO: 394 - DNA, 2964 bp, Unknown
  16S sequences of unknown bacteria
cattgatttttggaatttcatttttactcgccacgggatttgtggcggcgcagatactcagcgcaagcagcacgtcgttgagattcagcaccttttgctttgagcggagaatttcggttttcatttttattataggttcaagcacgacgggagacataagcagcatttcgtcccttattcccgccatttccttgaccgaattgagcacggcggcggcagaagcggtcagcagctcacccgagcggccggtaacgatcttaccgttcggcagctctatcgccacggcgtgttcgccgcttttttcggcctttgcaagagccggagccacgaccttgcggtcgtttgtggaaagctcaagctcgttcatgagcgattcgattctttccaccgtttccatgtcgcctctgccctgcttataatcgcagcgggccttgaaatagcggcggattatctcctgcttggcggcatccctgacggcatcgtcgtcacaaattccgtagcccgccatgttgacgcccatgtcggtgggcgacttataaagcccgggctggccggtgattttggtcagaatattgttgaccaccgggaaaacctcgatgtcgcggttatagttgacggtggtcttgccataggcctcaaggtgccacgggtcgatcatgttgacgtccttaaggtcggcggtagcggcctcataagccacgttaaccgggtgcttgagcggaatgttccatatggggaaggtctcaaacttggcatagccggcgttcactccgcgcttatattcgtgataaagctgggaaaggcaggtggcaagcttgccgctgcaggggcctggagcggtgatgaccacaagggggcgggtggtctcgatatagggatttgcgccgtagccctcgtcgctgacaatgcgctccacatcgagaggataaccctttatgggataatggaaataacatttctcgccgcgcatttcaagctttttgcgaaaagcctcggcagagggctgaccggcatactgagttattaccacgctgttgaccgaaatgtccatacctcttaaattgtctatgagacggagcacgtccatgtcataggaaattccgaaatcggcacggatttttttcttttcgatgtcggcggcgtttatgcagaaaataacctcggcctggtcgttgaattcccgaagaagcctgaccttgccgttaaggtcaaagcctggaagcacccttgcggcgtgatagtcgtcaaacagctttccgccgaattcaagatagagcttgtttccgaattttttaatgcgctcggttatgtattccttttgcttttttatatacagatcgttgtcaaatccgattttcatacccttaaaatcccctaattttccttcattttttcaataagcgtgcaggccttttccacataaatgccgctgtccttcgcgcccttttcgctgaaaattcccgccgacttgaccggcttattgctgcggtagagcagataaggaaccgggtcggaggcgtgggtcatggtggaaaggggggttggatggtcgggcattatgagaatggtgaaatcgtcaagtcccttgagcttttcaagcagcggagcgagaatcttgttatcgatttcctcaatggctctgaccttgttttggatttctcctctgtggccgcactcgtcgggagcctccacatgaatataaacatagtcctgaccgtttttgagttcatcgaaagcggcctgcatttttccctcgaaattggtgtcgatatagccggtggcaccctccaccttgcagacgtgcatattggcgcaggtaccgattccctggacaaggtcgacggccgaaaccaccgagcccttaagcccgtttttgacgtagaagtcgtcaagcacggcttttttgccctgaccccaaagccagatatgggtggcgggacgcttgccctcgcttattctcttgagattgacgggatgatttttaagcacctcgccgctctttttcatcatttcgataagctcttttgcgccctcgtccctgtcgagatagggaccgataacgcggccgcttatgtcatgaggaggggtgagcgttccgatgtcgacgctgccgcttttccacacaaggcaatggcggtagctcacgccgggataaaaactgtatttttcgtttgacagcgcctcgttgaccgactttattatctcggcggcctcttttgacgaaatatcgccggcacaatagtcgaccatggttttgtcctcgaaattttcctcgtcgcttaaggtgacgagattgcagcgaatcgccacgtcgcagtcgtcaagggcaatacccatgttggcggcctccaggggagaacggccggtataatattttgccgggtcatagcccataaccgacaggtttgccacgtcgcttcccggcttcatgccgtcgggaacggtctttgcaagaccgatttcggcggtttttgcaaggctctccatggcgggatttttcgccgcctcaaggggagtttggtttgaaagctcgggcaggggataatccgccatgccgtcgcacaaaagaacaatatatttcatagcattcgcctccgttttcaatacagatactattgtatcacacaaagaaatttttttaaagtgtttttttgatttttatttttccgcctcggataaggtctttcgctcctttcgctgttcttattcattgtgcaatatatccgaaaattttcgcaatatttgtactgtgtttcgctatatttttattgacagtttcggaaaaataaggtaaaatacggttgaaaggataaaaacatatttttcgcatttaattttgaggtgagtccgatgtacagatagctttgcggatgttttctccgcgcaatcaaaatgtcccgatgacaaattttcgaatgacaaaaataagattgcaaaaaaggagacatatatgaaaaagaacaa

SEQ ID NO: 395 - DNA, 4795 bp, Unknown
  16S sequences of unknown bacteria
aaggccttatgagaaaccctgtcgcccacggcgaaatccaccctgcccgcctcggtctttttaaagccgaaggagggtttttccgatttgacatatcctccgccgaaggaggtgccggtaaatcccgtcgagccgaatcccgagcggccgcccttttgggaaaatccgccgccggaaaactccctcgcctcgaagggggaggaggccgctgtgcggtttgtcaggctttcgggaatttcgttcaaaaatcttgaaggagaattgcggttggtcatgccgaagagcatacggctgaaggaattggtgagataaagttttcttttcgcccttgtgattgccacataggcaagccgccgttcctcctcgatttcgctttctcccgcatatatcgactgggtgccggggaagatgctttcctccatgcccaccacgaaaacattggtaaattcaagtccctttgccgtgtgtattgtcatgagcacaacggcgtcggcgtcggcgttgaaattgtcgaggtcggtgatgagggctatgccgtcgagatattccacaaggctcggctcgtccgactcctcctcgtattgcagcaccgaggtggtcagctccttgacgttttcaaggcggtccttgccctcctcgccctcggcggtcaacgccgcgatgtagccgctcttttcaagcagctcggtcaaaatgaggtttggcgccttttcgggaaccgagtcgattatgggctgcatgaactttgtgaatttaatgagcttgtcggccgctctggaaagcgattcaaactcgtcggcgcggcttgccgcctcgaacatacttattccgagtgtgtcggcaatgtcggaaagttttccgagcgaagtggcgccgattcctcttttgggctcgtttataatgcggcggaaacgcagattgtcgtcgggattggccgcaaggtggagatatgcaagggcgtccttgatttcctttcggtcgtaaaactttgtgccgccgataatgcgatagggaatggccgaacgcataaaggcgctttccaggttgtttgacatggcgttcatgcgatagagcacggcgttgtcggaaaatttcccgccgtttttgaccccgtcgagaattgtctcggcaacataccgtgcctcgccgaattcgtcggcggcggtgaaaacctcgattttgtcgccctctccgtattgcgtccaaagatttttttccttttggttggcgttgtgcttgataacggcattggcggcgtcgagaatattgcccgtcgagcggtagttttgctcgagacggacggtgaaggcgtccttatactgctgctcaaaggagagaatgttctcaatggtggcgcctctgaagcgatagatactctgattgtcgtcgcccaccacgcagatgttgcggtgcgccgaggaaagcagctttacgagcatatactgggcgtggtttgtgtcctgatactcgtccaccattatgtatttgaatttatgctgataaaaggacagcacatcggggctttgctcgaaaagccgcaccgtccacacgattatgtcgtcaaaatccatggcgtcggcctttttaagcttttgctgataaagcttataggcctttgcaatggaggaaaggcggacgtcgccggcattttctctttcgtattcctcgggggtgatgagcatgtccttggccttgcttatgtgggaaagcagcgtcttgtaggacagcattttgtcctcaatgccaagctccttttggcactccttcatgacccgctttgaatcgtcggaatcgtatatggtgaagtgggaggaaaagccgatgcggtcggcaaagcggcgcagcattctcaggcaggccgagtgaaatgtgaaggcccaaatgtccttgctctgttcgcccagcattcccgaaagccgctccttaagctcgcctgcggccttgtttgtgaaggttatggcgagaatttcataggggcggggagggtcgacggttaaaagggaataaagtcgggggctgtcggcagcctttccctcaagacagtcctttaaaagggcaaggtcgccgtcgcaaaccccctcgggcagcttttcgctttcataggcgctgccgtatttgaccagattcccgattcggtttatgagcacggtggtttttccgcttcccgctcccgcgagaatgagcaccggcccttcggtatgaaaaacagcctttttctgcatatcgttcatgcggctgaaatctttttcgattattttctttcttgtttcgattatttcctgttcaagcagggtcaattctttcacgctccttaagccgaaaagagccgtaccgaaatttaagcggcaggtggtaaaaaccgaccgtaaaagttttggggcggcaaaccttcgtcagcttatattatacctttttttctctgcgctttcaatagaaaacccgcatttgtcaaaccttaattttatacataaacccccttgacatttaggggagatgagcgtataatacttgtatatttgataaggttaatgaatttttatacatttgtgaggacaaatatgaagaaaatattcatcgacggcagcgccggaacaacagggcttaaaatatacgagcggcttaaagagagaagcgacatcgaacttataattctcgacgataatgtccgaaaggatttcgccgcgcgaaagcaggcgataaattcctccgacatcagctttctctgccttcccgacgcggcggctgtcgaggcggtttccatggttgaaaaccccgaaaccgtcataatcgacacctccaccgcccaccgaaccaaccccgatttcacctacggttttcccgagctttcgggaagggaaaacattgcgaagtcaaagcgaattgccaatcccggctgccatgcaagcggctttttggctcttgttttcccccttgttaaggaagggataatcaaaaaggacgcgctgctttcctgcttttcgctgaccggctattcgggcggcggcaaaaagatgatcgccgaatatgagggggagaacccttcgccccttttggcggggccgcggcaatatgccctttcccaaagtcacaagcatttaaaggaaatggccgccgtttcgggcctttcaagtcccccggtcttttgccccgtcgtgggaaatttcttcagcggcatggaggtcaccgtcacgctgacttcaaaggattttgagggcaatgtcggcgacattgaaaatgtgtataagcaattttatacaggcccggtggttaaatattcggccgagtcggaggacggatttttgtcggcctcggctctttcgggcaaggacagcatgaccgtttcggttttcggaaacgacgagcgggtcatacttgtgtcgagatttgacaatctcggtaagggcgcctcgggagcggccattcagaatatgaacattgttttgggggtcggcgagacggtcggccttgagatttaggaggatatatatggatttgatttcgggcggcgtttgcgccgcaaagggatttaaggcaaacggtatacattgcggcatacgcaaaaaccgcaccaaaagggatcttgcccttgttgtgagcgaaaaggaggcttcggccgccgccgtttacaccacgaaccttgtaaagggcgctcctctcaaggtcacaaaaaatcacatttcaaacggcaaggcgagagcggttatatgcaacagcggcaacgccaacacctgcaacgcaaacggcgttgaaattgccgagcgcatgagcgatattttggccgaaactctcggcatttcggcaagcgacgtggtcgtcgcctccaccggcgtcatcggccagccccttgacataacccccataaaaaacggaattcccgagctttttgccggtctttcggaaaagggcaacgagtttgccgccgaggccataatgaccaccgacacggtcaaaaaagaggtggctgttgaattcacactttcgggcaaaaaatgccgtctgggcggaatggccaagggcagcggcatgattcatcccaacatggccaccatgcttgttttcataaccaccgacgcggctgtttctcccgagatgctgcaaaaggctctttcgggcgacattgccgacaccttcaacatgataagcatcgacggcgacacctccaccaacgacatggtcaccgtgcttgcaaacggcatggcggggaacgaggaaatcaccgccgagggcgaggatttcgacattttcatgaaggctttaaacacggtaaacatcgccctttgccgcatgatagcgggggacggcgagggagccaccaagctgctggaatgcaaggtgagcagcgctaaggacaagcagacggccaagaccgttgccaaaagcgtcatatgctcctcccttttgaaggcggcaatgttcggcgccgacgccaactggggcagggtgctttgcgccatcggatacagcggagccgacgttgatgttaacaaaatcgacgtttcctttaaatcggcggcgggggagatccttgtctgtaaaaacggcgccggcgtggaattttccgaagaggacgccaaaaggattttaagcgaaaaggaaatagaaattctcgtcgacctttgcggcggggaagcctcgtcaacggcatggggctgcgacttgacctatgactacgtcaaaataaacggcgactacagaacctgaaagagggaaaggtatgaacagcgaattttcaaacgctcagcgggccgagtgctgctggtgttgacctttggtgcggcgctgttcctgtttgcca

SEQ ID NO: 396 - DNA, 2565 bp, Unknown
  16S sequences of unknown bacteria
tgaccttatatttgcgcagcagctccacccgccggtttcccagctctacagcgcctttggcgctgccctgatcccggtcagacagataatggaagatccggctgccccacgcccgcggaagcatccagggatgatccttcagataaggatatttcccgctcagatcagacacgctcggaaacaaggtcttgcgaagcgtccgcttcccatccgccgccgcattcagggtgatcgtgctggaatgctctcgctccttggagctcttgccaaacagacctgccgctacgatatcgtccagcaagtcttcataatccaacgcagaaagatcgatgccctcaggcagtgtgatgcggctgacatcaaagcccagatgatccaccgcgatcgcaaacacattctcgctcagcgtcagcacatgttcctcttccagcactgcataaagatgcggccagtcgatctccgtgccgaaccgctctgcatacatgatgatgtcaagcacctgacggatgcctacgcccccatgcaggaaatgcttgacaaaatgcatgatcagaaacagcatgtgctgcgcatgagaaagcgaatagatatcgcatcccatgatctggtgcacagcaggatgcgcaaatgcatccgcaaagaatcgctgataagacccatacgcctgtgacttctcagaaaacagcgtcgtatgcatctcgatggacagcccgctggccgtatccagcagcgtcgtcacctcttcgctgcggtttcccacctggaagccttcctccagcatgatcttttccgccagcggtgcatcctctttgcgcacatacagatcctcatcattggacggacggttatctggtttcggatacagggcgcggcagacgatgcccttgagcacgagcaccttcaggtccgcttccagaaaacgccggtacagccggacgaagcggtcgctcttcatcgcctggatcgcgttggtgcggatcgccatcttcttccactgcggctgcagatcttccggaaagttcggaaaacgatagagctgatcatataggagtgcgaccacatcatgctgcagtgcggatatgaacagtctggcaaaatcaacttctctgggttctgaagctcggccaagccgcgcgtctttcagcagggtcagaaactcttccatatctacctcctgtatccgtcattttttcagacttatttattttatcatacttcaaattttatacaaccaagacactgccttttcctttcccggaagcgtttaccacgacatgtaaaaaccgcagaatgcaagaatctgcatatctctgcggtcacttcttttccagcgattcaacatgcgctttccgctgctccacaccgtctctttcctgcgccagctcctcgccttcctccacatgatgcctcagccattcttccatcagatcaggctgatcatgcaaaggcacaaaccggatatccggcttcacatacttctgcttcatccaccaactcaccttcctgattattatacggttgttcacccgattttcatcccattttcgttttccatttactgacagctcacatctgcgcattagaatgaatgctgatcaagatatggaaggggagacgacgatgaaagcatatgtaacaccgatgatgacaagcgaagtgtttacgctgaatgagtatattgccgtgtgctggcaagtggcttgcagtaataacacaactggttataatcatagctcaaatacaccatatggcaataagtggagcggtgttgaaggtccatatgactgggtattcagccacaatggtgattgccgcaatgccagcaacaactatttccgtggaaacagcgacggttcaaacctcgaatttcttatggaaacaagcagtgaccaaggtgaattaacagggggattcgatgattggatcgatgttaacggcaatggcatagtagacggtaacggcagaataggcagtgatgtcatctactggtataccagtaatggaacaagaagatggaaccactggggctacgtgcaaagtgccagcagcgaccatatcaatcgatcataaacagtgaaaaatgatcccataacagatcaatagatatcaaaaaagcatctttaacatgcttgtgtttagctgctatatctatagcagtcgaaacacattaatcatgtcctaagatgctttttaattatttttccttgatagtcagataaagtcaaggagtaagattcatatgaaatccaaatttactctagcattgaatattcatttttgatcaatcgataagattctttagcatattcacacatatattcaggaactgcgtcgtaacttccttcttctaataaagcactggcacagcatgtacgacaaatcgggcgatattgacatgcattgcactttgcgctggtacggatttctgatacggccgcagatatcttttcccatgcagaggaaaacccttcttcaaacacagaaacagatggttcgctcatgaccacacacggtctcatgaatccctgccagttgatcgtaaatgagcaattgccagccagacaa

SEQ ID NO: 397 - DNA, 17575 bp, Unknown
  16S sequences of unknown bacteria
cttctgcgtaatcgtgcagaatcgctcctgtttctgcgtgctttgagcgttctgaccgctcaaaagtatgtacatccccgatagacgcgcctcgccgtcccccgtcacttcgcacaaaaaccgccagccgcacctcccgcagaagccgttacgatctgtcagaagatacagcgtcccgattccgcggactccatatcgtccgcgataaacacaggcagctcaccggcgattcctctcccgcgccgctccggctcagtataatacctttgtaatgttcatctgttcatctcttcctgcttaattatataccttttccgcggatatgtcaatactctgacagattttgacgaataaagaacaaaacgtccgcgctgtgaatttccatgtcgtattttttgccgcgctccactatatttcattgatttttgttaccgtgaacaaaatagatgcgaattgctattgacaaacctgtcaatatatgttatactgatatcagcaaggaccggagcggtccgcgccggtcgcaacggtggggcacgatgattcccgcctgataatatgtttttcgagaaaggaacttcaccagatgaaaaagcatcgcctgttttcccttatcctgtccgcgcttatcctgacctcctgcggcggcgccgcttccgacccgaccgttacctccgacacgcccgacacaacgacggaaccgatcgagaccgaccccgaatacatatatcccgacaaggattacggcggacacgagttcgtcttcctgaaccttgaaacctgcggctgggcgaaccgcctctgcgtcccggaggagacgaacggagaactcataaacgacgcgatgtacgagcgcaacgcccgcgtcggcgaccgcttcaacgtcaccttctccgagatctgcggcacaaaggaggagctgtcaaagctcatccgaacggcagtcaccgcgggcgacgacgtctatgacgccgcgttctgcccggtcgacaacataagcgcgctgatgtcggacgggatactgaccgaccttctgaaagtgagctcgctgaacctctccgaggcgtggtgggacaacgacgtcatcgaggcggggacgataaacgacaagtgctacctcgcgtcgagtgatatcagtttcttcccgttcgaggcgacgtggatactctatttcaacgaggacaggttcgacgcgctgaacactccgtatccgtacgacgacgtgcgaagcgggaaatggacgcttgacaaattctatgagctctgccagtccggcgcgtcgctgaacggtcaggacagctacaagtacgacgagaactcggtgacagcgaactatggtatcgtcacgcacaatcagtgcgttcagtcgatgatgttcggcacgggagagacgctcatctcgacgaaggacgggaagccggtcttttccggcgagagcgaccgtgtgtacggcgttttcgagaagatcgcgaagattttcggcactgacggcgtctgccttgaccgcgacaagatcggcgcgtccgataccgacgcgaagcctttcgcgcgcacggcgttcaggaccgggcacttcatgttcatgtccgagacgctggggcacatcgcggggctgcgcgactttgacggcaacttcggcgtgcttccgctcccgaaatatgacgagaatcaggagagctaccactcgatgatggcgacatggggcacgctcatgacgacgattccggcgagcgcgtcggatccggagcgttcgggagtcatcctcgacgccctcgcgtttgacagctacaagaacctgatggagccgtactacgagacctatctgaaccagaaaggtgcgagaaacaaggattccgccgaaatgctgaagataatccgcgagacgagagtcatcaacgtcggtcatatgttcggctggaccggaagcgtgacaagctcgataacgagcctcgtcgagaaaggcaacgcgtccgtcgcgtccgcgattgcaaaggcaaagccctctatcgagaagagcatcgataagacgctgacggctatggcggaatgacacataacctcataagataaaccacaaaaggaccggcggagccggtcctttcattatttattataagcgcttacccgagaaattcctcagccttgaccctcgcgagtctgatatgctttctcgcgacggtatacgacatatagagatattccccgtaaatcctcgtgtacggatagaacaggctgtccttcatgtccgcaacgagcacgggcttgctgtctgcctgattttcctgatttatccggattatcccgaagccgtcgcggttcagcggggcgtgtacgaggtacagctcgtctttccacatgaagaagtcagagcgggactgcgcgtcgcgtataagcgtcggcgccgaccacttcccggtcacaaggtcatagcaggtcagaaatccctgcatacactcctcctgcctgacaaaataccagcacttgtcgccgatgacgtacacggcgttctcccagagcgacagattgatgaaatcaggcgtcgagacgtactcccacgtgacaaggtcgcggctcttgattatcgcgttccagtagcccgagtacgcgccggtgtaataccatgtctcgccgttctcctcgcgcgtcgtgattttctgcatgatgccgatgtcgctgaacataactttgtgcccgataccgttctccgagagcgccgagacaatgccggtcgttgagaaatcgttcgtcacgccgccgactttgaatcggttcggtcttatctcacccatctcgccagtcgagattcgataggtcgtgtagaaccggtagtagagcccgtccgccgacgccgtccacatcagcataagctcgtcctcattcttctccatcagaatcgtgtcgtaaacccggtcaatgcgccgtccgtcaagcgtgtcgccgaccttctggacgcggattatcgtcatgtccgaggtatcgttttccgggcagaacgcgaagcgcgcctcctgatacgccgggtcctccgcctctgtgccggtgttcgcgtagtaggtcatgtagatgaccccgcggattatcgcgaaggtcgatacgtgaaccatcaggtcgacgtgctcgccgggatgcttcgccgcataggcttcgttcttctcaaagtccgcgataaagccctttttcagcgcctccgcgcacttgtcgccgagcgccctcgccgctttgtcgcggtcgggacgtatacagccgtcgtagtccttcacgggcgcgtccgggatgacgatctccggcttgtctgtcacatagttttctgcaaacataaaatcctccgatcattcgctgtctcggaatctgaaacagctatttcatgaatacattatatcacacccgagcgccgttgtcaataggtaaagtaaaatttgaaatgcttatttcaaaaaaatttttcgcgaaaaaggttgacatccggctgtcgtatcatgtataattattgtagaaagctttgaaaggagaccgcgctgcgcggtcacggtgataattcatggttaaaacaaagagggtcggcgcgctcgatatgccgatgctgggcttcggaaccttccagatgcgcggagatgtctgcgaaaaggcggtcgcgtgcgctctgtccgaggggtatcgaatgattgacaccgccgcggcttacggcaacgaggaggcggtcggcgcggcgattaagagttctgatgttccccgttccgacatactcatcacgacgaaggtgaatttttcgtcctatgagaacgcccgcgcttctgttgaaaagtcgttggggctgcttgggactgattatcttgatcttgttctgcttcattggccgttcggcaattattacgcggcgtggcgcgtgcttgaggagatgaagaaggaggggaagatccgcgagatcggcgtttcgaatttcgacccggatcgtctgattgatttgtctcacttcaattcggaggttccggtcatcaatcagactgagacgcatctttactgccagaggctcagggagcactcttatgagtcggcgcttggcgtggcgcatgaggcttacgcgccgcttggtcagtcgagggcgaatgagatgtttgacgagccggcggtcagggctgtcatggagcgcgcggggaagacgccggcgcaggtgctgctcaggtttctcgttgattctgacgtgatagcgattccgaagtcggcgcgcgcggagaggatacgtgagaacattggcattttcgatttttccctgacagaggatgagctgtcggcgctgaggtcgctcgataaggcgtccccgatgataggccgtgctgaggatccggagttcgcgaaggtcgcggtaacgtggtaaagacagcaagggaaactttttcgagaaaaagtttcccctgcaccccttcaaaaagctttataaaataaaaaatccgcgcacaagtgaggacatcgttcaacatcgcacagagtgagtcgacgtaggagacgcggacgcgggcagcaaaaaaagaacacgcgctttacgaaaagcgcgtgattgggtgcaggggctggcccctgctggtgccggtaaccggggtcgaaccggtacggtattgctaccatcggattttgagtccgacacgtctgccaattccatcataccggcgtgtctttaatattatagcatattttgatgaaaaaagcaataggttttccgaaaaaagttttgggcggaattcatatgttgctctggcatggtggatatataaaaatagtataatgcgagggacagaactgttacatattgcgcttgacatatttgtcggaatgtgttataatattaacatacttgcggagaatggtctgtgagtggggtttgccgcctgagaataccgggcgatgagttttattggaaacaaaaaatatttttttgcgaggtagaaggtatgaataaggtaacgattatcggaacgggaagcgtcgggtcgacgattgcttatacgctggctgtgacgggacaggtatcggagatcattatgatcgacgtgaataacgagaaggcgctgggcgaggctctggatatcagacagggaacgccgttttgcagtgcttgttcggtttacgcggggtcttatcgcgacgctgagggatcgaatattgtggttatcacgtcgggtatcgccagaaagccggggcagtcgaggcttgaccttgctcagactaacgtgaatatcatgaagagcatcatcccgcagatcactaagtacgctccggacgctaagtacatagtggtgtcgaatccggtcgatatcctgacttatgtgttctgcaagcattcggatcttccggagagccatatcatcgggtcgggtactattctcgataccgctcgtctgcgcgcgcgtctggctgagtattaccggattaaccagcagaacgttcatgcttatgtcatgggcgagcatggcgattcgtcgttcattccgtggtcggtggctaacatttcgaatgttccgctcgctgactgccagaagctgatcgtcaattccgagggcgtttatccggagctgaattatgacgatatcgagacttacgtcaggaagtcgggcgcgcgcgttatcgagcgtaagggcgctactttctacgctatttcggtttcggtctgccatatcatcaagtgcctgctcggcggcattgacactactatgacggtttctaccatgatgcacggcgagtacggcattgacgacgtatgtctttctgtcctgtcggttgtcgggcgtgagggcgcgcatggtaagattctcgttccgctgaccgacgacgagatcgcgaagctccgtcacagcgcggactgcctgaaggatatcatccgtcaggtcgagatctgacatataataccgttacagacagaggctgccgcgttttccgtgacagcccgtctccatgatatattgacatatatagagaaaggtaacagaatggaataccgcattgaacatgattcgatgggcgagatgaaggttcccgccgatcgcctctggggcgcgcagactgagcgcagccacgagaatttcgagatcggcgtcggcatcgagactatgcccgctgagattatccacgctttcggcatcctgaagaaggcggcggctatggcgaaccacgagctgaagcccgagaagatgaccgacgagaagctcgccgctatttcggctgcctgcgatgaggtcatcgcaggtaagctcaacgatcatttcccgctcgtcgtctggcagaccggctccggcacgcagtcgaatatgaacgcgaacgaggtcatccgcgcccgcgcgaaccagatcgccggcagggagctgactcacccgaacgacgacgtcaatatgagccagtcgtcgaacgatactttcccgaccgctatgcatatttcggcggtcatcgcgattgaggacaagctgatcccggcaatcgagaagctcatttccacctttgagcgccttgagaaggagaatgacgacgtcgtcaagtcgggtcgcactcatcttcaggacgctaccccgataaagttcagccaggagatttccggctggagggcgagcctcgagagagacgtcgagctgctgaagctcgcggtcgccccgctgtccgagctcgctctcggcggaaccgcggtcggaacagggcttaacgctccgaagggctttgacactcttgtcgcctctaagatcgcggagctcaccggcaagccgttcagaaccgccgcgaataagttccacgcgctcacctcaaaggacgagatcgtcttcgctcacggcgctatcaaggcgacggcgtgcgacatgatgaagatcgcgaacgacgtcagatggctcgcttccggtccgcgctgcgggctcggcgagattcatatccccgagaacgagcccggctcgtcgatcatgcccggcaaggtcaacccgactcagtgcgaggctgttacgatggtcgccgttcaggtcatcggcaacgacgtcgctgtcggcatggcggcttctcagggcaacttcgagctgaatgtgttcatgccggtcgcggcttataacttcctccagtccgcgagactgctcgccgaggctatagtctcgttcgagaagaagtgcgcgtgcggcatcaccgccaaccgcgacaagatgtactcgaacctccacaattcgctcatgctcgtcaccgcgctcaacccgtacatcggctacgagaacgcggcaaagaccgccaagaaggcgtataaagagaatatctcgctgaaggaagcgtgcgtggcgctcggtttcctgaccgcggagaagttcgacgaggtcttccatcccgaagaaatggtctgacaggtcttccgcggaacgccgataaggtattccgcggggatttcaaccttaacgaaaggtgtttatataaaatgaaagtttcatacttccccggctgcactctgcgcaacaaggcgaaggatctcgacaggtacgcgagggcttcaatgaaggctctcggcgtcgagctcatcgagcctgagaactggcagtgctgcggaggggtcttcaccacctcacgcgacgagatcgcgacgaagctcgcgagtgtccgcgccctcgccgacgcgcacgcgaataaccgtccgctcgtcacggtatgttccgcctgccacaacgtcataaagcagacgaaccaccagatacagaccgacccggaattcaccgagaaggtcaatctatacctctcgcaggacaaggacccgatctcctaccacggcgagaccacggtatatcacctgcttgaactcatccgcgacgttgtcggatttgacaagttaaaggaagccgtgaagaatccgcttaccggcagaaagatcgccgcttactacggatgtcttcttctgagaccgaacggcgcaatgcagtttgacgacccggagaacccgactatcatcgagaacttcatccgtgccctcggcgcggagccggtcgtttacgcctcgagaaatgagtgctgcggcggttatgtcgccctcgacgacccggagaccgcgaagaagcgctcgaatgtcgtctcgcacgacgccgcgtcgcacggcgcggaggctatagtcaccgcctgtccgctctgccgctacaacctcgtgaagagcggcagcgagataccggtcgtttatttcaccgagctgctggctgaggctctcggagtaaaggaggacgcctgatggataagaagtccgaactcgaaaaggaacagatactcagaatgagcggcgtcaacccgctgcgctgcatgaggtgcggcaagtgctccgcgacctgcccgaactacgacgagatggaatatcatccgcaccagttcgtctatatggtcgaaaccggggacatcgagccgctgctgaactcgaagtcgatatacaagtgcctgacctgctttgcctgcgtcgacagatgcccgagaggcgtcgagcccgcgaagctcatcgaggcagtccgtcttatggcggtcagaaaacagggcgcgaactacctgaagcccgaggatatcccctctctcatcgacgaggacactcccggacagcttctgatgagcgctctccgcaagtactgcaagtcgtaacaggaggaaaaatatgcagagaatcggagtattcgtatgctggtgcggcacgaacatcgcgggtaccgtcgacgtcaagacggtcgccgagacgctcgggcacgagcagggcgtggttttttccaccgattaccaatatatgtgctctcaggcgggacagaacataatcaaggacgcgatcaaggagcataagctcacgggcgtcgtcatctgttcctgctcaccgagaatgcacgaggcgaccttcagaaagacggtcgcggcggcggggctgaactcatatatgctcgaggtcgcgaacatccgcgagcagtgctcgtgggtacacaaggacaagctcaccggaaccgccaaggctataatcctcggcaaggcggctatagctaaggtcaatctcaacacgcctctcacccccggcgagtcgcccgtcacaaagcgcgcgctcgttataggcggcggtatcgcgggtatccagaccgcgctcgacatcgctgacgccggattcccggtcgacatcgtcgagacaaagccgacaatcggcggtaagatggcgcagctcgacaagaccttcccgaccctcgactgcgcggcgtgcatcctgaccccgaagatggtcgacgcggctcagaacgagaacataaagatatattcctactcggaggtcacagccgtcaagggatttgtcggcaacttcgacgtcactatcaagaagaaggcgcgttacgtcaaggaagacctctgcaccggctgcggcgcctgcaccgaaaagtgtccacagaagaaggtcccgaacgagttcaacctcggcatggacaaccgccacgcgatctacattccgttcgctcaggcggttccgaaggtcgcgaccatcgacccgaactactgcacgaagctgaagaccggcaagtgcggcgtctgctcgaaggtctgcgccgcaggagctatagattatgaagccaaggatgagttcatcgaggaaaagtacggcgctatcgtcgtcgctaccggttacaacccgatcccgatggatcagttcgacgagtacgcttactcgcagtcgaaggacgtcatcacgtcccttgagctcgagcgtctgatgaacgcggcgggtccgaccggcggcactcttttaagaccgtccgacaacgagcatccgcacacaatcgtcctcgtccagtgcgtcggctcccgctgcaagaactgcaacaagggcaaggagtactgctcgaagatctgctgtatgtacacggcaaagcacgctatgctcatccgcgacaagtacccggacaccgatgtttatgtcttctacatagacgtcagaacgcccggaaagaacttcgacgagttctacagaagagccgtcgaggagtacggcgtccactacatcaagggtcaggtcggcaaggtcacgccggacggcaagaagctgatcgtccagggctccgacctcatcatgaacaagcagctgaagattgaggctgacctcgtcgtcctcgccgccgctatcgagccggataagtccgcgagaccgctcgccacgatgctgactgcaagcatggacacgaacgacttcttcaccgaggctcacccgaagcttcgtccggtcgagagcccgaccgccggcgtcttcctctccggctgctgccagggaccgaaggatatcccggagaccgtctctcaggcgagcgccgccgccgcgaaggtaatcggactgctcgtcaaggacaagctgaccggcaacccgtgcatagctcagccgaacgagctgatgtgcaacggctgctcctcctgcgagagagtctgcccgtacggcgctatcacttatgtcgacaaggaattccgtatgcccgaccgcacgacgagagtgcgcagggtcgcgagcgtcaatcctgccgtatgtcagggctgcggcgcctgcacggtcgcgtgcccgtccggcgcgatggacctcaacggattcaagaatgcacagatcatggcggaggttgacgcgatatgccgatgaacgaagagaataaaactttcaagccgctgatagtcgctttctgctgcaactggtgctcctacgcgggcgccgatcttgccggaaacaacagactggcttaccccgcggacgtcaagatcatccgcgttccctgctcctgccgtgtgaacccgatgttcatcctgaaggcgttccagcgcggcgcggacggtgtcatcctctgcggatgccatcccggagactgccactacacatccggcaactactacacgagacgccgtatggctctgctcttctcgatgctcgactacctcggcatcgagcgcgagcgcacccgcgtcgagtgggtctccgcggcggagggcgcgaagttcgccgccacaatgaacgatttcgtcgaaaaggtcaccgccctcggcgaaaacaagagactggaggatctcagatgcaggaaataaagcgtgaggtactcgtcgaaaaggcaaaggagcttctctcgaacggcacggttgaccgtgtcctcggctggaagcgcgacgaggatcccgataataacttcgactggaacatcactccggcaatattcagaacggcggaggagattgaccgcgacttcgtgtggaacgatttctgcggcgcgaacttctcgaagtacctgataaaggagacgatcggcaaggacgcgaaggttctcgtgttcttaaagccgtgcgacacttactccttcaaccagctcctcaccgagcaccgcttcgaccgtgaaaaggtctacgccgtcggcgttccctgtaacggcatggtcgatataaacaagataaaggctgtcgccggagacgacgtgacgtctgtcgacgacggcgaaaagctcaccgttcacactctttatgacggagacgtgacaatcgacgcgaaggacgttcttccggacagatgccttaactgcaagtcgaaaaagcacgtcgcgtatgacgagcttctcggcgaggacggagaggttattgactcgaaccgcttcgacgaggtcgaaaagctcgagaagatgacgcccgacgagcgcttcgcgttctggcagggcgagctctcccgctgcatacgctgcaacgcatgccgcaatgtctgcccggcgtgtacctgcgagaagtgcgtgttcgacaacccggcgtccggcgttgagaacaaggcggcggcgaacaccttcgaggatcagatgttccacatcatccgcgcgttccacgtcgccggaagatgcaccgactgcggcgagtgctcgagagtatgtccgcagcacatcccgcttcaccttctgaaccgcaagttcatcaaggatatagacgagttctacggcgagtatcaggcgggcgcagaggtcggaagccgcgctccgctcgtcaactacacgaccggcgacctcgagccgtctgacgcagtcaacagaggggaggaataagcgatgagaaaagcaaatgacataaacgcgttcctcgcgtccctcgcgaaggtattaaccctttaccttccggtcgacggaaaagccggcgctacattcgaagagtggaccgacggcgcggttctcgcgaagagcctcaacacgaacagaagcccgaaggacttcttcttcccgcagtccgagtgcctgatggaattcaagcgcgagggcaagaacatcgagatcatcgacacccgccgcgagcatgaggatttcgcagttttcggagttcgtgcctgcgacgccagagcgttcgccgttctcgacaacgtcttcctcggcgagccgaccgacaccttctacaagaaccgccgcgagcacggggtcatcatgaccctcgcctgcgagaagccgggaaccacctgcttctgcggtacattcggcattgacgccgctgaccccgccgacggtgatatctcctgccgtataatcgacggcgcgctttacctcgacgcgaagaccgaaaagggcaaggcgctgatggcaaagctcgaaaacgtcaccgaagacgccgacgccgacaccgctaaggttgaggaaaacatcaagacgatcaaggagcgctacgcgaagacgccgctcgccggtcttaagaaggacgctttcggtcccggaaagacagagaagttctttaacgcgcccgagtggaaggagctctatgagtcctgcctcggctgcggaacctgcacgttcgtctgcccgacctgccagtgctatgacataaaggatttcgacaccggacacggcgtcatccgccacagatgctgggactcgtgtatgtactcggaattcaccaagatgtccgctggtcagccgagactcacccagatggagagattcagacagcgcttcatgcacaagctcgtctactatcccgagagatataacggtctcttctcctgcgtcggctgcggcagatgcgtccagaagtgcccgatcaacatgaacatcgtcaaagttatgaagaagctcggaggtgccgacaatgcctgaaatcaaagaacctctcattccgtcggtaggcgtcgtcaccgacatacgtatcgacacgccggacgtcaagaccttccgcgtcgtgaccccggacggcaaaaagccgttcgagcacaagcccggtcagtgcgcgatgctctccatccccggcgtcggcgaggctatgttctcgatcacctcttccccgacactcgaggagtacatggaattctcgataaagaagtgcggatgcctgaccgactggctccattctatggacgtcgggcagatgatcacgataagaggaccctatggcaagccgttcccggtcgacactgagttcgtcggcaaggatatgctgttcatcgcgggcggtatcggactcgcgcctcttcactcggtcatcaactactgccgccacttcccggacagatacggaaagctcgacgtcgtttacggctcccgcagtatgcaggatctcgtcgattacaaggagatcataaacgagtgggaagccgacccgaacgtcaatatgcacctgacaatcgaccgcgagcagcccgagtggacaggtcacgtcggcttcgtcccgaactacgtcaaggagctcggatttgacaccaacaagatcgccatcctctgcggcccgcctatcatgataaagttcaccctcgcgggtcttatggagctcggcttcaaaaaggagcaggtctacaccaccctcgagatgcgcatgaagtgcggaatcggcaagtgcggacgctgcaacgtcggcgcgaagtatatctgcaaggacggacccgtcttccgtttcgacgagctcgacgagctcccgccggagtattgatgaaatattgaaaggaatagccaaaaatggataacatggtaaatatctacctgttcggcaagctctacagcgtaccgtccgagctgaccatcatgcgcgcgatggagtactcgggctaccagctcgtccgcggctgcggatgccgcaacggcttctgcggcgcctgcgcgaccatctaccgtatcaagggtcacagcgaactgaaagcgtgcctcgcgtgccagacaaaggtcgaagagggcatgtacatcgcgaccctccccttcttcccgctcgtgaagcaggtctatgacatcgagaaggtgccggtcgaccagcaggtcatgatgcagctctacccggagatctacgcctgcgtcggctgcaacgcctgcacgaaggcttgcacacagaagctcaatgtcatgcagtatatcgcctacgctcagcgcggcgagttcgacaagtgcgccgaggagtccttcgactgcgtcatgtgcggagtatgttcctcccgctgtccggcaggcatttcgcacccgcaggtcgcgatgctcgcgcgccgcataaacggcaagtacctcgcgccgaagtcaaagcacctcgaggacagggtaaaggagatcaaggacggaaccttcaacgatctcatcgaagccctcatggaaaagccggtcgacgagctcaaagagctctacaaccaccgcgagatcgagaaataaggaggaagaccggatatgtactcaaaggattttgaagcgtccctcaaagccgttgaagcggcaagagccgagaacgtaaagcttgaacccagacgcatgaccgccgacgagaaggacgcccttctcgctcagtatcaccccgactacaagaagagcgaattcgccgagctcaagttcggacctaacaaaggcgaaaaggtcccgcacgagcttgtcgagatgctcgaggcgcacagccgcatcaaagccgacgacgtcgacctcacgaacccgaagtacgacgttgacgtcctcataatcggcggcggcggagccggcgcttccgcggcaatcgaagccgacaaggcaggcgcgaaggcgatgatcgtgacgaagctccgcatcggcgacgcgaacaccatgatggcagagggcggcatccaggcggctgacaagccgaacgactcccccgcgatccacttcatcgacgcgtacggcggcggtcacttcgcggcaaaacgcgaactcctccgcaagctcgtcaccgaggctccggaagccatcgaatggctcaacgatctcggagttgagtttgacaaagctcccgacggaactatgatcaccacccacggcggcggaacctcccgcaagcgtatgcacgcggcgaaggactactccggcgcggaaatcatgagaaccctccgtgacgaagtcctcaaccgcggtattccggtagtcgacttcaccgccgcgatcgagctcatcctcgacgacaccggcaagtgcgctggcgcggtcctcatgaacatggaaaccaaggaactcatggtagcgcgcgcgaagaccgtcatcatcgcgaccggcggcgcgggcagaatgcactaccagggcttcccgacctccaaccactacggcgcgaccgccgacggactcgtactcggctacagagtcggagctaagctcctctacgccgacaccctccagtaccatccgaccggagccgcatacccgtcccagatcttcggcgcgctcgtcaccgaaaaggtccgctcgctcggcgcaaagctcgtcaaccgcgacggcaaagtcttcatgcacccgctcgaaacccgcgacgtctccgccgcgtcgataatccgcgaatgcggcgacagaaacgaaggcgttgaaaccggtgaaggcaaagccgtctggctcgacaccccgatgatcgaaatcatcggcggcgaaggcaccatcgaaaagcgcatccccgcgatgctgcgtatgttcatgagctacggcatcgacatcagaaaagagccgatcctcgtctacccgacgctccactaccagaacggcggtctcgacatcaacgtcgacggaagcaccacgaacgtagaaaacctctacgtagccggtgaagcagtcggcggcatccacggcagaaaccgcctcatgggcaactccctcctcgacatcatagtcttcggcagaagcgccggtcagcacgccgctgaaaagtccaaggaaaccacagtcggcagactcaccctcgaccacatcgcgaagttcgacaaagaacgcgaagaagccggcgtcgtcaccgacctcgtctccccgaagctcctcccgaactacgtcagaaaagaatccgaaaccagataaacacaatttcccgcgtgaaaaacacgcgggaaatccctgcttaaaataatatcaagaaagttaaaggtctcccaaaatggaactcatcaccgatctcttcgaagccctcacaatattctgcttcggtctctcctggccgatctccatccgcaaatcctgggtctcccgcaccgcaaaaggcaaaagcctcttcttcgaaatcttcctcctcataggctacgccttcggtatagcccgcaaaataatccaggtctcagcaatgggctcctccggcttcatcttctacctcagcttcttcttctatgtcctcaacttcatcgaaatctctatagacgtcgctctgtatttcagaaataccaagctcgacaaactggctgaagaaaacaagtaaacgttagttttgcggggggagctttttttcggagaaaaaaagctcccccttcaaatacgccttggcgtatttgctgggatgccgcttgcggcatcctcgccccccttcaaaaaagctttatactattatggattacaagattgtgcatcgtacctttatctgtgctgtactgctagctctcgccctcatgttcgtcgggtgcgggaacgatagttttatcatgctctcgtcgaccgaatctccggcacgggacgccaaagccgtttttgaactcgatatcagcggaatcaacggagccgaaatcaccaccgaacttcggcagaacggggaaagcaacacccaaccgctcatctcactcgacaactccgccaaagacctcgcgataaccataacccccgacaaacaggacagcgacaaatacaaccgcgtaaacctcaccgcctcctccggcgacctcacgcggaacgccatgttcaccgacctccccgaagccgcgggctggtccttctccacgcaaaagcaaaacgagaagctcaaaataaccgccggcgaaaccaaagtcctcgccgccctcgccctcgacaccggaaacggcgtcaggtcaataaacctcgacaacatcgacgaaaacaactacgactgcgtaataatcatccgcgcggaattcaactgaccctcatccccggcaaaaccggggtttttctttgcaaaaaaaagccgccgtgataattctcacgacagccatacttattcacgccccacgtcggaaccaagctctcataaaccctttcgctctacccctgtaggggcgaccattggtcgcccgctctgacgctcaccgcgaacctcacttattcacgactcttgtcgatattacgctcccgacagcgaacgcgccgacaaccgatataacatccttcgcgagatacggcaccgacgcgagcatcgccgc

SEQ ID NO: 398 - DNA, 2762 bp, Unknown
  16S sequences of unknown bacteria
agggacggtcggtcagctcatagacattatcgccgtttcccgagcccgaggaagaagtgctgcccgcacccgttcccgtcgtgaccgttccggtgccgccgggagcctgctgcccctgaccgaacagatagccggtattgctgccgttttggccggtcatgtcgtcggcatcgtcctgctgccaataggaatcgtcaccgccgctttgctcgtcgtcgcccgcggcggaaccaccgtcggggaaaagaatctgattgctgttcagctcccgatcggtatcaaaggggaaaaacccctgacggctccttgcaactcccgtaacgacaatcgccaaagcgagcaccgcaatgagacccgtcgaaactatgcgaagttttcctttcatacatcttttacctctttttgaatcgtctgcccgataataccgaacaaggcgtcataatcaatgggtttgctcaaatggccgttcattccgctttcgatggagaggcgttcgtcctccacaaaggcgtcggccgacagcgcgtaaatgggaatttcctttgcgtcgcggcggtcaagagctcttatggccttggtggcgtcgcggccgttcatgaccggcatctgcacgtccataaggataaggtcatatgttccctgctcgcaggcggcaaacttgtccaccgccgccttgccgttttcggccacatccaccgtcacgcccttttgcccgagaatttccaccgttatcatggcgttgatctcgttatcctcggcaagaagcactcggcaggaaagcttgtcgggcagcggctttttcgctttttcctcctgctcgggcttttgctcttccgtctcgaccgtatcgcccgctgcaacgggaagggtgagaaacaccgagaaatccgagcccttgcccttaaggctttccacaacgatttgaccgcccataagcttgacaagctgatcggaaatcgccattccgaggccggttccgccgtagcggcgtgtggtgctggtgtcctcctgctcaaaggggttgaaaatgcggtttatgaattcggggtccatgccgattcccgtgtcgtgaacctttatcatgagatccaccgaatcttcaagcttcatcatctggcggaaggtcaccgtaacctcgccctcgcttgtgaatttcacggcgttggaaaggaagtttatgacgacctgacctatcctgagctcgtcgcccactaccctgtccaccgtcacactttcgaaattgacgttatatttgactcccttggcgtcaagggttttgttgaacatattatagagcttgtcgccgaaggctttaaggctgaaaacgccctcctcaagctcgaccttgcccgcctcgatacgggacatatcgagaatgtcgtttataaggcttaaaaggtggtcggaaagctcgtcggttcgacggagatactgcatggcagggtgattttccggcaggctgtcctttgcaagctttatcataccggtgataccgttcataggggttcttatttcgtgagacatacggaaaaggaagcttgttttgaactgacttgccttttcggcgtcgtcgagacatcttttatactgctcctcccgcttgtgctcctcggtgatattgcggaaaatcagcagatttgtggttttgtcgcggctttgctcggccgtgaggaaaagccaaagcccgtcctttgtctcaaactgaaattcaaagggctcgccgccgtcaaaggcctcgtactttttccaaaaagcggcctcgtcgtcgtgattctttgcacagccaagcatgcttttgacatcctccgaaagccgcgacggagtcacaccgagaagcggctcgagagcgccgataacctcggtgggcataaggtcgcttcgcctcaaagcgatacagacctcgtttttctgctccgacagctcctgcaaaagaagcctttcggacaccgaaaaatccgccttttgttttttgaccctgcgccttctgcgagggatatatccgagcagaaccaccgccgccacaacttcgatacagccgacaaccaccaaaatataattgcggccgagcagcgttattaaatctgcaaataaactcattgattatctcccttaattcaaggccgccgtcacaaaatcgacagcccgccgaaaagcgccttgcacgcactttcccacacttactataattatatcgattaaactcctatttttttcaaaaaacaatgtgattggagaaaaaaggcaatctttgtcacattatgcaactgtgtacctacccaaaggcacttttatgtaaaaaaaagtcacttcgttccgaaatgacaaaaaaatccgcgtttttcacggccgcaaaggctcaaaaacacggattttgccttattttttgattaaaattcacaaaagcagaacccgccccgcgaagataaaacgggacgggtcctttgtcatgtcaatcgggttttataccgcgataagctttttaagccaaagcccgcactaacgggtcttaggcagacgggttttgaaaaacttcacaaggccgcatttccagcaaagcagcataccgaaaaccgctcccacaaccgcctgaagaatctgataaggcagcttgacgattgcatactggggggtgctgtatataaacgcgcggccgagagaatagcccacaaccatgataacggctccgattgccacgcctattgccgaggcggcgacgggacggtttttcacgttaagcatgggaacaaagacaaccattttta

SEQ ID NO: 399 - DNA, 1734 bp, Unknown
  16S sequences of unknown bacteria
atcaccaaatgccgggaaaactatgtatgcgtggatcagctgccgcgcgatgccgatttcttcttctatcaaaatatcgtcaatcgcgacgtcaacaccgtccccagccactgcgttatcgaggaatatattgccaagaacggaatggattaccgctacgaaactgcgcccaaccccattccggcactcagagacagaacaaaggacaatacaagcgtaggacgatgagaaaaggccgccttttggcggccttttttatagataggtaatacgattgcctggacgggccagaggcataaccggcctttgtttaggaagaccaagcgccaccccgccgtagatggtttcctccggggccatgcccaaggaaagcaggtatgaacggatagaaggctcgtcgcgtagccaccgaatttgattgatccagcatgatccaagaccaaacccggctgcagccagcatcatgttttccagggcacaggcgctgtctgccatggcgttgccgtggtcaatcagatttgctacgagcacaagcacaggggccccgtacaggaaatcgtacgccccttgcttggctttgcgtatcgaggatgccaagctttcataagtatcaggtgatgcttccatttgagcaaaggcggcaacggctctttggctaagctctgctaagatatccggggactggatcaccaaaaaatgacaggcttgcttgttgcctccgctgggggccattcgcccagcctccaaaatttcgcggagctgatagggcggcagcgtatccggaagaaaggaacgaatgctgcgcctagcggccatattggcaagaattggattcatatataacgcctccttttttatatcgtatagaaatacagaggaaaatacaattgtcttgtcagctgtattgacatttttgggggaatgtgccatactgcataggattatggtgaggaggcggatgcaatgtccgacataacaaacgagatacaggcgctaaagcgcaagcgggatgcagtgatcttagcccattactatgcgcaggatgaggtgcaggcgttggcagattacgtaggggattcctattatttgagtaaagtggcccgcgaatgcccacaacaaaccctggtgttttgcggcgtaaaattcatgggggaaagtgcgaagatcatgaacccagaaaaaactgtgttgatgccggatgaggtggcggattgccctatggcacatatgacggatgccgagcgtatccaacaggtacgcgcccaacatcccgaagcggcagtggtatgctatatcaattcaacggcggaggccaaggctgccagcgacgtctgcgtaacaagcgccaatgccatgcgtatcgtacaagcgctgccaaatcgcgaaatctactttatcccggatgaaaatttggcgcggcatattgcggcagagctgccggaaaaacattttatattcaatcagggctactgccatgtgcatgccaggctgactgccgagatggtgaaaaacgccaaggaagagcacccaagggcgctggtgctggcgcatccggaatgtaggcaggaggtactggccttggcagactatatcggcagtacttccggcatcatcgagtttgctaccaagagcgaaaacgaagcattcatcgtatgtacggagatgggcgtgatgtatgaattaaagcaaaaaaatccgaacaaacggttttacacggctgagcaggatcagatc

SEQ ID NO: 400 - DNA, 18773 bp, Unknown
  16S sequences of unknown bacteria
aaaatcaattatctttgaattgcccaaaatatcatacttccaattgataaatgcaaatataataaaatttacaaaaaataatctaaaaataataaattaagaatacgaacaaacttttgaaaaatataatccagtgtaatagtgcaatgcctctgattgcacctatgattaaggtaaacaggcaaaaacattgtttgcattgtaaaagtcatatacaataaaggtaacactacgtaaataagttggaatggcacacttgtcaaaaaacaattcacacttatttgcgcaatatccataaactatctgttttgctttaattttgcaaataatataggtaatttattttttacaaaataaatgcctttaccgcacatataacatgaatttgtttttttattttgtaaaaatacacttagtttttttactattttactctccggcgaaacatactctatcaattctcgatataaataagtatcgaataagccttcaataaactccttttgttctttaccattcatacctgagcgtttatcacaatttctttgaattgctgaagtaacatatcgaacataaatatttgctaaaatcttcttcacttcttctgtgcacaatccccagcttttatataactctaacattttgctaattctaagcatatgcaagtcataataatctgcaacaaatttagaagttaaaccataatctatttttttctgataatggtacggagcaatatttagtatatttaatgaatcaatattttgtacaaaagcaatgttaaaaaaaatatcttcatttaaagccatactatcatattgcagttgttgttcacgcaaatagtttaaatcatatagcttattccaaggatatcctaacagcgtctttttctccaaacgaataatatgaggtctcagctcttctttggatgaaaataaatattccgggtagtctacctttactgttgtcgctaattgattagaattatcatagtattcttctattaaaccccatatcacaagcttggcaggatttttgtgtaaagaatccactgctaactgtaaggcgtctaaatctaaataatcgtcagaatccatgaataaaacataatggccttcagctaaagtcatcccctgattacgtgcattacttacaccaccattttgttttaaatgcattaccttaacgcgatggtctttgtttgcaatttcctcgcagatggtaccgcatttatcaggagaacaatcgtccaccaaaattaattcaatatcctgaaatgtctgttgtaagatgctttcagcagccctatttaagtattgttctacaccatataccggcattactacgctaataaacggtttgctcatgttggtactcctaacgttttgcttttaaagatgcaaacatttttacattcttttgtttgatggaagagataaatttaccttccatataggctaaattaacatttttccacttgattggctttaacattaatttcatataggaagaacggggctgagccattctcaatgcccttgcaacgtttggattattcaatattttatgaatttctgcttttttttcagctgtagacaaagtgcaatttggagtagttacattttcaatacatcctaccacacgctctatataacgacggtgaatcatttccatacttttatagtctttaatctgccagtgcttatataaatctaacatccattggtgttcttcttcacgtttttcgtacatatcactgcgatactttgtagtttcactttctgctcttgcgcgcataaaatgatagtattttttagaagtgacgcctacccgttctacgtcacgtatcacacttagattaaaaggaaaatcatcccaaaatgtattggaaaatcttaaattatggtcgttaatatattttgcggaatataatttattccaaggcgtataaagtaaattcaaatcaaacaagcgataagcttgttcgcgaaactcttgctgtgaaccaaatatttggtccggctgagataactccgctgtaatgtaattgtggttatcataatacgtgtcaatgtaataaccggctaccactaattgtaactgatgtttttctgccaactcatacatatcctgcaacatggtcggttcagcccaatcatcagaatccataaaataataatatttaccttgtgcaatgtccatagcagtatttctagcggtgggggcgccagcattttcttggtgaattacatggattctagcatctttttcggcatattcatcgcaaattttaccactattatctggagtgccatcatctataattaaaaattcaaattcttttaaggtttgattttgaatgctttcaatcgcttttcttacatatttctcaaccttatatacaggcataatgacactgatctttacatcagacatataaatttactcctccgcaagtatctgctatttgtcggccaactctttttgtgccgcatttaatgcagatgcaattactttatccatatcataatatttatattctgccaatcgacctccaaaaataacattatgttctttttcagccaaagaagcatattgagcatatattttttgatttttttcatcatttaccggataatacggttcgtctcccaatttccagtcagcagaatattcttttgtaacaacagttttcggttgtgttccaaattcaaaatgcttatgttcaattacacgtgtatatggcgtttctctatctgtataatttaccactgctacaccttgatgattttgttcatccaatatctcactttcaaatcgtacacttctgtactccaatgcaccatattcatagttataataagaatctattgttcctgtataaacaattttatcggccaatgatgaaagtttttctttatcttgtaaaaaatctacgtttaaacgaacatcgcatgattctaacaatcgttcaattaaaacattgtatcctccctcggggataccctgataacggtcattaaaataattgttgtcatacgtatatctgacaggcaaacgcttaataatgaaggccggtaattctttgcagtctcttccccactgcttttctgtataacctttaattagtttctgataaatatcttgtccaactaggctgattgcttgctcttccaaatttctaggttctcctgtaatttgggatctttgttcatctattttagctttcgcctctgcaggtgttttaataccccacattttagaaaacgtgttcatattgaacggcaaattataaatttcaccataataattcgcaataggtgaattgatatattgattgaattctacaaattggtttacataattccaaacctttttatcacttgtatgaaaaatatgggctccatattcatgcactgtaattccttctatttctttacaataaatatttccgcccaaatggtctcttttttcaattattaagcaagattttccgttctcagtcatctgttgagcaaaaactgcaccaaacagaccactgcccacaattaaataatcatatttactcaatttcttcttaacacctttcgtaaaaagtacaaaccttcccttatactccgtacattataacatttttataaattgattgcaacaaacgaacttatatatgtatgtagaaaaaaccttcaatattcacaaattttatgaaaataatggtgaaacatgccgtttatattgcattcaaccggaggatatgcttaaataatataatagaaaaattaaaaagtgggaggttcttgtttgtgaatgatgtgctttatctggttatcccttgttataatgaagaagccgtactttatgaaacatcaaagcgtttattagatgtaataaaccacctggtaaaaacagaaaaaatttcgtccgaaagcaaaatcatgtttgtaaatgacggttccaaagacaaaacatgggaaatcatcgaatcacttcatacacaaaatcccattttttgcggtgtttgtttatccagaaacagaggccaccaaaatgcattgttagccggattaatgaccgcaaaagaatatgctgatatggttatttctttggatgctgatttacaagacgatgtaaaggccattgaaaaaatggtcgatgaatatcataatggttatgaaattgtatacggtgttcgttcctcacgggaaaaagatactttttttaaaaagacaaccgctaagggcttttataaatttatgaaattacttggcgtagagattgtatttaatcatgctgattacaggctgatgagcaaagcatctttagatgttttagcgcaatttgaagaagtaaatttatttttgcgcggaattattcctttaattggctttaaatcaacaactgtagaatatgaaagagataaaagattcgccggagaatccaaatatcccttaagtaagatgttagcgtttgcgtttgatggaatcacttctttcagtattaaaccaatccgaatgattacttgtttgggatttttaatatttttagtaagtttaattgcgcttatcgttttcattattctaaaatataccggtttcacaataggaggctggacctctactgtggcatctatttggatgataggaggcatacagttgctttgtttaggtgtcataggagaatatatcggaaaaatatataacgaaacaaaaaaacgtccccgctacattatttcaaaagtaattctaaataaagaaagaaccgattcatgaagaaaaacagagctgtcaaacctattgtaagccgtatttttcaaggtttattttttatatcgtttatataggtttatgttattgtcactttaacaaatagcgaggatatgccatggctttctgtactgcttggaatgttcattttagatgccgagcattggtgccgctgatttctataacaaaatcattttaaaatgaaagaaaaaacaatttctcaaatttacattttcattgattgtcaacaaacttttcggcggacatatgggattaccagccgccgttattggtttattttttgttccctttatacatatgcgtcccaatatgatacagaggtttttactcttccgtttgtaataatttcaatttacctgtatttgtgtgctattgcaaaaagtacacgtaaaatataaaaaatacctaactatatttagtataccacctgatttcaattaaaacttttacacaaattgtagatacctatatatgataaacaaaaacaggaactaaaaaagtgtataacccctaaaatttgtgcatacaaataattagtagcttaaaaaggggtgtaaaagttttgaaagtgaatagggggaagattgcgaaccatagcataagccatgacgtggaggaccgcagtgtaatactgggtcaatatatttccacaacacactccaccgtccgaagcacggctaaaaaatttggtgttagtaaaagtaccgttcataaagacgtagcagaacgtttaaaatacatagatccccagttatacaaagaagtaaaacaaatattagaaattaacaaagcacaacgtcatatccgtggcggtatggcaacaaaattaaaatataaaaaacatacagattgtgaagaatcctagaatacatatatgaaaagcagctggcaccaaatatatccggtgtcagctgtttttattttatatctatgatatcaatcacatatatttcaaataaatcaatccgtcaccactttatggcatcagattgtctatcattggttttaaataataaacagtagtacttatagcctaccaaaacatgatatatttctgaataccaatatcacaattcgttttttgattgtaatccgcttcatttccaatttgtagatgactccagacatcctcctaagtttgtccccgggcaaacttgattatccttttcctcctgccggaccgaaatctccccttgtccttttcggaatgtccgggagtggttgtaaacaaaacacaaaacgattttaaataactatgtataagaaaaagtcaacgaacacctgactttttctttttattcgcaacaatgagctatgcagcctcttttagaactcttgtagggtcaatccaaacgccttcttttttcatctgaatatgcaaatgggcccccaatttctcctcaatcggtatggtaccaacggttcctaaaatttggccgtcttcaacagtatctccggcggcaagaagacttttatctgtcaagccgcaataacgcacctcaatgtccccatgctgtatcacaagcacattgccccacataatgtcctcatatgagtccactacggttcctgcaccaatactcattacattttgtcctttttccgcaccaatatcaaggccgtcatgtgttctccaatcgtccattgtcatattgtgtacagggtctccgttactgaacccatttaatatttcttgtccggccacgggataattataatattccggcacttggctttctaccggctgttcggatacaacctcgctggaaacagtctcttcactggaagcagattcggaaacaacctcgctttctgcaatcggcaagttatcttccatcacattatctttcggaacaccgctgacggtttgatttacttccgctgtagaactttgcggtgcagacgaagaagcggtatcctgggttacatcagaaattttcactactgtatcgtatgttgcccaagctcccacgccaagtgctaccaaacacagcgccatagccaaataaacacctaaatttttttgttttttaggctgagaagcaccatcgtcttttacagcactttcttcctctgcctcttcatcatcttcttgatattcctcgtcatccagtatatcatcagtttcctcttccagaagctcttcttctaaatcatcatgctcatcatatggttgttttttatcatgtaaatccattttagcacctcctaaaaagtatgttgcccgttcttaatacggaatatgccaaaacaggattttatttttggattttattatttttatattttcttatgaattgtacacgctatgcttcatttaaaatatccaaaaatacccacaaatatgaaaaaaatcatttcacaaaataaaacataaacaaaaaaatgatatttttacggcaatatttaaaaaaaccttaaaaatctgcctattgccttgataaataccattgttttttatataatagttgccatgatatggaacgataaaataacgtataaggagcgctgaaattatgggaaaagctttgatgattggtgccggcggcgttgccggcgtagtagcacataaatgttgccaaaatccggaagtattccaggaactttgcattgccagccgcacattatctaaatgtgacgctttaaagaaaaaattagacggcggcaaaacaaaagtaaccacagcacagttaaacgcagacaatacagaagaaattattgcattaattgaaacattcaaaccggatattgtaatcaatgttgcattgccatatcaagacttaaccattatggatgcttgccttgcaacaaaagtccactatttggacactgcgaactatgagccgcccgatactgcaaaatttgagtataaatggcagtgggcttataagaaaaagtttgaagaagccggcattaccgctattttgggcagtggatttgacccaggtgttacaggcgtcttttccgcatacgcacaaaaacattattttgatgaaattcataccattgatattgtagatgccaacgcgggagaccatggttatccttttgcaacgaattttaatcctgaaattaacattcgtgaagttaccgcaaacggcagctattttgaaaacggcaagttcattgaaacagagccaatgtcaatcaaacgtgtctataatcttccacaaatcggaccgaaagacatttatctgcttcatcatgaggaaatggaatctttggcattgaatatcaaaggcatcaaacgaattcgtttttggatgacattctccgaaagctacctgacacatttaaaggtacttgaaaatgttggcatgacctccattgaacccattgaatttgaaggcaaacaaattgtgcctctgcaatttttaaaagcggtgttacctgaccctgcatctcttggtccaagaacaaaaggcaaaaccaatatcggctgtatttttaccggtgtaaaagacggacaagagaaaaaatactatgtatataatgtttgcgatcatcaagcatgttatgcagaggttggttcacaagcaatttcctatacaacaggtgttcctgctatgattggcgctatgatggtactcacaggtaaatggaataaaccaggtgtttataatgtggaagagtttgatccggacccatttatggaagcattaaacaaattcggattgccttgggtggaagattttaacccaaacttaattgactaatcaatggacagtgttgtttaccacgtcggatgtaagcatctgatttgcgattacagtgagttgtgcagtatcctaatttcattttgatactgctatgagaatttgcgacattgatattctacagttgcaaagcagtgaaacactgtcaaaacaatacatgatataaaaagactgcagaatttcgtatcgtacgtatatgctgcagccttttcacttttgaaataaaacggataaggaaataaaaactatggatattgatatttcaacactgcccaccccctcctatttggtggaccaacggctattaatcaaaaatttggaactgctctcctctgtgaaagaacgaacaggatgtaaaattctattggcacaaaaagccttctctatgttttccgtttatccgctgattgccaaatatctggacggcgttacctccagcggtgttatggaagctcgtttgggatatgaagaaatgggaaaagaagtccacacatatgccccggcttttgcagaccatgaaatggacgatgtgattcgttattccgaccatattgtttttaattcatttcatcaatggaacaaattcaaagataaagtaaaaaacagcggaaaacaaatcgaatgcggcttacgtttaaacccaaaatattctgaaattgacacagatatttacaatccctgctttacaggttcccgtctcggtattacaccggaacaatttcagcctgaccaattagacggcattgacggacttcattttcataccatgtgcgaacaaaattccgataccctggagcgcaccttaaaagttgtggatgatacctttggttcctacatcaaacaaatgaagtggctcaacttcggcggcggtcaccatattacccgttccgattacgacatagaaaccctaattcgctgcattcaatttgcacaagatacttatggggtacaagtatatttagaacccggagaagctgttgcattgaatacaggatatttggtatctactgttttggataccattgaaaacggaatgcatctggctattttggacacttccgctgcctgccatatgcctgatgttttggaaatgccgtatcgtcctcatatcattggagcaggtttacccaacgaaaaaacgtatacgtatcgtttgggcggtcctacctgtcttgccggtgatatcataggagattattcctttgatgcgcctttaaaagaaggcgacaaattaatcttctgtgatatggctcactatactatggtaaaaaacaatacgtttaatggaatgaacctgccatctattgctttatattctcaggaaaacggactgcaaatcatcaaacagtttggctacgaagattttaaaagcagattgtcttaaccttccacttgacaatctatttttacagttttataataaacacatcatataaaaatttaatataagaactggggagtcaatgaaattggctgagagtgaggtggtgtcctcttactcatggaacctgtgcggttcataccggcgtagggagtttctttttatgtatttccagttcaatttttacagtatatactggaacttcaaaaaccgaactctttacaagggttcggttttttgtttccctttttcttgcgataaaacaggaggttcttttatgaaattaaacgggacaatctatcatttggaacaaccggttatcttactggatttactgaatgaatacggatttcaaacacagcggattgcagtagaaatgaacggcgctattattccaaaagcaacgtatgagcaagtaaccgtaaccaatgacgatacactggaagtcgtaagctttgtaggcggtggctgatatgaaactgattgtaaacggaaagccatataccaccaacgcttccaaactactagacttaaaagaagagttgcaaattccgtcagacgttaccatcttaaacggatttcaagtatcagaaaatctcgatatcaaagagggagatttggtgactctgattcaaaaaggaaaaatgccttctcaagacgaattggaaagcatgatgtgcgcacggcatactccaaatgtccatcataaggtaaaagaagcaaaagtggcaattgcaggtctgggcgggcttgggtccaacattgcaattttacttgcccgcacaggtgtaggcactctgtttttagtggattttgatgttgtggaacccagcaacctcaaccgtcaaagctactatatctctcatttgggattgcccaaaacagaagcgctaaaacaacaaattgagcaaatcaatccttttatcaaagtaaaaacaaagcaaatccgtgtgacggaagaaaacgcgcattcactttttgaggagtatcctattgtttgcgaagcatttgataacccgatttccaaagcaattttagtgaatacactgctggaacaaagtccccaaacaaaattggtatgcggttccggcatggcaggatacggttcttccaataccattcaaacagccagaaaaatgaaacatttatacatgtgcggagatggcagcaccgcggctgaagtaggcaacggcttgatggcaccgcgtgtgacggtatgcgctgctcatcaggccaatatggttctccgcttaattttaggaatagaagaggtttaacaaaatgaaagatacattgattatcggcggtcatgaatttcattcccgctttatcttagggtcaggaaaatattctcttgaaaaaatgcctggagtcattgaaaacagcggagcagaaatcatcacacttgctttgcgccgcgcaaataccggaggggacggaaatattttggattatctccccaaaggtattactcttttgcccaatacatcaggagcccgcaatgcagaagaagccgtacgcattgcccgactttcccgcgaactgggctgtggtgattttataaaaatagaagtcatccacgacagcaaatatttaatgccggacaaccatgaaaccgtaaaagccactgaaattttggcaaaagaagggttcatcgttatgccttatatgtgccctgatttaatcacagccagagcattggtggatgcaggtgcagcagcagtcatgcctctggcagcgcctatcggcagcaataaagggctggtatcacgggaatttatcaaaatgattgtaaacgaaatagaccttcccgtcattgtagatgcaggaatcggcgcaccgtcgcaggcatgtgaagccatggaactgggcgttgacgcagtgatggcaaacaccgcagttgcaaccgcaaaagacgtgggcgcaatggcaaaagcatttaaactggccattgaagcaggacgactggcttatcttgcaggacttggacgcgtgctggactttacaggagaagcctcctctcctttgaccggatttttagaagattaacagaacacagaaaggcagggaatgatgtatggatacttctgctatgatagatggaatctcaaaaacagagctggaacatatggaacgtatcgacagtgatatcatggaacggacgctttcctactatcatcaatttgatttttccacatttacctccgcagatgttcaaaacgcattacaaaaagaacaactgtctgctttagattttgcagctttactctcgcccgcagcacaaccattgttagaacaaatggcacaaaaagcaaaacggttgacttgtgcacaatttggcaataacgtaggcttatataccccgctgtatattgccaattattgcgtcaacgaatgtgtttactgtggatttaactgcaaaaataaaattcatcgcggcaaactttctatggaggaaattgaatcagaatttcaggcgattgcccaaacaggtctggaagaaattttaattttaacaggcgaatcacgtcatcaatccaatcttgattacattggacaggcagtagaattggcaaaagaatattttactaccataggtctggaaatttatcctctgaattctgacgagtacgcctttctacatgaaaaaggcgccgactttgtcagtgtttatcaagaaacgtatgatcctattttttacaaagaagtgcatttgaaaggtcctaagagagatttttcgtatcgattcaacgcacaagagcgcgctcttatgggaggaatgcgcggcgtaggaataggtgcattgttaggactgcacaactttaggaatgatgcacttgcaacgggactgcatgcaaagtttttacagcagaaatatcctcatgcagaaatcagcttttctgttcccagactgcgtccttacattaataacagcgaaaacaatcccaatgatgttcacgaaacacagttgctccaaattatgctggcataccgtatattactgccatttgcaggcattaatatttctacccgcgagcgtgcgggattccgtgataatgtagtgggactctgcgcaacaaaaatttccgcaggtgtgaaaaccagcgtgggcggccatcagctggaagaaaaaggcgacgcacaatttgaaatttctgacccccgcagtgtggatgaaatccgtaaaatgctcaaaaaacgcggattacaagaagtgtttacagactacatacgtttgtgaggatacaagtatggtaatttgcgttacaaacagaaccctatgtaaagatgactttttaaagcgcatcgagtctatatgcaaagcaggaccaaagtttatcatcttgcgggaaaaagatttagacagaaaagagtacacacaattggccgcgcagtgtcttgccatatgcaaaacatacggaatacaattggtacttcacacgcacatacagtctgcccttgaccttggtgtaacggcaattcatcttcccctgcctattttgaaacaagaaagtaaacgtctgaatgcgtttactatgataggcacttctgttcatgctgtggaagaagttgctttggcacagaatcttggggcaacctatcttatcgcaggtcatatcttccaaacggactgcaaagcggatttaaaacctcgcggcatctctttttatcaaaaggtacaaaacgcatcacatattcccgtttatcccattggaggcatacataaagatacggcgcaagaaatcataaatgcaggagcaaccgacttttgcattatgtcagagctgatgacttgcgaccacgtagaagagaatataaacatatatcagcaactcacgccaaaaacggatttatgtgccattcctggggtaggtccaaacatgaaacaacatatgattcgcttgggttatcattgggtagaagatttaaaacaagcaaatccggacgaaatgtatcaacaagattgtatcttacatggcggacagttggaccgctgtgtgttatatgtatatcgtttggctgtatactttgcaacaacgcccaatccggaaccccaaaagttaaaatggtggtattggaaaaagcattgttagcatttgacgtgccataactgttgtgctatgatatggttaatatatcagattggagatgaaagcatgattcaactttcttgctaataaaaataggcacaataaatatcactgtgtatgacataaaatacactttatttattgtgcctttgcaagaaagtattctctgttttcaactcaaaatcataacaatacatcctcctattggattttagaatgatatttttgagctgcaagaaagaactttcttgcagcttttattttgttttaaagggggattttccatgtcgcaaatcaatatatccaacctcactttttcttacaacggaagttatgacaccatattcaaacatgtcagcttttgtatagacaccaattggaaattaggtttcattggaagaaacggaaaagggaaaacaacattttttcacttgcttatgggaaaatatgactacagcggtcatatctcatccaatgtaacattcgaacattttccctatgatgtaaaagataaatcacaatggaccatagaagtcatctcgcaaatttatcctgattatgtccattggcagttggtaaaagaattgtctcttttagaagcagatgattccattctttatcgcccattccaaactctttccgacggagaacaaaccaaagtattgctggcaattctatttttaaaggaaaacagcttccttcttatcgacgagcctaccaatcatttagatgcacatggaagagaaattatccgcaactatctcaatcaaaaaagcggatttattctaattgcacatgacagagcatttgtagatggatgtgtagaccatattctatccattaataataccaacatcgaaattcaaaaaggaaatttctcttcttggcttgtaaataaagaacgacaagactgctacgaactgacagagaataaaaagtgcatgaaagaaatttctcgtttatccaaggcagctaaacaagccagcacttggtcatatcaagtagaaaaatccaaatatggtacaaaaaattcagggttacggcctgatagaggatatgtcggtcataaagccgccaaaatgatgcagcgttccaaatccatacaaggccgtcgtctggaggcaatcgaagaaaaagcaaagctgttaaaaaatatcgaccaaacagagcatttaaaattatctcaaccagtttaccattcccaccgtttggcatctttccgaaatgtttctatttgttatgagaacaatatcatttgtaaagatatcacatttactattgaacaaggtgaccgcattgctttaaacggaaataatgggtgcggaaaatccagcatattaaaacttgtttgcggatacaatgttccatactcaggtgaattttataaaggcagtaatatgatgatttcttatgtatcacaaaataccgatgcattatgcggaaccttatccgactatgcagcagcaaacaaaattgcggaaagtgtattcaaagcaattttacgcaaattagattttacaagagagcaatttgacaaagaaatacaatatttcagcggcggacaaaagaaaaaagttttaattgcaaaaagtttatgtcagccctcacatctgctgatttgggatgaacctctgaattatatagatgtaatatcgcgtatgcaattagagcaattattgttggaatacaaaccaaccatgttatttgtagaacatgaccaaacatttcgagaacatattgcgacaaaaacgatagagctttgaaatgaaaaaagagcaacccataagggctgctcttttttcatttcagatagcaacaaatttccaattatttgttgaaaaatcttttgatttcaatctttgcattttcaacggagtcagaaccgtgaattacgtttgcgccggtgctggaagcaaaatcaccacggatagtacctgcagtagcttcttcaaatttggtagcgcccatgataattctcataccttgaactgcattttcaccttctacaatcatgccgaatacaggaccggaagtcatgtattcaacaatttcagggaagaatggtttgtccgcaatgtgagcatagtgctctttcaaaatagcttcgtccaaatccatcattttagcgtcaatcaatctgtagccttttctctcaattcttgcaatgatttcgcccattaaacctctttgaactgcatctggttttaacataatataggtttgttcgatcatagtacctaatctcctttaaaaatattacatggatatgattattatatcataaaaaaaattgctttgcaatttttaacgaattcttgctaaaacgttcctatcaacatccaaaattttaattttgctactgttgcagggctgctataacaaaaattacagagcagtctttcactataaaatactaaaatgttcttatatcgttcgaaatttttaattttgtctccatgatagagttattgcaactaagtattttaacaataacacgatttaatttacaatgtttttctcatatgtatatgcatttttctgcagtcgtcaaactcttctccaaaaggttgatatccgagtttttcataaaatccttttgcatgcaactgcgctcctaacatagaaaactgcgcacctctcttctttgcctcctgttccaattcacgtaacaaatatgcccctactttctttcctcgatgctcttttaacaccgcaatccgtcccaagtacgctgtaacattatcctccatgataaaaaaacgacctactgcaaccggaacagaatcggaaaataccaaaacgtgagatgcagtcatatctttttcatcaaattctaaattagggtcaaaaccttgctcgtgtacaaaaacagcttggcgaattgcatatcccggattatttttttccaaaccacaaaatagttctgtatgcaacataatttaaaatccatcctttttagcgttattttattatatcgatttcccacttgtatttcaacaaagatcgcataaataagaaaaaacaggctacattaatattgcgcttgatttctattttatcctttgtcttctaaaagggaatcaatcacattttacgaaaccgtatatacctctttattcgtaaaaaataaaaccataatatatatattatatcaaaataacttcattatgtttaaaattatattgacaaaacaacacattatatatattattttctaaaaacatctaattttataccaagaaatgagaggggagccttttggaaaaaaagcgtacacaattttcaggcaaaatagggtttattctagctgccgccggctctgcagtaggactgggaaatatatggagattcccctatttggcagcagaatacggcggcggcacctttttatttttttatatattatttgccatcacatttggcttttcacttatgattgcagaagttgctctgggacgcaaaacagggagaggcgttgtcggtacctttcaatctttggacaaacgctttacatttatgggttggcttaccatgctggttcccattctaacactgccatattacagtgttacgggcggctgggtaatgcattatggcatgctgtttttaacgggtcaaggcgccaaaacagcagaaacaggtttttttcagtctttttctgccaatcctttatggccggtattctggttgtgtatttttgttgctatctcgtgcatcattgttatgttcggtgtaaaaaagggaattgagagaaccagcaaaatctttcttcctatattaattgtattaaatattgccattgccatctatgtcatgacgttacccggggcactggatggcgttctgtattacattacccctgatttttcaaaattatcatttggcacaattattgcagcattgggacaattgttttactccatgtcattggctatgggtattatgtttacgtatggctcatatctaaataaaaaagagaacttagaagcttctgtacgtcacatcgaattatttgataccggtattgcatttttatccggtcttatgattctacccgctgtatttgtattttcgggaggagatgcaaatgtgttaaactccggttccagtcttttatttatcacaatgccccaagtatttatgagcatgccgtttgggcaagcggtaggagcagtcttcttcattctggtattttttgcagcattgacttcagctatttcgtttgtagaaaccattgtttccgtatttcaggatcaatttgggtggaagcgaatccctatttgcatcggtacctgttttggagccattgtaattggtttggctgctgcttggggatttggctggtggagtggagttactatatttggaatgaacatctcagattttctggactttttcacaaacagtattttaatgccaatctccgcattgttcacctgtattttcttaggatttattgtaggtaccagcgttgttgcagatgaagtaaaactatcgtctcgctttcgttcagaaaaaatgtttattgttattaccaaatggattgcacctgtatgtattgtagcaattttagttacttctattttatccgcagcaggtttatttacaatttaattgccttttatactctgcctgtatatacaaaaaatatatacaggcagaatttttatgcaaaatgctgtagaatgattccacaaccttcttgacaaatgttgatatatacggtatagttttaaagattattttcattttattcataaattatttactgtatatttagtaaatccaaatagattgaggg

SEQ ID NO: 401 - DNA, 3524 bp, Unknown
  16S sequences of unknown bacteria
ctcttcaggcacaccaacagtagtgaacatcttcgtgcaaatttcatgccattcggcaggattgacaaacattgtgtgatacctttcctttcgtttgtgtggttccacgctagaaatagcgtggaaccatcgcatgttttcgcggggatgatgcttactccacaggctgtttgccggagctctccttgcttgcagccttgctctttttgtcagagcggatgctgagaatgaagaccaaaaccaaagccaccatgactcccagcccaaaggggcgcagaatcatgccaccaatgttgtcggcatactgtgtcagggcacggcgcagacaggtgtcggcggtgttgcccaccagcatccctagtaccaggggggcaatgggatagtgatataccttcatcagaagccccaatacaccgaagaacgccagctgaatcaggctgaacggcgtgttggtggtcccataggcacccacggcacaaaagaccgcgatcataggcatcagcagggattcgggaatcgacagcagccggatggtcagcccggaagccagataggcgatgcccaaaagccccagagcggcaatgaagaacagcacacagatgccgcacaaaatcccggggttctccatcaccagagtgggaccgggacgatagcccatcaggtacatggcggagataaagatcgccacggtggcgcttccgggaattccaagggagagggccgggatcagcgcgcccacagaactggcattgttcgccacctctgcggcgatcatgccctcaggactgcctttgccaaacagttccttcttcttggagctgcgccgcgcaatgtcataggagaaccagcaggccgcgctctccccgatacctgggatgaagccgatccaaataccagccaaggaggatttgacgatattggcaaggtttctcccaaactcctgaaacttgataatgggcaggccggcttttccctctaccttggtattctgcttgtttttcagggtgtagagcacttcgccgataccgaacaggcccagcatggcaacggtgctattgaagccggagagcagctcgctgcggccgaagttatagcggatcacagactgaacgctctcagcgccgcacatagagatgaaaaacccaacaaaagcggcaatccagccctttaccggcctgtcgccggacagggaaccacaaatcatcaagccgaacaggcagaacaagaaggtctcccagtcaccgaacttcagcgcaatggttgtgacgaaaggctgaatgataaagacaaacagtgtggcggcaagggtgccgatgacagaggcaaacacggaatagccgcaggcctctcttccgcggccctgcttcaccagcgcatagccatccatacaggtcgccgcagcagcggcagtgccggggatattgatcaggctggcggtgatgccgccggagccaacagcggacacaaaaatgccgatcagcagtgccatgccttgtgttaccggaagtgtatagataatgcttagggacaacgccatgcccatggtgggccccaggcccggcattacacccacaaaatagccaagggcagtgccggccagcagcatgacccacaccatgggatcacccaaataagtgacaatagcctccggcagataaccccagacagatagtaaagcttccacgaatttccctccttacggcagcagctgcaaattcagatgcagcatcatgggcaccagataaactgtcactgccgtgtagaccgcggacaataccagcaagaagacaggattcttctgcttccaattcagatataacagcatggcaaagcagtaaagaaatgtagtgatcaaaaagccagcgtaataggccgcgatgagatatacgagggtcatcgcggtcagcaccagcacccgcagccaggtctccttgtccatcttgggcgttaccagcagacccttgtttagttgcagcgtgagcatcacacccagaatcacgatcaggacagagacgacaatgggaagcatctttgcctgaacaagcaggttgagaaccccctcaacctttaccgggttattccggatttgcaaagacagtatcagggcgatcagacccacagcaatcatgatggggccctctacccagcggcttatttttttatctttcatgaatacctcccctgttacacacaagggaccgccccaggaggacggccccttgtttcgaaaccgcgttaaaaagctgattgacttttacaagtaaatcagggccaaggagtaatcgcggcgatgcggtcattggtgggataggtgaagtcctcgatgcgggggatgccaaaatcctcgggagagacgccatcggcggcgaggttctggtcatacaggccccaagcataaatggactccagtcttgcgcacatttcatcgctttcaagaccgcaagcggggctgggagtcagcgagttggaatcacagtattccttgaactcatcggttgccacagcgtactcaaaggcctcttgaattttggccacgacttcggtgggggtgtcacgaggcacgcgaatgccccagtacaaaagcccttccagtgtttccatttcgggatagtcagtcagcatggagggcgcatcataagcaccagaagcggcctccacatgaagaggatcggcgtcgcagacgcccaggatacggatatcaccactcacagccaggtccataatgtcggagattccgcaccaggaccacacaacctcgccggcaatgaccttcacagccgcctcacgaccgccgctataggggacagtggtgcccttaagaccgagggtgtccagcatcagctgaccggtgagctgattgatggaaccaaacccagcgttgccccattttatgctggaatcagccgcgatggcgtcaaacagctcttggtaggttgtataaggggagttgccagccacaaacaggacataaggggcagtggctccgtagaagccataccaatcttcccagctcatgtctgcatactccatgacccggaaaccggaggcggtgtgagccacatcacccagccagctatagccatcgtggggcttaccatctacctgcatcgcagcgatggagccagagccgccagtaacgttgactacattgatattcacacccagatactcacccatgatggcaccaagagcacgggcgcaggtatcggcagtgccgccggcagtgtaagctgcggcgatttcaatgtcctttttgggccagtcaatcgcttcaggattgttggcatcgccggactggtcattgtttgcagactgttcgcctccgcagccagccagacagccggcaatcataaccagtgcgagaaacaaagtcaataatcttttcatgcgtctgctccttccatattctcttttcttttagagtctagcgttttgctggaaatgcggtttcgaggaatttctgttacacacctttgtgcggtcaaattgagtggctgtatcggcacttacagcaggcccagccc

SEQ ID NO: 402 - DNA, 4222 bp, Unknown
  16S sequences of unknown bacteria
cggcccgctgatcaggcagacctgcgacggcaggtccttgccgtgctcgcccgagcgcttctcgaggtcctgcatggcgtcgagcatcgtggggaccacggtcgacgcctcgacgacggcgatgtgcacgagcggcagcaggctcaccgaacggccgcactgcggcgtgatcggctgcacgatcgtgccggtttcggcaatcgcctcggatgcgaacgtgatgccgaactgcgcggcatcggcggcagcgacgagcgcatcgcggccctgctcggcgtcccaacgggtgagctttttcgcctggggcgtctctttgagcgccgcggtgatgccgagtgtggtcatgcgcgggtcgtctgcgtagacgacctcgccgctgtgggtctcgtctgcggcattggcgacgattgccgcgatcacgtccgcgacctcgccttcctggcaacgatgcacgtcgatgcggatcttttccgcctcgtcggcgaacatctcgacgagctcgtcgtggccgagcccatctgtgcagcgcgccggtgcgagcgcggcgacgtcggccttgcgcacgctcgccgggggctggctgtgcccgagtcgctcggaaatcggcgcgagcagatcttcgagggtcttgtttcccgcactcattacctatcaccgccttcggtcttcgaagcttcttcgcgctgcgccttgtgctgctcgaaccagtccctgaaccgggtctcggacaagacgtccatgtcacgcgatgacgtccagcccttcaacacggggatccaggcgctcttggcgccgaggccgtcgatttcctcgcccttcgaaagggcctgcatgacggggcggccggccttcatggccatgcggtagacgggcaggttcgtccacatcagctcggcgcctttgaacaacggcacctctgccttgtggttcttgccctgctcgaccatgttgatgcggtggtcgcggatcaggtcgtgcagcgggatgtgcacggggcagtggtcggtgcaggcgccgcacagcgagcaggcgtacgcgaggtcgcccacgttgtcgtagccctcgagcgccgccgtgagcacgatgcccatggggcccgggtagatggagccgtagccatggccggtgatgtggcggtacaccgggcagatgttcaggcacgcaccgcagcggcagcacctgagcatgtcctcgaactccgtgcccagaagcgagctgcgcccgttgtccatgatgacgacgtggacctcttcgggaccgtccgactcgccgggatgcgccgggccctggtcgatggtgaagtacgcggtcatcttcgccccgactgcgctgcgtggcaggagcgccatcatgacgtcgagcgactcgaggtcgggcacgatgcggtcgatgccgacgacgaccacctggactttggggaagctgtccaccatgcgcccgttgccctcgttggtgacgagcgtgaccgagccggtgtcggcgacggcgaagttgcatccgcggatgccgacttcggagctcaggaactcctcgcgcatgatcttgcgcaggaagtgcgtgatgtgctcgggcacggcatcgccgtcgtagccgcgctcgttgcggaagatctccgcgatcttctcgcggtcgaagtgcagcgccggcacgacgatgtggctcggcgcggatttcgcggtctggaggatggcctcggcgcagtcggtctcgatgacgttgacgccggcgtcctcgaggacctcgttgaggcccatttcctcggtcatcatgctcttcgacttgacggcgctcgccgcaccgtgcttctcgaagacgtcgaggatctcccacagcgcgtcgtcggcggtgggggcgtagtgcatggtgcagccgtgcgcctgcgcgttctcggcgaactccttcacgtagaagtcgaggttgcgcgtcacctcgttgcggatctcgatggcgctttggcgcagcccctcccagtcgggcatctcctcgacgagctgcttgcgcttgttgtagaaggtctcctgcgcggtctcgatcgcgttgtgcttgaagtcgtcttcgaggcacttgtccacgcgctcgcgcaggctctcgtccttgtcgtagagaatcgccatgctagttcacccccatgtcgagcacctgcgcgatgtgcaggacctcgatgtcgcggtcgagctcgccttcggtgcgcatacgcgacaacgcgcccttgatgttcatgaggcagggcaggtcggcgccgacgagcacgtccgcacccgtcgcgatgaccgtgcggcacttctccttgaccatctcgcccgagatctcgggctgcttgacggagaaggttccgccaaagccgcagcagcgctccttgtgctccatttccaggtaggttatcccgtcgaccgcctgcagcagctgcagcggcggctcggcgaggccgaggaagcgggtcatgtggcagctcgcgtggtaggtgacggtcgcgtcgaggtgcgcgccgacgtcggtgacgccgagcacgttgacgatgaagtccgtgaactcgtacatgcgcttcgagagcttctcgagcttctccaggtagacggggtcgtcggccagcaggggagggtagtcgttcacgatcgcgttcatgcacgagccggtgagcgagacgatgtagtcgtagtcggtcttgctgtacgcgtcgatgacgtagcgcgcgacgtgtgccgtctccttcgcgtagccagagttcacgaggccctgaccgcagcagatttcctctttgggcaggtcgatgtcgtcgcagccgagccgctcgagcacgttgacggcggcgatgccgacttcggggtagaacatgtccaccagacaacccgggaaaaacgccagtttcataggcagcgtcctctcttcttagacggtttcaaacgggtgctgtccttcgaattaaaccccaaatcggccctcaggtggcctgccgcgggcaaacggcagaaaaaaatccgcggtgtcgatgcccccctcccttcaccacacgggaaacgtggcagtgccacgaatcccacgtgtcctgcgcgagaaccgtggcagtgccacacatgtggcgcgaggtgcacgggaaccgtggcagcgctacgcatctcgtgcgttcagagtccacgctatgcgcgcccgcgtccgacgtcacctacccgatgccgtgctgcacctggtactcaaacccctcgagcgcggagcttccgaacatgcgcacgcggggcagcttgtaggggttgtcccccttgcgcacctggtcgttttgcaccgtgaacgcgcacaggtagccgcagtcctcaagcgcggcaggcgcgaagtcggggcagtcgccgtaggggtaggcgagcgactgagcgtcgtgcagctgggcgatggcctggttgcagtcctgctcgagcgacgcctggtcgaggtcccagatcttgccgcccttgcccttgttcgtgttgccgtcgcggtgcaggtcgtaggtgtgggactggaagctcacgtactcgctcatgtacgtggagaccttctcggtaaaattggggtcgcttccgatgatgtaggacgtcgccggcacgtggtatttgttgagcagcggcgtgccgtagtcgaggaagccctgctcgccgtcgtcgaacgtgaggacgacgctcttcttgggcagcgagtgcgtcccctcgaggtaggcgcgcagctccgcgaacgacgggtagtagtagtcgttgtcggaaagccacttcagctcggcttccagcttggtgctggagatgtagttcgcgtccatcttcgcgggcggcttgtcctcgtcgtatacgtagtggtacatgagcacggatatcccgtcatcgtcgacgtccatgtcgtcgaccacgtgcaccgtcctcgtgatgctcgcctccatgttctcggagttgcgcaccgtgtaagtgacgtcgtagtcgccggtctcggacgtgtccacgcttccgctcgtcttgatgccgtcggtgaggaagccctccttcttgtcgtaggcgcgcgcccccgactcgatgtagtcctcgccctgcttgacgtaggtgtcctcgtcgccgttgacctgcatgacgatccggccgtcttcgagcggcacggcgggcgtcgtccaggggctgcccgcatcctgggacaagccgtgcactacggcagcgatcccgacgaccacgacgaccacttcgacggcaagcgcgatgacgagaggccgctt

SEQ ID NO: 403 - DNA, 2489 bp, Unknown
  16S sequences of unknown bacteria
ggctacagcatccagggcagcatcctctttccgcacatgagcgtcgaggaaaacatcgcctatgtgccgaatctgctcaatggcaaggacaaagaaaagaccgaagcggccgtgcgcaaatggatgaagatcgtcagcctggatgaccgcctgcgcacccgttatccggatgaactttccggcgggcagcagcagcgtgtcggcattgcccgcgcgctggcctcttccccggatatcttgctcatggacgagcctttcggcgcggtcgacagcatcacgcgcagccagctccaaagcgagatcaagaacatccacgatcagaccggcatcaccgtcgtcttcatcacccacgatctgcgggaggcgctctatctgggcacacgcgtgctgatcctggatcaaggagagatccgtcagctcgacaccccgcgaaacatcctcagccatcctgcggatgactttgtccgcagcctgatcgccaacagctttcatgacctgaatgcgctgaagaatgaaaggagcgtgcagcaatgacccatcgtgaacaacggatctatctcatccaggccttattggccgaagatccccgatatgccgatatcaccattcccgctgatgaacaggcgcaaagcgatctgctgcgcagcttgatgaacgtcaggctgcccaagccgatcagccctgatgttctcaagatacaggatgcctatctgcaagaggaacgtgaccgccgcggcatcacagacggcatgacgctgccttccatccccaatgatcagcggcttgtgctttggcagggagacatcacgaccttgaaagcagatgccatcgtcaatgccgcgaaccacgcgatgttaggctgttttcatcctcttcattcctgtatcgacaacatcatccactccagaagcggcatccagcttcggctcttctgcggtgacatgatgcgcaggcaaggacatgaagaacccatcggccaggcaaagatcactccggccttcaatctgccctgcaagcatatcctgcataccgtaggaccgatgatcagcggcgccgtccgaaagcaggatcgtgaggatctggcctcctgttatcgttcctgcctgcagctggccgtggaaaacaactgccagagcattgctttttgctgcatatccaccggggaatttcactttccccatgaaccagcggcggaaatcgcagtccagacggtgacatccttcctgcatgcacagcaggcagatatccgggtcatcttcaatgtgttcaaagatgcggacctgcgcatttatcaacagctcctgggggtatccgcatgttgatgcgcacaaagcagatcgaacaggatatccatcggtttcaagaagccctaagcaaggcagacgctgtgttgatcggcgcaggtgccggcctttccacatccgccggctttgcttatgacggagagcgtttccagcgttatttcgctgatgttgaagcaagatatggctttcacgatatgtacaccggcgggtttttcccattcccgacgctggaagagcaatgggcatattggagccggttcatctatgtcaaccgatactgtgacccgcctaaaccagtatactcggatctgctcagatcagtaaaagataaagactatttcgtcctcaccaccaatgtggatcactgttttcaacgcgctggatttgacaagcgccgcctcttctacacccagggcgattatggcttgtggcagtgctccgcgccttgtcaccatcagacttatgataacgaggaaatcgtccgtcagatggtggaagcccagggctttcgcacgacgaaggaagggctgaaggtgcccgatggcattacgatcagcatgagcgtcccctccgaactgatcccccgctgtccaagatgcggcaggccgatgtcgatgaacctgcgagccgacaacacctttgttcaggatgcaggatggtatgccgccgccgaacgctatgatgcgtttatccgccgtcatgatcatcagcctatcctctatttggagcttggcgttggcatgaacacgccgggcatcatcaagtatcccttctggcagatgacttaccagaatccggaggcaacatatgtgtgtatcaattacggagatgcggcggcgccgaaagagattgcggagcgctctgtctgtattgacggggacattggcgatgtattaaaaaaattaaaatgaaaagaagcaggttcagtttctgctatggacgctgtgtattgatgaaagaaattcaaaagagccaaatagccgaaaaagcaactgccaaaatgccgaaaatatatttgccaaaatgccgaaaaacaggtatgcttttgggtgaacaggagaaaatataaataggtattgtgtggcaggaggctaagttaaatgagaaaatataaagcaagaattgcagataaaatattagaaaaacggctgcttggaaaaggtgctgttttgattgaaggggcta

SEQ ID NO: 404 - DNA, 11343 bp, Unknown
  16S sequences of unknown bacteria
taaacgccgaaatgacgtgatgtttcaaattttttgaaatgttgcgtcatttttttctttttcatacggtttataggtggatggatcgaaagagctgaacgatcatgttgatcgaaagctatatttttgaaaaattattaaattttcagaatcagcgtcagttttcttaaaatcatacggtttattcagtaaaggagaaaaaactatgaagaagattatgtccatgttattggcggtggcaatggctctgaccctgtcagcaggggtgatagtgtcagcggtagacggttggacgattgcaccgtgctggagttatatgaatcgggtagaggctgatgtgaatttttctggtagttccggaaaggcgacagcgtcagttgagagagtcttcggggttacgacgaaacttgaggctacgttgacattgtacaaacaaagtggggctgattggatttatgttgatagcacatccgagtcttcgacaagatcattagcactaacgcttgacttcaatgctgaaagcggtgcgacctacaaggcggtagttgaagtgaccgcatacggtaacagtggcagtgagacgactgaggctgagaagatcaagccctgcccgtaaggattgatgtttagctgctgatcacagctttacataaattacgtcatctccgttatagcagaatacaagagctcgtgtatgatgctgtaagccttcgggacagtcgtgaatgcgtgtactggcggccgcggagtgaaaaacggtacaacatataaataatctgaaaggagatcaaaaatgagaaaatttatgtcgttttggctggcggctataatgctcgcagctgcgtttatggtgggagtcgccgcggaggacacggtcgcggctgtggaagaaactgcgggcatcgttgattgtgatacctgcgaggagcatgaccatgacgtaaccgttgctcctgaggaagtcaccgatgattcttagctggaaaccatggcttcatgcagccatgtatggagctattacgatgtaacatcgtcatcgcatacaagaagatgcacggaatgcggaaatacatacccaaacctttcgcacaactcgagaactgttgagtgcacaaagtcgtatacctgcgagtgtggatacacgatttccgctatcccgcacaacactcagtggagaacggtttcatccggacgacataagctggtttgcactaacagctattgttcttatgctattgatagctcggaggcaagctgcacatatgattggaaagtcggcgttccggtaagcggcggtattcataagggttatggcgtttgcacctcgtgtgggggcttcgtttataatagtagtttcgaccagccttgccagggaaccggttgcccgtactgcaaataacaagagtttatagcgcgagataaacagcattatcagcataaggttttgggtttgattccaaaaccttatgtgcatatataaagttcatactttaatccccaaacggaggacaccacgaaatgaaaacgatacgactgatcatcatagcaatgctgtctgcccttattcttgtgtcatgcggcagtagaaagaactacaacacgccgtttcttggcgaactgctcggcaaggacgccgatacgatcactgaggaagacatcgacggtgtatcaagcattctgatcgccgggaatcacgcgagcctgaacagaatggaaaacattccgttcggaaaggacggttacagctggaagggatctgtggccggctgggatgagcaatacggaacagagcttaaagagcttgatgtatttcagaatgtcacggaattatcaattctgtataattcctcccttgacgatatcggattcgtttcgaagatgaagcacctgaaaaagctcaaaattcatatgggcgcgttttcggatatatccacattgaagtcgtgtcaggagcttgaagaccttgagattgtcggagtcacgaaccttaaagacatatcggcggtcggggaactgacaaatctgaagaggctcaagatatccggctgttcagtcgaagatcttgagccggtcagcggtctcacgcatcttgaagaactcatcgtgacctacaactgcacagatatcgcgaatatcgacagtctcggaaagctgaacggtgtgacgacgctctatctgatctgcccgaacatcgacatttcattcctgcgtgattccggaatcagaccgcagatactgtctattggcggtggaaagatcgatttgtccgtcctctccggtatcaaaggtctgaacattctgaatattgaggaaacggagatcggtgatctttctccgctcgcggattcggatatcccgagtatttcactgtataactgcactgtatcatcggataacgatatcgatgagagaatcgatgtatctgaaggtctgtcgcattacgattacttctggcttctcgggtaagatggaggacgcacatgaaaacgaagagcataacaatgcttctgtgtctgatcccgctcatgctttcatcctgcggggtgaaaaaggtggactatacacgcatacgtccggaatttcatgaagaagtatcgagccgtgttgagaacatactgaatttggctcagtctgaaacggtcagctgtccgcacaactacacggattacggtattcaggcgccgactatcgaaaaatacagcgatgaggagcatatattaagctgtccactctgcaaggaaatcctcagctatgagccgcacaatgagcggttgagctcagtcatagaaaacgtcgcggcgctgaaaaacggcgagcagtgcgacgtcaggtactcaatatgcgagtgcggaacgttctacaaagcggtgctgtacatacacggaggcggccaatgaagaataacggcaggggaaccacagaacttttcagatacagtctgaaaacgctccggcgcacgctcggcggctttgtcatactgttcgtcatcggaacggtcggcgcgtatctgttgacgacctcggtgctgctgtacaaatgctccggcgacgtcataaaggcgtcttcgcttccgtacagtgggtattatattgttgcagacgagtcttcgaaagaagatatcctcgcgggaaagacggtgagttttttcggcggatgggagatatataaacttctgcgggcgcacgaatgtgtcgaggatgtcgtctactcggcggatgacacaataaagacaaatatatcggcgatatcgctcgatggcggagtttacgatacatttccggtgacggcgctgttctcaagcgcactcgaggcggatttcagaagcggaaaaaatatactgacagaggggcggcatataacgcgtgatgacgtcgactgcgtgatcgtcagtgacgagctcgcgaaactgaacggtctgtcgctcggagacatgatagagctcggtcagcgtaatatcaaagattaccggatcgtcggtatctacagaaacgtcagcggcggcgggagcatcctcacatatcaggatattccgtcgaatatgctctatatttcgaatgaaggcaattatttctcacagtatacgcacgatgtgctggtgaagtttacggacaatatggacagtggaaccgtaaacgatttcagcggatacataaacgactttccatggggatttccggaaaagctgtatttcatatcggtaaacgagctgaaccggacaagcgagggcggcgtcagcgtcatatatgacattacacttacactcagtatcctgatcggcgcgacgatggtatttataactgctgtcctcatatattatcatgttctgtcgaggcagaaggagatcggtatgttgcggacgatcggagaaagacggatagccggaatattcctgattgatctgtgttttgtcacgctgttgtcgtcgctcataggcacggcggctgcgtgcgttacgtcgaagggcatcatgagccgtgttttcggactgataaacaaccttctgaacacctcgaacgcctataacacaaactcgattaagatatccggcgctatcgtgaagcagataaccattatggaatacatgaccgccggaagctatcttttatgctccgctctgtcggctgggataatgctgcttgctgtatgcattgtcacggtcgtgcttatacacagagttaagaaggtatcgccgctcgaggtcatggggagacagtgatatgggatatattgtcagaaatatagtaaggacgccgcgcaggtcggtgtcggtcatcataggcatcgtcctgatcgtcttcatatgcggcttcgggctgaacgtcaggcggcacaacgaggctttgcttggtgaaatcaaggagcgaacaactgtcactgtccgcgcgacgcagaaacggcttgagagtgagcgcggtaaatacatagacaaccagcacccgatcctgatctccgatgtgagagcggccggtgagcgtccggaggtatcggaatacaattttactttccaatctcaggacgtgtttcatatgtatgaggtaaatctcgacgcggacaagctcctctcagggcaggatacatatgagttcgtcggcgcgaagtatcttgacacagtgtatgtcattggcgtgcgcgatatatcttttattgctgatgacgtcgaaacggcgttcgccccggactcggacgcggtggaggccgtgatatccgaaaatatcgcggagattcatggacttaaagtcggggacagtattgagcttgggaacggatatcctctgctcaggattgtatccgtatgcaaaaaagcgaacacgatatatgttccgataaagctgctcgaatcggtcggaaaggtggatcagagctatgagactctctcggtctcatgctttgatgtgatgtttcgtctgaaggacccggatgatgcgcaggggtttatcagaaatgtccagcgtgatggtctgttcgacgatgattggttctatctcgaggcggacgacgcggattataaagttgaaacggcgcggatgaagatgctcggaatcataatcaatgtgcttgttgtcggcgtgctgacagccggcggtgtcatccttgcaggtattgttattttccatataagaaataaacgatatgatatgcgtgtgctgcgcttacacggaatacgaagcggacgtataaccttgctgaatctcggggaaatgacgctgtttgcggtgtccggcacgcttatcgggataattctcgcggcgtttgtctgtaccgcgctcggatatggatttgtcttgtcagtaccgattctgctgctgtccgcggcaattatggtattgtgtgtcgtcaccggatatataagctccgcgataactctgcggcatggaatgggggagtaaaatgtcaaccgtattacaggtaaacaatgtcagctatgattataaggttcaacagatcgtcacacacgccgtgcggaatgtgacggcggaattcgaaacggggacgttttatactatctccggtcgttccggctccggaaagtctacgcttctttcgctcctgtgcgcgatcaatcgtccgcttgagggcgacatactgtataagggtgagagcatattgtcgatagacccggatgagtatcgccggaaaagccttggtatcatctatcagtcgttttatctttttccgcagcttaccgcgcttgaaaatgtgactctgccgatggagttcgccggtataaaagacggcagaaaagaacgggcttccgaactgcttcggatggtcggtctgagcgaagatcacgaaaagaagcgccccatccagctgtccggtggagagcagcagcgcgtcgcgatagcgcggtcattgtctctcgacccggaaataattctcggcgacgagccgaccggtaatcttgacagtgagaacagtgggaatatcatctcaatactgcaaaagctcgcgcatgagcagaataaatgcgttattgtcgtgacgcattcgtccgaggtctgcggcgcttctgatgtcaggtttacgatgcgggatggacaacttggaacggttgatatctgataattgttgaggaccatcttccggaaagaggtataacggtgagtaaaagaatactgagcgcggttctgctgctgttgatcgtcgtgtccggcgtggtctcatcctgcggatcgactgacgataaaccggttttgacgaatgttttcaaggcgacattggcggagtcatatgatactgactcatcggtgagcattgtgtatatgcgctgctataatggtaaggtgttcacggcgtatcagaacggctggaatgtcattgtcagaagtatctcggatgatggagtgtcggaagaaagtacgtataaggttccgcggttctcggaaaacagtgaagtgtatcttcagaattttgatctgcgtgacggaaaacctgtgttccttctgagcgttccggatgagaacgcgctcaggctgaattattatgtccttgaatgcggcggggacaatgaagaaggaatccttcttccggaattcaaccagaccgctgagctttttgccgccggaagtgaatacataattcttgcctcaactgacaatatcagtgttttctcatacgacggagtgcttgtttctgaatgcgatactgacggagaattgacagcgatgacggaaaataaccttgcgtaccggaacggaaacaaatactatatcagttcctttgacgcgtggagcggaactatatccgataccgccgaagttaagctcgacggggtaagaaacatatatttcgatgaaaacggcaattattacgccgacacaaaggattcactgtatattgctgaaggcaacgaatataaggaggtcatcagctggaaaaattccgctattgatcattcgcttatatctcagctttttgttatcgaccgcgacaacgcggcatattatcggcggaacactgtcataaacaaagatcagataatatatctgacacgtgtgccggatgacgccgtcgcggaaaagacaatgcttactctcggtgtgactcagaataccggtgttctgaatgacgctgtgcttgaattcaaccagaataacgggatatatcatatcgaaataattgattattccccgaaaaagagcgacccgcaggcgtcagagcgtctcgggctggatattgctgccgggaatatcccggatattattcagattaccgagaatattgactataactcgttttaccggaagaatctgttcgaggatcttctgccgtatatagacaatgacacgacgatctctcgtgacgattttctggacggtgttgttgatggagccaagcaggatggaaaactctgtatacttccttataccattgtgatcaacactgtcgtcacgaaggagaaactggtcgatggaccagacggttggacaattgatgattttctggattttgcggacagtcacgacagcacgttgatgacgttcaacaacaggctggaggatttcgatgcgctctgtgcggcgaataagtcgactatctgcgaggagtacgggaagagcggaggtctgcttgaaaagatacttgaatactcgaagaagatatccgcggaatatccgatttcgtatatggatgacgatgaattgcaggaatatgattctgacagatatcgtatgtaccgcgatgaaaatgtgctgacatggacgtctccggtcaggactttcaatgattatacgacggtaaagggtgcattcggagacgagccgatttcgtttatagggtatcccacggagagcggaggtaagacctttattgttccgcagctcgctcttgctatgtcatcaaagagtgacaataaggatggcgtctgggagttcctcagaatgacatttgatgatacgttttatcagtatgataaaacatacggattcccgacaactgaggcgggattcaaaaaattcgtcgagagcgcccggaagtaccggttttacttcaatccgagaggaactgctgtcgcgagtgagtacgcgtatgatgagccggggagctatgagattccgcttgaggactcggatatacagattatccgtgagcttatttcgggagccgagatgtatatagcggatcgtaaatacatttcactgataaacgaggacgcttcggtttactttgaagacaagaaatcacttgaagagacgctgaatgtaataggagaccgactggagacttatattaatgaacagacatgaagataacgctatactgaccggacacacatgaaaatcagttatatataatgaatcctggctgttttgcggcagaacatcggtataaaaaagaatgtcacaaatccgattttttccgactatataatcatatggataaaatcagataaacagatataaccaaattagatgtaatcgggctgatgcgcaaccagttttacatatatagaagtactgatctggagactcatagaaaacggtaaataacgtgtgtttacagttgaaatgagtatatcgccaagcaattggacgccaggtgattatgccaggagacgcagatcaaataatggcatacaaatttatggaggattttattatggagaagcgattttgacagtggtaataacttatactacattacgcaggaaaacgatgacttctctaagaaaatgtatacttattccgacaatgagtcatcaataatgtttgaagaattacctgtgtactcggatatttcttccgcatattttgatgctgaaaataaaaccctctactatgcggattattcacgtatatatgtatgcgatacgaataagcttaataatttgaccgaagaccagcattttgaaaacgtagaagttttcagcgtagcgcagtcatatgtgaatattctcccctgtccagtatcgttattggcacttgaagtcggacataatatggtatctctgtatgaaataggagggtgaaaatgatgaaaaaatatttcccgttgattatctttgttttggcgttgacgttctgcttcggatgcagctcgtcgcgggatgaatctgtgataacgaaggatgttacgggggtgttccattcaacgataataccgattcccgaaggatatggagtggttactccgtgcagattcgacggcgaccattttacagccgatctgttctttacggattccgacggttcgtattataatgactacaatcggaagagcatgaccttcggcattgatggctcgatattatctgtaaccgacgcggatgaaacggatgcctcaggttcgggatggatcttcggagattcgcattttgatttcgacggcgaatccactctcgcttgtatatcggggaatgatcaaattttcgagttaaatcttgagggaatattcaaatacgattcgaatgagctcgctgatcgaaaaaagtcattggattcagcactttcaataatagaaatagaagccggctcaaataacgagtactatattctcacgacaaaagggctttgcgcggtttccgaaaatggaaaactgaattggatgcagaataagctcgacgccccgaatgatattatcatgacaaaatatggtctgatatattttggcggagaaaaagagaataaagcggcttggcttgtaaacgataagaatggctcactcaaagaaaaaatcgagatgccgcctcagattacagacggttcgggaatcggagcggcggaggcggaggtttcattctactcctgcgattcgcctgattctgaattcgatttttttgcggcgacaaaatacgcgctgtggggagtgagcttatcagaagcccgcgatggaaagattaccggtgaagtttccgaatgcctgaattgggtgaactcagatatttcgtcaagcgcggtaagcaacctgtgcgtagcaaatgaaagtgcgctcaccctgacgagaaggaaaacaaatgagaatcagttaattcttatgacgaaagttccggacgatgaggtggctcagaaggaatcaatcatattggcgtcattatctgaggacaatatgatgaactcggtcataagcagcgcaattgaggaattcaatatttcaaatccggattaccggattctgatgaccgattttactgtatatgacaaggacacacgttcgacaatcttcaacgccgagctcgccgccggaaatgttccggatattgtgattatttcgaacgagtccgaatcggatactttagtaaataaatatgtcagcagcgggattttctgcgacctcagcccgctgatggaagggaatgactcgttcaattacaacgacctgcttggctatgtgagaaagccatatctgattgatggaaagcagtatattttcccgcttaagcccaccacacgcacactgttcggattggacagctatttctccggacccttgacggctgaggaaaccttcgatgcgataaaagcattgtcggatgagacatactggactaacagctctatcgcgttcagtaattatacgttgcagagtacgtttgaggattttgtggacagaagcagcggaacctgctcgttcgattcaaagtcgtttgtgtctattttgcaggaactgctggatatggatgaaaaggttcttctggggcttgcgacacaaaaggagtatttccctttaataagcaatggaagcttgcggctgatggcgtatgccccgtcgtccttgagggattatgtcagcctttcgtattatttcaacggagaagccgtggcggtcggatatcccaacgcggcaaagaagctgtatattcaaaattctataggaacgtatctcgcgattacggatggaagtaaaaacaaggagattgcatttgactttataaactatatttatgacagcttgttggcttctgattaccgagaaggaaatttcgcgttcttcaaggaggatgtatatcggcagcttgacaagtacgacgataaggtattcgcatatgaagacggatcggttcgttcctatgacgaagcaagcgttccggattccaaaaaacaagtgtttaagattacaacgcaagacgctgagaggtatattgactttctgaattcgattgacgcgatattgccttcagattccccgatatacgctattgtttctgaggaattttataatggcggggcggagaacgcttctaagatggcggagatcattcagtcaagggttgaaatgtatatggcagagaaatatcaatgatttttctgaagcagaaaatcataggatttatactttagtactctgtaaactctaaatatttataataggataaagatgcttcaacttgaatcttgcatcaacggt

SEQ ID NO: 405 - DNA, 17254 bp, Unknown
  16S sequences of unknown bacteria
ttcatttgagcctttttctttggctctgttttttcataatttatttgacactaccttttctgttttggataatagtttcgccggaatacatcttccgcatgaaaaactattgccatttcttttatgatacaaacctaaattagaaaagtcaagaaaacgattctgatataataaaaaaagaataataccatcaaagacagaaaaagagtcagcgcagctattccaaaaaagaatagataagactaaaaaaagaaaggctgtataaccccccgggtgggttgtacggcttttttcaatttgataaactaacaacgattgtaaagcctgtgagaaagtagcgaagcggattgcgaatatccgctttgacctgaatggaggataagatgaaaaataacacagcagaacagacgacgatcctggaggatctgacctcatactggacggaccgagcacacagttacagtgcacagaatctggcggaaatgaatgactggagaaggcaggcatggagaaagctgattttaaagcatgcccctgaaaaagaatgtctgcgtattctggatgtcgggacaggacctggattttttgcaattaatctggcactggcaggtcatgaagtcacggcagtcgatgtgacagagcatatgatatggcatgcaaggcagaatgcagaaagctatggagcaaatgttacctttcttgtgcagaggggagaattcttaccctttgaggatggaagctttgatctgatcgtcagccgcaatgtaatctggaatctggagtatccggaagaagcgctggcagaatgggcgcgcgtgcttgcaccgggagggcgtatggtctattttgatgcaaactggtatctgtacctgtatgatgaagaacttcgtgcaaagaaagaagcagctgcggctgcttttcagacccggcacagttcctatcattcggcgaacagtctgtcaccacaaagaatcagagaactggaacagactgcttatgcgcttccgctttccagtaaaaaacggccggaatgggactgtgagatactgcggaagctgggaatggacgtggtgcagatcgtggatgatatcggacctggagtgcaggacccgatagaatgggagagagatgcgcctgttcatacgtttatggtctgtgcggaaaaatgtgcttcgtcatatccaaaagagaaggtgcaagcgtgagtggacagatttcaggaggtgctgcatatgaacaggaataagatacaggagtatctggggcggcatgtggtttttcgctatgtgctccgaaggctggtctctctgattccgattctgctgggtgtgacacttctgacctatgggctgatgtatatttcaccacaggatccggtggagatgatgcttcagggacagggaaccgctccgaagccggaggttgttgaggcaatgcgccatcagctcgggctggaccggccattcctgatacagtatctggactggctgaaaaaatttgtctgcggggacatgggcgtttcctatatagatggcgcagcggtgtcaggaaaactgctgacagcactgccaaatacattgaaacttacggtgttatcagtgattgtgaccgctttactgtcagttccacttgggatttttgcagcagtgaaaaagggaaaggtaacggatgcggtgattcgctttctgagctttatcggaaacagcctccccaattttgttgtatcgcttttgcttttgtatttttttgcattaaagcttggctggtttccgattttatcttcaggatcccccatcagttttgtacttccgacacttgcgcttgcaattccgatgacgggaaaatatatccggcaggtacgggctgctgttctggagcagctgggaaaaaggtatgtggatggtgcagtttccaggggactgaaaaaacggaagatactgtttggatatgttctgcagaatgcgctggttacgattattacactgatgtccatgtcaattggatcactgcttggaggaactgctgcgattgaaatgctgtttgtcatgcctggaatgggctatatggtaacaagcgctgtaacatccagggattatccggttattcaggggtttgttgtctggatgagtgtgatatatattttcatcaatcttctgacagatatagcctattattatctggatccgcggattggtgcggaaatggaggtggattgatgcggacatctgtttatgcaaaacgaaagatgctggtatatctggccgtttttattgctttgtgcatattcagtctggtggccggttcgtttgcaccgcatgatgcagaacttgtaaatctgctggaggctaaaaagccgcctggcggagaatacccgatggggacagactggctgggaaggtgcatcttttcacgtatcctttcaggtgcatccagttccatttttgcatcccttgtgattgtggtgctgtctatgctggtcggttgtgcaacaggactgatcagtggatatgttggtggcatcgtagatgagattatgatgcgtgttgtagatgtgtttcttgcttttcccgggatcgtgctgtccattgcagtagccggaatgctgggaccgggactgagaaatggtgtgctggcactggcagctaccggctggacacaatatgcaaggctgattcgaagctatgtgctgagtatccgtcaggagaattttgtaaaagcggcgagactgaatggccagagtgagtggtcgattctgatgcatcatgtgttcccaaatgcaatccgtccggtcgttgtgacaggaaccctgcatttaagcggggcgatgctcagcatttcaggcctgagttttcttgggcttggatcttcctccgcagaatggggaagcatgctttcggaaggccgcagtctgatgcagcaatgtccatggatggtactgtatccggcgctggctattttttttgtcacaatattattcaaccttttaggagacagcgtgcgcgatgctctggatccgcaggaaacgatgaaactataaacaaatgaaaacacaaatggaatgggagaagaaaaatgaagaagatgaaaagaatggctgcactgattctgtcctgtgcgctggctgcagtatgtccggtaatgggaagccaggctgaggaggatacaagaaaagcttttgtatttggcgattatgtgggcgatgtggatccggcatcaggggcttatgcctgggtaggaatgcggattggtgtaatggagtccctgtttaaacttgatgacagtatgactgtgcagaaaaatctggtcgatgactattccgtttctgatgacgggctggtatggacgattaagctgcgtgataatgtacagtttcagagcggcaatccaatggatgcagatgcggtaaaggcctcactggaacgcacctgttcgatgcagagcagggcagaaagtgaattagatattgcgtccatggaggcagatgggaatgtgctgacgataaccaccaaaaagcccaatcctgttctgccaaactgtctttgcgatccgtattccggaattgttgatgtaaagagcattggtgatgacggagatgcaacggttggtaccggaccgtttaaacttgtggaatatgtagaaaatgagcgcatggaactggatgcttttgatgattactgggcaggaaagccggcaagcaagcatgtaacgatccgatctatcagtgatctggacgcatccagtatggcgctgcaaaataaagaactggatgcatgttacggactttcctacgacgcaagagacctttttgacgggacacctggttttaaaatttcacaggcggcaacatccagagtttacaaagtctattttaatctggagcatgaatttactggagatccgaacttccgtaaggcagtcggcatggcaattgacaaatcaagctacgcacaagtactcgtgaatggtgccggtacgcctgcaaaaacgagttttccggaagtgacgccatttgcagaaaaaacagatgtgtcggcagtaccggactttgatatggacggagcaaaagcgcttcttgaggagagcggctatgttgatacagatggggatggaattctggaaaaggatggtcagaaggtatcaattcagatcatcacctatggccggacaggactgccgcagacgagtcaggctctgcagtccgctttgcagcagcttggcgtggaggcatcttttgagcagcttgacagtaccgaagaccggggacatgccggtacgtatgatctgagtgtctatgcagaggtcacgctgcctaccggagatccgtattcttatctgatgaataattttggaacggatggaatacagaatttcggaaaatattccaacgcagaagtagatgagctgctggatcagcttgcgatggaatttgacgtagataaaagaaatgaactggcagcacagattgacggaatcgttctgtctgataattcaatctgcaatatctttcatctgaatatgtatatggccatgaaggataccgtggtgggactgaatcagtctccggtagattattatcatattacttatcagacctgtgtggaggagtaatgaaggaaaaagaagcattactggaagttcggtctttgtgtgtccgttatccggggaatgaaaaggaaattttacatcaggtagatatgactgttttacctgggacaatcacctgcgtgatcggagaaagcggaagcggaaaaagtacgttgctgcaggcaatcttacagcttccgggcaaggtggagatcacgcagggagaaattactttttgcggacagaatctccagacgatgtcagaaacaaagcagcgtgcagtccgtggcagcagtatgggggtcgtgtttcaggagcctggagcgtccctgaatccgatccgcaggatcgggcggcagttttatgacgcgctgcatgcacatgacagaacgattacaaggactgaagccaggaaaatggcatttgaaattctgcagagcatgcagtttgaggatccagatcggattttgaactgctgtccgcttcagctttccggcggcatgaaccagcgggtggccattgcgcttgcgatggtactgaaaccatcacttttgctggctgatgagccgaccagtgcactggatgtaacggtgcagcttcagattacagaggagctgcttcagatcaggaagcagtatgggacctctgttttgctgattacccacagtatgggcgttgcagcgaaactggcggatcagattgcagtcatgcgtgacggacagattgtggaatatggttcgaaggaacaggtattgtatcacccattacattcttatacaaaggagctgctgagggcagtaccgaagctggaagattctgccggaaaaaatttttcaaaagagaaccggcagccgattctcgaggtgaagcatgtggaaaaaacctttcgggaaccgggaggcaggcgttttaaggcgctggatgatctgtcgctgaccgtgttcgaaggggaatgcgcaggaattgttggagaaagcggatgcgggaaatcgacgctggcgcacatcataacacggctggcagctccgaaccatggatccgtgtggttctgcgggacagagctgtcagccggaaagcagcgcgaactgcgcaggacataccgggatatgaaaatgatttttcaggaaccgcgctcctcgtttgacccacggctcaccatcggaaaaagtatccgggatgcattaaagccggtcatgccgaacaaaaaagaacagagattggaaacagaacgcctgctggagacagtcgggctgaagggcagctatgcagacatgtatccgtggcaggtcagcgcaggggaatgtcagcgggcagcgattgcccgggcaatcgctcaaaatccacgttttctgatctgtgatgaagcgacctcagcattagatgtgtcggtacaggcacagattatggaactgctgatccgtatcaggaaagaaaagaatctttcaattctcttcatctcacatgatcttgcactggtaagcagcttctgtgaccggatatatgtcctgaaccacgggaaagtagtggaatcaggggaaacggcacagattatccatgcgccgcagcagctatatacaaaaaagctgatcgcctctttattgacagtataaaagacaggaggaatttaacacatgttgacacaggaacagatcaatcaggactggacggtacggtctgataattataaccgttatgtagaggaggagtttgccacagagcgtccggcaaagtggctggaacgcattgagaaaaatgcgccttctggtcgtccgctcaaaattttggacgccgggtgcggacctggatttttttctgtgcttttgtccagggcaggacatcaggtgaccgggatagacggatcagaaggaatgctggagcatgccagggaaaacgcacgcagattcgaagtggtgccggagcttatgcagggggattttggagaccttccatttgccgacaatacctttgatcttgttataagccggaacgtgacgcatattatccggaaccatctgaaggtctacggggaatggctcagagtcctgaagccagatggcgttttgctgatttttgacgcaaactggcatttaccatatcagccaggcagcgtccgtgaagaagcgatcagaagagaacggcttggacttgaaaaatatcacagtggttatacgcatgatggttcctatgaatatattgacagcgaacttaatccggaaaattaccgtgtgtttggaaaagcacagcgccctgattttgatctgggagtgctggcacagcttccatataaagagatatcttttgaacgggatgtcacagaagaactgtggagtgaacgggaaaaactgttttatggagctacgccattgtatatgattcgcgcagtgaagcaatagagggaagacatggaaaaaagaagcagctgcggctgcttcttttttcagatgtaccagtaaggaagctggagtacattttcacgcaatgcgcctggcgcaggacacatacagatggacagctcctgtcccgcgtttcttttccgggatctgatcgagaatctctggcgataaggtgtttacaatactcataaagggctcctttgggttattatttaagattcgacaccttaattttaccacaaatggaaaagtcaggaaaacaattcagaccggataattgcaatccgctttgatatttacccatgaccgggtaataaagcagaatggtaactacagaatgtaaacgattacattttggaagaagaggtggaaaaagcagaaaatcagggaagatagcggggaaaatagcagcattcacggttgaaaaaatttgaaaatccatgtaaactattatgaaaaaggatctgaaaatgtaattaatgtaaacgttgacacaggaaaaaaacggtgctacagtgaacacggaaaaggggaggtatcatggcaaccatcagagatgtggcaaagtatgcgggcgtgtcgaccgcgacggtatccagagtgctgaataagaaggatgtagtaagcgaggagacgctgcagaaggtgacggaagcggtggagaagctctcctatcatccgaacctgctggcaagatcgcttgtgcagggaaaaaatgatacgatcggcgtgctgcttccgtcgtttgatcatccgtactggggcgagatggctcagcggcttgaccaggcggcaaagaagcgtggctattacctcctttttacggagtattccgggaaggaagaggagaaaagaaaagcctttgagtatcttgtgacgcggaaggtaggtggtatcattgcctgctgtccgctggaaaaagaagcacaggagcgtctccgaggcgagatacgcaaggtagagatgccgcttctgtcttttgtctgggtgactgactcctttcctcaggtgattccggatgaccggcagggcggactgctggcggcaagacaccttcttgccaaaggctgccggaatattgtgcatgtcagcggagacctgaaaatgtataaagagacaaatgagcgcacgtatgcatttgtcagagaaattgagaagagaggccatacctgtatcatttacgagtgtccgctttacggaaccgaaaaagaggagctgcaggaagtggtaaacaaaattttttacgagcaaccacagatggacggcctgtttttgagcaatgatattctggcggcgctttctgtcagttatgcgctggcgcagggcatccgcgtaccggaggagcttcggatcatcgggtatgatgatgtgtggatgagttcatttctgtatccgccgctcacaacgatccggcaaaactacgagaagctctcagagcaggcgatcgaaaaaatgatccggatgatcagcggggagccgattgagaagaagacggttgtgccggtggagctgattgagcggaagacaacgtgaacgcagataagcattcctcagctcaagtgcgcggagcgctaagcggtggataagggaaggcttatgtcagattgtgcaggtagaaaaaaatgagcgaaacagaacagggaagctgcaaaatacgcaaaaaacgtgtgtgaaaaaatatgcaaccacagaacacaggaggatgagaaaatgaaactttattatcagccggaaggccattggtttggcgattgtatgccgtttggaaaaggagataccttttatctgtttcatcagagagatacccgtgtaccctgcccgtttggagaaccattcggatgggatctggctctgacgaaggattttgtgcattatgaggattgcggaacagcaattccgcgcggaggcgatgacgagcaggatcagttcatctatgcggggagtatctgcgaggaccgtgagggaaggtatcatgcattttatacaggctacaaccgtgattatccggcacagggaaaggcttcccaggtgctgatgcatgcgacgagcgaggatctgaagcactggacgaagacgaaggatgcagtgacattcgtgccgcagccgggctacgacccggatgactggagagacccgtttgtgctgtgggatgaggagaaggagcgctatatcctgatcctcggtgcacgtcttgcgggcaataaaaaccgtaccacgggccgtactgtttacttcacatccaaagatttaaccgactggaaatttgagggcgatttctgggcgccggatctctttacgatgcacgaaatgccggatctgttcaaaatgggtgactggtggtatctgatcacgacggagtattctcatgcgtcgacacaggtataccgcatggcgaagagtctggaaggaccttggatcgcaccggaggatgatgcgtttgatggcagagcctactatgcaggacgtacatttatgctgcatgatcagcggattctgtttggctgggtgccgacccgtgccaatgagaccgacagtgcgaatcttgtttacaacagcgagtcggacaaagaggactttatctgggcaggcacgtatgtggcgcatgagctgtaccagcggccggacgggacgcttggctgccgtatcccggatacggtgtggaacgcatttcaggaggtgcagccgatcgaggatgtgatccttacgagagagtccggacgcgcgctgaaacatatctggaaaaatgcgggcgactgcttccggtttgaggcggatgtgacattcgcagagggaacacggggcttttcaatcggactgcgtgcgcaggaggaagacgatgaattttattcattctcatttgagtgtacacgcaaccgtgtgatttttgagaaatctccgaactggccatggccgcgtatgaacaatatgggactcgagcgtccgatccacctggaggctggaaagacttaccacgttcagatcattgcagatgatacgattgcgactgtttatgtcgatggcgttgcgatgaacacacgtatgtacacaaatccgggtgagggtatctgccttggtgtgactgacggaagcgcaaaatttgagcatatgtcaattggatttctggagaagtagggccgggagaaacatcggttgagaagagaataacagacgggaaaagggcattgatcgggtatcagtgcctttttttcatggagatgaaaagtggagaaacagatataggattgcgtttttaaagatggacggagggagtattttatgctatgatttttctgcactggaaggccagtatttttataaaattgaggcagtaaacattatgaaagaagaaacaaaatcaaaagaaatggacatgttaaacggcggtcttgcgggtaagttgatcctgtttgcgattccgctggcactgagcagtattctgcagcagctgtttaactcggcggatgtcgcagtagtcggacggtttgccggggatcaggcgctggcggcggtgggcagctgtgtggcgctcgtaggaatttttgtcaatctgatcgtggggctttcggtcgggccgaacgcggcactcgctaacctgatcgggcagaggagaagagacgggatcaatcggatgctgcacacgattctgacgtttgccgtgatatccggaattgtcctgatgggacttggacttttatcggcaagagtagttctgaaggcgtccggtacgccggacacggtgctgggtcaggcgcttttgtacattcggatctattttctttgtgtaccgtttatgttggtctacaacttcggctccgcgatcctgcgaagctatggcgatacgaggcggccgatgtattacctgattgtctctggcacagtgaatgtaatcctgaacctgattcttgtgatctgcttcgggcttggtgtagccggtgtggcgattgcgacggtcatttcgaatgttttaagtgcgggacttgtgacgcttcacctgtatcatcgggaagatgagtttcagttccgtttgcgaaatatgaagatcaacgggcaggatctgaaaaagattctggtgatcggcattccggccggaatccagggcgcgatcttttctgtatcaaatgtctttatccagagcggaatcaattcatttggtgaggcagcgattgcaggctcgtcactggcactgaattttgagtattttacgtatgatatcgcgtcagcctttgcgcaggcggcggttacatttaccagtcagaattacggcgcgggcaatttgaagcgctgcaagaagatcttctggctctgcctgctgtttggatttgggtttaccgagatactgagcatcgtttttatgatctgggatgacttttttgtgagtatctacacggtcagcgaggcggtcgcaggctatgcgatcatccggatgtggcacgtatgcgcacttgaggggctgaccgcgacgtacgaggtggagagcgcagcgctgcgcggaatgggaaaatcactggagccgtcgatcatcacggtgcttggcacggtcgtgttccgcatgatctggcttgtgacgatattccggcttgtaccgacgtttgacatgctgatgaatgtttatgtggcgtcatggatctttaccggaggtgcgatctttattgtgtacaggaggcatatgcggaaactagagcaggtacatcagactgtgtgaaaagagaaaaatatcacctgcaattatcagaagaacagccacgcgaaaggaaaaaacacatgtttatcaaaggcacatttttatacactccctccatctcggaactgaccgtagagcagggctatctgcatatcaaagagggaaaaacggacggattttatgaggaaattccccaggcactgacgggagagaaggtccgcgactacgggaacgcggtgatcattccggcgtttaatgacctgcacatccatgcaccgcagtacatcaaccgcggcgtcgggtttgaccgggagctgatgccgtggctggagacgtacacgtttccggtggaggcaaaatacagggatatcgaatttgctgcgaaggcataccagatttttctgaggcggctccgggcctgcggtacgatgcggttttcggcatttgcgacgatgcatgcgccgggcacctgggagctgatgcgccaggtggagcgaagcggcatgcgggcgtacatcgggaaggtgaatatggaccggaactcacctgagtacctttgcgaggagacggagcgctccctggcagagacagaggagctgatctgccgcagcgaagaagaattaaagcacgtaaaatatatcatcacgccgcgttttgtcccggctacatcagaaaaactgatggcaggattgggagaactcgcagaaaaatatgaccttccggtgcagtcgcatctgtcagaaaataagagcgagattgcgtttgtgaaagagctgcacccggatattccgacctacacggaggtgtacgatgcatttggacttctgcgaaaagggaagacgatcatggcacatgcaatccacctctcggacagggaaaaagagttgctgaaagaaaaacaggcgacgctctgtcactgtgctcagtcgaatgctgacctgtcaagcggtgtcatgccggtgcggagaaatctggagtttggacttgactgcgtgattgcaagcgacgtagcgggcagccatacgcctgcaatgaaccgtcatcttgcgatgtgcatcgaggtatcaaagcttcatgcactgaatcatccgcaggagcggccgctgcagcttgcggaagcactgtatctggctacaaaaaagccgggccgctttttcggaaaggtgggcagcttcgaaaaagggtacgagttcgatgcgctggtgatcgatatggcggagccggagctttcgggtacgttttcgcggacaccgttcgagacgctcgagcagttcatctacgacggtgatgaccggaacataaaggcgcggtactgcgcaggagagctgctggacgaagagatatgggagaagtaagagaggacagagccgttagaaggactttcatttatagatacaggaggctttggcattgcgaagtacattatccggtttcatggcgcggttagcggaaaagaaggcagatgagatttacgaagaaaatcaaaagaagaatattggggtattaaagatgccggcttcctttttctggtttggacttgcgggcatggtagtttttggagtgcttttgatcgtggttgcgccggtggcagatgataatggactttcctatgggctttttggtttcctgtttgtttctgggttattgattgcagtaattcagaaaaactgtctggcgctgtatcaggacaatgagattatatatcgaaacattcttcggataacgcgaaaatatgattgcagggaaattgactgcgcatattacagcgatggcggcggtattttgtttgtattcaaagatggacgaaagctccgttttgataaagacgaaagagttttttaccgggacatcgtgaaacgggagcaggtgaaatgcaggttccggggagatgaaaagccggtgattaaggcgggctaccatccgcttttacttggatttttttgggtgctgattttgagtatgattgtattagttttgcagcggccggatcgggatacgattttgacgataatgataatggctctgatttttctcggttttcagctgagcaccacgtcgtacgataaagaacgcaagatcctgacacgcagaatatacggctttccattcaaatacgatatgagccgctgcaaggcaaaagcagtttatgagggtgatcttgtcaaaggaatcgcaatttataaaaatggaagaaaaagagtaaaaatcccggttggaacggaatacagaaattctgccgcgctggcctatgcgctttgcggagtttatgtataccggcagtggcggtaagactggagaaacggaagtggatttccattttcaaagaggaggggattgagtgcagcaatttttatcgaatctcatagcgggactggcagggaaaaaagcaaaagagatttatgagaagagccaaaaggaaaatataggtatgataaagctgccaggcttcttcttctggtttggaattacagagatgatagtctgtgcaacattgatggtgatcctgttcctgttttttctgccgcaggagggtgcatggggttgtatcggtattttgggatttttgtttgttacaggactggttcttgtggtaattcagaaaaactgtctgattgtatatcgggagagggagctcatttatcgaaattttttccgtataacgattcgatttgactgtagggaaattaaatgtgcatattataaaaatggtggcggtattttgcttgtattcaaaaatggaagaaagtttggttttggtaaagaggacagctttttctatcggcaactgataaaaagagagcatgtcacctgccagtttaaaggggaagaaaaaccaaacattaaggtgggatatacaccgctttttacagctgttttgtggattgtgtgtgcgataccactgccggcattggtggcgcagggagatatggatgccatcttgattatagtttgtgatgtgttgttttgcttttggcttttacttgaaatgcgtatagcgatatatgacaaaaagcggaaaatactcacagtgagacaatatgggatacgaagaaaatacgatatgaattgctgtaaggcggatttggtctataaaaacggcgttgttgaagaaatagccgtctatgaaaataataaaaaggttgcaaagattccagtttcaaatatacataaaaattctgccgaactggcgtatgtactttgtgggaagtatgtatatgatgagtggaagtaaagattgaaaatgaaactttgccaggagtcaaaatagaaaagattatgaaaaaggcagcaaaatcaaaagaaatagacgagaaaagctggtagagataaaaaacacggctgattcggagtgccattccggatcagccatattttatgtacggggaaaaatgaaatttataccgtttgcgccgggtgctggcggaagcccatcatcttataatagcatggaatcagcagcgcgcacgccccgaaccacgcgagcgggctggcgatgcagacggcggtgtagccgatgaacgaggacagccagacggtggcggcaagccgcatgacgagctcgatcatgcaggcgaggaagggcgcacggccgttttgcatgctctggatggaggtgcggtagacggcaagcagtccgagcagaaggtaaaacggtgcgacaattgtaaggtagacatcggaataataatagatttccggtgtcggggcggagaggaacatccgcacgatcggatggcgcagcagcaggattccggcgcacatcaaaatgttgaaggcctccgtctggatcaggcaggcacgcacgcccatgcggatgcgctccgtcttgccggcgccgaaattctgggcgacgtaatttgaaattgcggtcatcatcgcattattgacgagcaccgagagctggtcggctttggaagcagctgtgtatccggcaacggccgcggtgccgagcgaattgacgacggcctgcattgcaagctggccgatgcacatgacggacatctgaaagcccatcgggaagccggtttttaagtgcagacggatgctcgcattcagatcgcggaagtcttcgcggtgcagatgcagcacctgaaaatttttcagaccaacgagcagggaaagcagcgctgagaggaactgcgagaggatcgtagcccaggctgctccggcaacgcccatatggaataccagaataaaaaacagatcgagaaagatattcaggatcgaggaaaacaccagaaaatagagtggtgctttgctgtcaccgagggcgcggagcatgtttgagatcatgttgtagaagaccgtcgctccggtgccgaggagaacgacaaacatgtagtcgtaggcctcgcctgagatgtcaaccggaatctgcatcagatacaggatttcgtgggcaaacaggcagcagatcagagtcagcacgacggtaaaaacgatgcttagaatcgtggaaactgcgacacttttgcgcatgcccttttcatccttcgcaccgcagcgctgcccgaggcagataccgaagccgccggtgaacccgttgataaagcagaacacaaaataaatgataatgctggtggaaccgactgcagcaagtgagtttgcgccgagtgttttgccgacgataacggagtctgccagagtataaaagagctgaaacagatttccgaggattacgggaatcgcaaatttgagcagtgatcggaagggattaccgaccgtgagatccatttcttttgagcgtgacattaaaaaaacctccttattgcgaaaaaacagaacaaaagttataatcagaagataatagaaatcgcaaacagcagtaatggagaaggataaaatgcgaaaaattctgacagatgatacaaaacgtgagctttccatgcatggcagtgaacagtttccgatgacagtcagccatgatgacctgtgggattttgaaggaaagcgtgtgtcggttcactggcatggagaactggagttcagtttgccgaggaaaggaactgcagtttatcaggttggccggaaacgctatgaaatcagtccgggcgagggacttttgctcaatcagaatgttccgcacagctgctatccggctggtcggcagcaggttcgttacagtaccgtgctggtacgcccggattttttatacggagaattcgggagtgatgtggaacgaaagtgctttcgtccgttcctgcagaattctgcggtaccgtgcatccgttttggaaccggaacgatgtgggagcgggatgtcctgcaaaagcttgatctggtggaagaaatctttgaccgaggcagctactgctatgaactgaaaatcaaaggattgctttgtgacatatgcagtattatttttgaagcaaaccgggagaaattttcagaatatgttccggccaatcagctggaactggatcgtctggaacaaatgctggattatttaacataaaacaagcaagaattctcccacctctgcaggtggtgagatgaattgcaaaatatttttctgaaatgaaaaaagaacacttgttttgtattccgaaatgtggtataatataatcagtcgaaaatgaaaggaatactgattata

SEQ ID NO: 406 - DNA, 4249 bp, Unknown
  16S sequences of unknown bacteria
gctcgcaggcgtgctcatcgcggcgttctcgtggcgcgcgatcttcttcagcttcgcggcgatcctcgtcgtcgccatcgtgttcgcaatcgcgttctgcccgtgcccctaccgcctgagcaagccgcccgtcgacgcgctgtccgtcgtgacctcggtgctcggctttggcggcatcgtcctcggctttggcatgtcgagcctgactggctgggcgagcgcccccgtcatcgtggcgatcgtcgtgggcgccgtcgccctcgtcgtgtactgccgccgtcagcttgcctcgagcgcgccggtcatcaacctgtgcgtgttcaagcaccgcggctttaccgtcgggacgctgtgcgtcacgctcaactttggcctcacgctcgtcgtgatgtacctgctgccgcagctctaccaaaacgcgctgctggttgccgttgccctgaccggcgtcatcatgctgccgggcggtatcgtcaacgccgtcgtgagcgccgtggccggcaggatctacgaccgcgtcggcgcgcgtgtgcccgcgctcatcggctttgggctttcggcgctcggctgcatcttgctgctgcagaccacgccgtcgacgccgatggggtatgtcatcgcctgccacatcgtgatgatggtcggcatcccgctcgcgatgtcgccgtgccagacgcacgcgctctcctcgctgccgcccgagctctcgacggacggttctgccatcctgaacgcggtccagcaggtgttcgcggcaatctgcaccgcgctcgcgacgtatctgctctcggctggcgagggcgcctactacgccgcaggcggttcgccggcggccgaggcgttcagcgccggctcccatgtgggcttcgcgtttgcgctggtgctcgcggtggcggcgttcgtcatcgctacccgctttggcgcgcgcgagcgctctgccgctgtcgcgcatgagctcgcgagcgaacaggcataggcccttggcgcttcgcggcacgccgcgaagcgccgcatggggcgaaagacaacatgcactgcgtcttcaggggcgcagtgcatttttttcgctgttattcaggaggattcgatgggcgggcgtgcgcggccgcgtgcgctcttcgcgctttcaggcacgcgaggcgcgcatccgcggggcggtctgcgagagcgcgacggcgagcagtatcaccccgacgccgacccactgcagcatcgtgacgggctcggcgatcacgaccatcgcgatgaacaatcccgcgggcagctccgccgaggcgaggatggtgttgctcgccgggctcaggtgcggggtccccaggctgaagaacaacgccggcagaaacatgccgaacatgcccgccatgagcgcgtagggcgccatccccgtcacgagtgcgcccgaaggaagaaaatctgggcacacgagcaacgaggcggcagacatgcccaagcagataagcaggccgcgctgcccgatggggcaggcgggcgtgacgcgcccggaaagcgtcacgtaggtggcgcagctcacgccagccgcaagcgcgcagacgatgccgagcacgttgagctgcgcgaggtcgatgcggtacatgccgctcgcgaacacggtcgcgacgacgatggcgaccgctgccagcacctcggcagccgtgggcttgcgatggtcgagcagcatctggatggggatgccgatccacgtgaactggaacaacagcgtgagcgccaccgatgcgggcagcaccgacatcgcgaagcagtagagcgtcgacgtcgcgcaggtgataagcccgagcccggccagcttggcgctgtcgcgccacccgatgcgcgcccacttcttcccgcatgcagcctggacgagtacgaccagcgcgaacagcgcggcggaaacccagccctgagctgcgacgacctgctcgaacgtgtagcccgccgcataggtgagcttgtaggtggtggccatgaagccgtagcatgccccgccgatgaagacctcgggggcggcaaggcggggcgtacctgtgtgcgacatgcgaactctctttctctcccgcggcgaaaagatgacaaaactgtccggaaagcaccgtgtatcgtttaaacgagtacgaaagtaccaaacgccactggctccgtcaacagacatgcgacgcgctctctgcggcaaagtggacggctcttcacctcgcgagcaggctctttcggccgactagccgaaagaagcgaccgcttaatagtcgcgatttgagataatgcaagtatgcaactgtcgcggggtgagacgccgtctggggcgttgctcgaagtgcggcagagatccaaccgtcttgggggagaaaggtgggaccacatgaagcattcgacatggaaaaaccgggtgaggctcgcaggcgccctgattgcggctggcctgctgtgcgccttcgcgctgagcgcgtgcgggcaggcatctagctcggattcttcgggcaaagaagcacagaagtcgtctggcgggctcgagatcttgttcgagcaagacgacggcctcatcaacaactacacgctcatcgcggtcaatcccaaggcgccgtttgcagatgccgacggtaaggccgtaagcgatgtcaagctcaacgcgacgggcgcgcaggcgttcatcgactggatgctgagcgacgagggcatcgagctcgcgaagaactacggcgtcgacacctacgggcaggcgctgttcagcatcaaggacgatgccccgcattacacgggcgacatccccaaggcaaccgacgagaccaagaccgtgcgcctgtccacgaccacgtcggtcaacgattcgggcctgctcgacgcgctgctgcctactttcgaagacaagtacggctacaaggtcgaggtctactctgccggcacgggcaaggccattgccaatgccaagaacggcaacgccgatgccattctcgtgcactcgaagtcccaggaagaagcctttgtcaaagacggttttgcccacacgctgcccggctttgacagcgagcgcctgacgtatatgtacaactacttcgtgctgtgcggacccgccgacgacccggcgggcgtgaaagaggcaggctctgcgaaagacgcgttcgcaaagatcgccgagtccaagagcaagttcgtttcgcgcggcgataagtccggcacgcataccaaggaggtctcgctgtggcccgaggacctcggcatcaccaccgaggcggacagcgttgccaagtacaccgactggtacatctattcgaatgccggcatgggcgattgcctgaccatggccaaagagcagggtgcctatatcctctcggacaaggcgacctatctctcgttcatggcaaaccagaagtaaggcggaggaaagcacgcatggggtcggcattcgcgcaggcgttgcagctcatcgcgacgggcgaccccctgctgctgcagatcatcggcgtcacgatgcgcatgagcctgacgagctcggcggtggcgcttgtcttgggagccccgtggggcgtgttcctcgcgttcgggcgctcgaagctcaactcggcgctcatcgtggtgaaccgcaccctcatggggctgccgccggtcgtgtgcggccttctgtgctacctcatgttctgcggcgtcgggccgctgcgctttttgcagctgctgtacacggtcgagggcatgatcgtggcgcaggtcatcctcgtcacgcccatcgtcgccggcaccatcgaggcgtatgcgcgcccgctggtgacgccggtgcgcgagacgggcatcgggctgggcatgccgcgccgccgcatcctcaagctgatgatcggggagtgccgctaccaggtgttcacgagctaccttctggcgctgggccgcgctctggccgaggtcggggcggtctcgatggtgggcggtgccatcgcgtacaagaccaacgtcatgacgacggccatcatgatgtacacgaaccgcggcgacttcaagatggccatcgcgctcgggctcatcttggtggggctgttctttctcatcaacatcgtcgcccacgtgctgcagacgagggtgggcgaatgaggatcgacgggctcatcgtgcgctacggcgacgtcacggcgctcgacatcgacggtctcgtgctcgagcgcggcacgagctatgcggtgatcggcgcgaacggctgcggcaagagcacgctcgcgcgctgcattgccggcgtgctcgagccaacggcgggggccgtcgcgctcgaggcaga

SEQ ID NO: 407 - DNA, 3049 bp, Unknown
  16S sequences of unknown bacteria
tagatatagtaaatctgtatcacggtatggatattgcatacctggcaagaggtgctgtggattcagttcctaatatcaataagactaaaaactatatcagaaaagcttttcaaaagcagatggcgggtgaaggcttttcacttgtagaaattcttgctccgtgcccgacaaactggaaccttacaccggcggcagctcttgatagaatggagaatgaaattttcaagatatacacactcggtgaatttatagaaaggagcgcaaagtaatgcttaaagaaatcatttgcgccggattcggcggtcagggaataattacaacaggtattctcatttcgtactgcgcttttgaaacgggcagccagtttacttggtatccttcatatggagctgagatgagaggcggtaccgccaactgtacgattaaaatcagcgacgaggaaatagcaagcccgctggcaaaggatatagacattcttattgctatgaacggaccagccattgataagtttgaatcgaatctgcgtccgggcggatatctctttgtaaattcatcattaataacagacagagtttacagagacgatgtaaatgttatagaagttgatacggcggctctcgcagaagaggcaaataatcctaaaggtgctaatatcgcaatgataggagcgctcataaagaaaacaggtattatgacatttgaaggctgctcggatgcaatcgaaaaatattttacagagcacggcaaggctaaatttaatgaggccaatcaggctgcgctcaaaataggttataataaattctaaagctcgctcaacaaaatcactcactaatatatataaaatgtctctctctgagagacattttgattttatatgccaatatatacagtttgacaatttgctcctgatggtgtataaagtaaaagtgagaaagcagaattatttgaaaataatatacagtatttaaaacgcaaaaggtatggaatgaaaaaacaactatttggaaatacaagcttatttataattcttatgctgctttgtgcagctctttatgtgcatggggattatgtatcatatattctttcatatgtttttgtatttattttttttatgtgttacataatctttatgcatttgacaacttgggaaaaagctacgcagataactatatatgctttgattttggcagcacaggtgctttttgcgattctctttatccatgctgatgaggattatatcgtgatggagctttacaggtttctcggcagcgcttttcttctggcggcttttcctgtgagacagatagtttttcttctggaaagctcaaattatacggctccgtcagcggacgaatgggcggttgtatcttacgaacagcttaagcataatagagaagaaataataaaaaaattaacaaagataaaagagaccggtaaggtaatatctaaaggccatgtgttagaaatagttacggatattccgcggcataattctttttcatatgtaaacgaaggaacgctgacggatgatttttttgaaaaggccgaaaatgctctcgatgatggatatatatatattattttgacttgctccagaagtcctcaaggggaagtgatagggctgttcacaagcaggagttataatcatgtgtcagtatcgtttgacaaggagctttatacgatagtgagctataacggcggtgaaaagctatttccgccaggtcttaatcccgaactcataaaatcgcttataaggcgcgagggttcgtctgtcctcgtataccgtttacctgcatcatatgaacagaaaaaaattatgctcgataaggtacggcaaattaacagcgaaggaagcgcttataatatgctggggcttattctcaaatattcgcacagaccgaacataatgttctgctcgcagtttgtatattcgcttttgaatatagcgggactttcatatttcgataagccaccatcggaggtcaatcctacggattttgtggagcttgattatagaagaaatctcgaatttgtcgaggaaataagcctgcagaacaatttggaaggtttagaagctcttggagatgtgatggttgaacctctcataaagtgatttcaaaattcatatatacatatcgctgtcatttgttattacagccttttttgggttgaaagattaaaaactgccctcagatgaacagggcagttttttattttgatgctgcaatcagctcttccgcactttttatggtgatatcagttatgttgataccaccgagaaggcgcgcgatttcattgattttttcgttttcatcaagcgcttctactgtggtttttacggaattttccgaactgtatttttgaatcctgtaattatgctcgccgaatgccgctatctgcggtaggtgagtgatgcatactatctgatgattttcagcgatttcctttagctttttaccgacgatactcgctgttatgcccgatataccagcatctatttcgtcaaatatcagagtaggtatgttatcgtaatcggcgataatattcttgaatgcgagcataattctcgacatttcgccgccagaggcaatttttgcaagtggtttcagaggctcgcctttatttgtgcttatgagaaattctattctgtccgtaccgttttctgtgaaggcggacagagcatcaaaggcaatttttatgcggctgtcggcaaagtttagttccgaaagctcttttgatatcttcatttcgagctcttcggcagatgcctttcttaaagccgtaagtctttctgacgctgctgtaagctgagtttcaagcgtatttatttcaaattcgagatttgctttttcttcgtcgatgttttctatggtttgcagctttgccgctgtttgttctgcgtagccgaggatctctgcaatcgtatttccgtatttgtgcttgagcttgtttatgtactcgaggcggaatatagcttcatcgagttcttcctgtgaaaaggtgatgctgtctcttgcatttcttatatccctgaatatatcatcgagcc

SEQ ID NO: 408 - DNA, 32759 bp, Unknown
  16S sequences of unknown bacteria
taaatgcaaatctgtcatattctacaactgttttaggacggtatgcccacatttccataattgaatgacattcctgtccaaactcactgccgctgtttaaaagtacagaataatcaccctcaacgagagcctgcgcttcccttctggataatcttaatgatcgcttccgctgataaggtccctgcttctgcttcatttcaaacagtgcaaaatccgcatcaggactatatacccgcaaacgaaacttccttcttaactccaggccatcttccttttcctgaaaatcccgatttgacaaagaatcaaagtacaaagaacgtaccggatagccattcggtccattatgtgagtcagtatgaaccacgtttgacaaataattccgaagttttaatgcttctgcctgattaagcagaaattttttttcttcccgcagaacatcgcgcatagtattatttcctccttcctttgctttttagtaaatactatatttttagtaaacactataatagtatacacccataaaaattctttgtccatatatagaataaaactttgtagtatacaatgagctttcgataaaatcaacaataaatatataaaaataataatggaaatgggggatgttgtatgatatcaaactaccaaaaaaatcttgcaatacgattaacatttatctgtgtgatcgtactgtatagatcacttggtgatagacagtttcggatgcacggtctcggcaggagttcatccgcccgacccattccatttggtcgttggctttcaacgtttccgtaataccctcagcatctgccatttgctttaccagccgaagaaaaagcgccgcctcgggatcactcccaagacggcgcttttctgttgtgaatcagagcgaacactttacggcgaaaccgccgctgaagaaataggtgttcgtccaatacctgtttggtggagatggcgggaatcgaacccgcgtccgaaaaccggttaccggggctttctacgagtgtagcggctcttttgacattccctccgcgcaccgccgaacagcaggctttgcgcatcagtagcctttagatcatgacgggcttaaaggcgtgggcccgttcacgtgcaccgctaagtgacgctcttatcccgtccgcggtcctacgggtaagaacggctgcttaattaagcagcaacagcaactgtattgttgtcgtttaattttaagtttgcggattttatagcggtcccgcaccgctactcgcttaccagggcttccagtccccgtcgaaacctttacatccccatataaaaagcgatattgctaccgcttttatctgtttttctctttcagcgcacgctgaatatcgcgttgggcatcacgcgcggccatatcggcacgcttatcgtagagctttttgcccttgcacagaccgacctgcaccttcacccgcgaacccttaaagtacacggaaagcggaatgagcgaataaccgacggttttggaaaggccaaaaagccgcatgatctcgcgcttgtgcatgagcaaacggcgcacccgcatgggatcgcggttaaagatgttgccctgctcatacgggctgatatggcagccgtttaagagcatttcaccgtctacaacagagcaccacgcgtcctttaagttgcatctgccctgccgcagcgatttcacctctgtgccgcaaagctcaatgcccgcttcaagggtctcctccacaaagtagtcgtggtaggcctttttgttctgggcaatcgttttaaattctgtttttgccacttggcctgcctccttctgctttatgtgtgatttactatacaccactttcgcggttttgtcaacgcgaaaccgattttacagctcctgtctgccctcaatggcgcgggaaagcgtcacttcatcggcatattcgaggtcgccaccgaccgggatgccgtacgcaagacgcgttacgcggataccgagcggctttaacaggcgcgaaatgtacatggcggtcgcttcgccctcaacggtcggattcgtcgccatgatgacctcctgcacggtgccgtcctgcacgcgacgcaaaagctcttttattttgagctgatccggcccgatgccgccaagcggcgaaatggcaccgtgcagcacgtggtaggtcgcgtggaactcatttgtgcgctccagtgcgaacacgtcgcgtgggtcttccaccacgcagataaccgagcggtcgcggctttcatcgcggcacacggggcaaaggtcgccgtccgtcaaattgcagcacacggagcagtaatggatctgctcgtgcgcgtcgatgatcgcctgcgcaaagctttcggcatccgctttatccatgttgagcacggcatacgcaatgcgctgtgcggacttatgccccacgcccggcaagctctcaaatttatcgacgagccgttcgagcggcggtacgtgataaccggccattagaggatgcccggaaggctcatgccgccggagattgcgccaagcttctcctctttctcgtttgcggctgcgcgcagtgcttcgttgacagcagcagcgacgaggtcgccgagcatctcggcatcatcagggtcaatgacttccggcttgatgtcgatgttctttacttccattttgcccgttacggttgcggaaacggctccgccgcctgcggccgcggtgtattccttcgcttcgagctccgtggtaatctgctccatctgctcctgcatcttctgtgcctggcgtgcaagctgctgcaaatttgcggctccgccgccgcccataccctgcggtaaacgtgctttcatagttaagactccttactgtgtagtttttaaatttatttttcttcgatctccacgccggcttcgcgcatgtcgtgcaaaaaggcgtcgagcggatctttcggtttttcgccgtccgctgcgggcggcttataagggccgagcttatacacacgcccggtcacctgctgaatggcctcgcggatcttttctctctggctggcacgtttcaagagatcaaacgcaatctgcggtgcttcgatgagcatgtagtcgccgctgatgtacgccgctgaacccttgaatgccgacgccaccgactttgagtaattttccatatagccgataatgtccgaccagccgtcgaacggctgcgcattttttgcaagctcctctgtggactgcggcttgtcctttaccgcgggctgcacaggtgcgttgttctgtggtgtctcaggctgttgtaccggtgctgccggtgcttcagccgcgggtacactctgtgccggggtgatgggacggcgcaggccgccgcgctccaaagcttcaatgcggcgcaaaagtgctgcgggcgaggtatccatttccggcgtgcaaagacggataaacgtcatttccatttccgtgcgcttattcatagtcttcatgcgcgactgcgcggactggaacgcatcgagtgcgtgcagaatcgttgaaagctccatggaaagcgccgttttggtcatggcttccagctcttcgccaacggcatttacaagcccgcttgcgtccttcatcgttttgatgagcatcaaattgcggaaaaagcccgcaagctcctcgcacagcctgcccatgtctttggaagacttatacagcgcgtcgatcttttcgagtgccgcggtgcggtcgcccgtgcgaatgcactcggcgagttcaattaagtgcccacgccccgcaaggcccgccgtttccgcaacgagcccatacgtcacttgcccgtcgctgcggccgatgcactgatccaaaatggaaagcgcgtcgcgcatgccgccgtctgccgtaacggcgatgagcatcgcggcatcgtggtcgattgtcacattttcctgcgtgcagacccactcaaggcgccctgcgatgtcctccggtgcgatgcggcggaaatcaaaacgctgacagcgcgataaaatcgtcggcaacagcttatggacttcggtcgtcgccaaaatgaaaatgacgtgtgcgggaggttcttcgagcgtttttaagagggcattgaacgccgaaacggagagcatgtgcacctcatcgatgatatatacgcggtatttcgccgtagtcggcgtgaagttggattcttcaatgagcgcgcggatgctgtctacgccgttgttgctcgcggcgtccagctctacaacgtccaaaacagagccgtcatccagtcctctgcacacgtcgcacttgccgcatggatcgccgttttggggatccaagcaattgaccgccttcgccagaatttttgcgcaggtcgtttttcccgtgccgcgcgagccggtgaacagatatgcgtgcgaaatgcgcccggccatcagttcgttttttaacgtgaccgtcacctgcggctgaccgacgacatcggaaaactgctgcggacgatattttctgtataacgctttatacaaacggcggcgctcctttctttagtgggtaataaaagaaaaagacgattggaacgtagaatatgtgaacggacaggcagcctgcatcgcaccagacgatccgcttaatgctgctcggtcccccgcctgacatggttcacggtgtctcgccgcgcagacctgtccgctcgcatattccacggtatattccaaccgccttggctttttccgtgcgcggaacatacttgaccgcgtactttagtattatacacgttttcccttgaaaaggcaagcaaaaaatcgtataattttgtatatgttcatatttgtaacgcgcacatgggattttttgcagattctgcgcggcaaaacgggaaaggatgaaagaaaatgaagatcagaaatgcagagctctgtgacctgccctatctgcttgagatgctggaaaacgcgaaagcttcgctgcgggcgctcggcatcgaccagtggcaaaacggctacccgaacgaaaacaccctgcgtgaggacattcaaaataaaatctgccgtgttgtgatagacgacgaaaacaatattcttgcaagtgccgccgtgtatgtgggcgacgagccgacataccacgaaatttataacggcgcgtggcagacaaaaaacaaaatctacggtatcgtgcaccgcattatgacggcaaatcatgcgaagaagcgcggcgcggcatcgtttttgatgacctactgcgcgaaactctcgcttgaagcgggtgtcacctccatgcgatgcgatacgcatcccggcaacatcatcatgcagcacacgctcgaaaagaacggttacatgcgctgtggcatcattcaccttacggacggcgcagaccgctttgcctacgaaaaagttctgaaataacgcacaacaagcacaggccccggcgagcatgacaaaacgctcgccggggcctcgctcattctattctgctatttctttcatccggtaaaatgacaccttgcggcatcatcgaagtgcgcggctttcgtcgcgccaatcaaaatgcttacatagagatcaggccgaatgcgttcatgacagagctgataaggatgatggctgcaaagaccgggcaaagatacttgatcatcatgacgaagattttctttctgcggaacgtgccgccttcttgcgtcatttcttcttcaatacggtctacaccgatcacgcgggaaacgagcaggcaagtcgcaatagccgcaatcggcatcataacggagttcgttaagaaatcgaagaaatcgaggaactgcatgccgagaatctttacggcatcgagcgggccgtagccgagcgaagacagcgtgccgagtgcgagcatgatgatgccgatgacaacggtcgactttttgcggttccaatggagttcatcttcaaacgtggaaacagcgctttccgtcagcgcaatagagcttgtgaccgccgcaaacagcacaagcacgaagaacagaatgccaaccaccgtgccgagacccatgctggcgaacaccttcggaatcgtgatgaacatcaatgacgggcccgcctgcaaggtgttcgggtcgccgccggagaacgcaaagaccgccgggatgatcataaggccggccataatggcgatggcggtgtcgaaaacctctacattgcgcgtagagttctcaatagacgtttctttcttcatataagagccgaacgtaacaaggatgcccatggcgatggacagcgaatagaacatctgtcccatggcggaaacgaccgtcatccaggagaaattctcaaggttcggcacaaggaaatactggatgcccttcagtgcgccgggacgtgtgacggaatagattgcgatgatgacagacaacacgacaaggatcggcatcatgaatttcgatacacgctcaataccgttgcgcacgccggcaaaaatgatggtcagcgtgatgagtgcaaaaacgataaagcaaatttcggcggacacgccgtccgagatgaacatcgaaaaatatccgtcctccgcaagctttgttccgttgccgcaaatgtactcaaaaagatatttgatgacccagccgccgataacggaataataaggcacaatcaggattgggataatggcgttaatccagccgccggcttttaatgtatgcgactttgtgaacgatgcaaatgcacccacagggcttttgcgcgtcatgcggccaagcgatgtttctgccacgatcatcgtgtaaccgaacgtcaacgcaagcaaaatgtagatcaaaaggaaaatgccgccgccgtattttgccgcaaggtacggaaatcgccaaatgttgccaagaccgaccgaagcgccggccgcagacagcacgaacccgagcttacccgagaacatgctgcgattactgtgatgtttcttcattacttctccacctattttctgcaaatattcaaacacagccgccggtgaaaccgttttcccccttcagcttcaccggcgtgctgcatcaatacgttcagcataccacatgggccgcaaaaatgcaatatcttgctttcacaaattcattttgtgttttctgtttatattatgccttatcatcggcgctgcgcttttttcacccagtcaagcgccacccagccgccggctttgagacgtccccagccttttgcagaacccacacctgcgctctcctctacaaccgtatagcgcttcgtgtctgtgatctgcccctgcacgtcataattcgtacccggacccttgcggatattgagcgcgtctgcagcgtccttgcgcactgtatacgctttgaacggttcatacacaattttgccgttcgaggcatacactttataacccacagggcatgcgtttttcgcgttttccagcattgcatacgcgccgatctggctttttgcgtccgaccagcttgtccgcacgcggtagagctgctttggcgcgggtttcgcatcagtctttgtctcctttttgtcgtccttcatttcgctttcaaccatttttaaaaaccgcgcccagcccttgtcgagcgttctatgcggacaatatttgccgtcgaagtcctgatgcttcttcacgtgcgaaatatcccacttgcgctcggtgagcagctttgcgatatactctgcggcgttcttttcggctttgtcgaagcgtgtcccgcccgaaagcgaatagcaaatctcgatatgaataccatgtgcattgccatcacgttggcccgctgcgaatgcgcccttgtcgagcggtatgccgatgacgatctccttgtcatcgaccgccgcattgaacgacgtagagctgtcgttgcgaatcatatacgcgacttcattcgcggcagaagcatcgttcgccgtattgtgcacgacgatatattttatgtcctttgcgcaggactccaccgggactttcaaattgtattttgcagaagataatagattttcgcggatcggtaccataagatcactccttcttctcatcacttgcacccgattcatccgccacggtgcgacggagccgctttaaaatgcgctgcaaacgcggaaaccccggcacaccgatggccgcgagattttccatgacggaaatgagctcgttgatcgtaagccacacggtgacgagcatgccgaaaaacagcttaacatcgagcgtgatgccggccccgatggctgcaccgcgcaaaagataatccaccgccgcaccgactgcgaccatgaccatatagcaaagctttttgagtatccccttaataccgaacttggaatttaactcggcgcggatatacgctttgatcatgccggtgatataatcgagcaacatcacgccgagcagcacgagcatcggcaccgcaagcgtaccgaggtacgatacgagtcccgcgccgagcacggccgccgtcgtctttaaaaccgtctgtttcatcaaacctttaccctcctttcctgcatattgggacatgcacagcgctttgtcccgcggcatactatgacagacgcgctgcttttgtgcgcggcaatcagaaaaagcggtgaaacacgttgcggaatgtcaaaatctgtgttatgatttcggtggacaaatattcaaatatgcaaaggagattttcttatggtctgcaaaaattgcggtgcaaatattccgaacggtgagcttttttgcccaaactgcggcacgtgcaccgaaaacgcgaaattctgtaaatactgcggcgcggtcatcggtgccgactgcgtggtttgccccgcgtgcggcaggcaggtagaaccattgcagtctgcccaacagccccagcctgtttatgtaaacaacaatgtcacttacggtggtgtggcaaaaagcaaatggacagcgtttttcctgtgcctgtttttagggctcatcggcgcgcataaattttatgagggaaagatcggcatgggtgttttgtatatcttcaccggcggcctgttcggcatcggcgcgttcgtcgatctcatcgtcatcctctgtaagcccggtccctattattacgtttaactttctcagaaaggcggcgtactatgccaagcatccttgaatatgcagaaaccgaattctcgcttttggcagaaaaaccgtttacggatgtagacagcctgcttttatcacagttttcctacatgaatctgagcgcgtttgaagacgagcttaaatgcgaaaacaaaatagaaattcgagagcttttaaaggcagagcgctttgaaaagttgatgttccacgtacgcgataccaaaagcaacatgaggcttttgtacgctatggcgtcaagcccgcgctggcgcaacataaaaatcggcaacttcgttgaaaagctgtgtgaccagtcagaggagcagtttgcggccatcaccgtatacctcgatgacgaccacgcctgcgccgtattccgcggcacggacgccacgctcgtcggctggaaagaggattttaacatggcgtttctgcccgtcatcccctcgcaggccgatgcggcagactatgtgacaaagctcggcaaaagctttcccggcaaattgcttttgatgggccactccaaaggcggcaaccttgcagcctacgcgggcatgttctgcgacccggaaattcaaaagcgtattgagcgcgtctacccgctcgacagccccggcttcatcggcaacacgctcgaatccgaagaatatgggcgcattcaaagccgcgtacataaggtcattccgaaaggctcgctcatcggcatgctgcttgaaaaccacggtgcatactccgttgtggaaagcaaccaaatgggcattatgcagcacgacccgttctcgtggcaggtgacggacggtgcattccatacgctggaggaaatttccatcggcgcaaaatacatgaacaaaacactcaacagctggattaccggcatgagcatcgacgagcgcatacgccttgtcgatgtactctacggccttttgaccgccggcaatattgaaaacgtatttgacgccggcgacattcaaaagaacatcggcgctatctacaacgccgccgtgcacctcgaccccgaaacgcggtcgttcgttttgcagatcatccgtcagcttgcgggctttgcgctgcacaacatcccccatccgaatgtcccggaaaacctcaatatcctgcccggcaataaaacgcagaattaaattttcatagagtaaaagccaccgtttgcggcaagccttgcgcttttccgtttcggtggcttttgatttatgtttacgaatttataagctggcggcgatgagatccatgatcgtgatggaattgagctgcatcgttagcacattcatcatgatcttgcggaatttttcagatttctcttctgtatcacccgttcccctgttttccgttctgctttatttcacgtttccgctgttgatgcccgcgcctgttctattaagcggcagccagtcgagcacctttttgatgtacgtatcccagaatacccaatcgtgcttgccggggccctccacatacgtgaggtcaacaccgttttcgttgaggaaatcacggaaatcgcggtttgcggtgacgaggccgtcctccgtgccgcagcacaggtacattttcggtacgggtctgccctcctccttcagcttcaaaagcagcgccttcgggtctttgtcgctgcccttcaccttgtcatattcaccgaagattgcctcgtagtagttgcggcggaatgtgaagatcggcgcggagttgtccgcgtccttccatgtatcgtgcacgagcgcggcggaaagaccgatgacgcagccaaagttttccgcatacttcaggccgttgcggattgcaccgtagccgcccatggaaagacccgcgatgaacgtatcctcgcgcttatcggaaagcggaaacagctttcttgtgaactctacaagctccttgccgatgaactcaccgtacagctcgccgctcttttcgtcgtcgaggtagaaacggttttcaccggagggcatgataaccgcaaggtcgtttgcctctgcccacgcctgaatgcgcgtgccgttcacccagtccgtataatttccgaaaatgccgtgcaaaaggtaaagcgtcttcagtggcttctgctctgcgttttccgcctgcgggccgaatttgtccaccgggataatcgcattgaacgtcaccacgcgcatgaggcacttcgagataaaattcacttcaataatagccatatcaacaactccgtttcggtttttcttttattataatcaacaaaaagccttttgtaaagactacttttatgctatactgtacaaaacggtttgaaagcaaaggaagttgaatacgatgaacgatttttccgagcgcgtgtttcaggtggtgcgcgagatcccgcgcggcaaggtgacaaattacggctttgtggcatttgcagcgggcaacccgcgggcctcgcgcggcgtgggctttgtgctgcaccgcaacacggaccccgtaaatacgccatgccaccgcgtagtgttcaaagacggctctctgtgcaagggctacgttttcggcggccccgatgtacagcgtaaaaagctcaaagccgagggcgtgcagttcctgcccgacggccgcgtagacatgaaagcctgcggctggttcggcgaagacgaagaataacaaaaaaggtgcctgaccaaaatgatcaagcacctttcgtttttacttttaaaatcagccgtagttcttaaagctgacgttaatatcgactgccgcgtcgatgccctgcacctgcgcgttgtcggaatactgccacaggccgaagttatagtagaatgccggcacgctgcggtattccgcaagccagaactcaaaatccttgagctgctctaagtcgtaatagttatagccgaggctgcggttaaagtacacgcctgcagtgtagcccgcttttgcgatttttttgcagaacgccgaagcataactcgtaatctgctcgcctgtggcatctgccgtgcgagagccgtctacgctcgtctgctcccagtcaaagacgacggggtaatcgacggacttattctgcaaaagctggagcacatagcccgcttcctcctccgcttcggtaacagaagttgcctgcgagaagaagtagatgcccacctttacgcctgcgtccttcgcaccggtgtaattatcggcaaacttgctgtcttcgttcagcttgccgcgcgttgcaccgcggtagcctgcgcgaatcatcgcgaaatcgatgccgctcgctttgacggctgcccagtcgatgtcgccctgatagtcggaaacgtcgatgccgaggctcgcgttcgcgtcatcatacgtcacaaggccgttgtcatttttaaacttcgactggtcgtatgtattgagcggcacattaaacttcggaatggtgatctcaccctcgtaaagatcctgaatgacaagcttgccgtcctccgtcaccgcggaagacgtgccgttgccggtgctctgaccgtcggatttcccgccgaacgcggataggagcgataaaatgaccacgaccagaatgagcacgccggccgcgccaaggaaaatcaaacggcgcatttcaaaagaacgcgcgtcgctatgtttatttggagctttattattcatagtaaaattacctttcataaacgaaatcacagcgtaaactgcacaccgtgttcggatttattctattatacgcattttctgtcctttttgcaagccattcggcgaataaagtctgccttgccaagtatttcccactgccatctcgcggtctatcgtgccgagtacgcggattttatcgcggctccacaggggcgcaagcagctttgttttgtcaccgtcgcccgtaatgcgctcgatgaccgtttcgggcggcagcacctccagttgacggattacgacgcgcacatagtcctcaaacgtcatcggcgtgtatgcgccgctttcgtataagcccgcaagctgcgtgccgcgaatgacgtgtaaaagatgaattttcacaccgtccgggcgcagctgtgcaaggtcttcggcggtctttatcatctccgcctccgtctcgcccggtaagccgtctatgatatgcacgcaaacgcgaatattgttttcgcgcaggcgcagaaatatctctctaaatacctcgtatttatatcctctgtgaatacgcgcagccgtcccatcattactgctttgcaggcccagttccacggtgaggtgcgttttgccgttcaattcttttaaaagcgacaaaacatcctccccgatgcagtccgggcgcgtggcaatcgacacgccgtaaacgccgaatgcaagcgcttcttcgtataacgtcctgagcttttcaaccggcgcgtaggtgtttgtgtgcgtctgaaaatacgcgatgattttactttccggcgactttttatgaatacgcactttttccgcttgcagctgctccgtgacggaaagtgccttatcctgcgtaaaatagccgctgccgccgtcgcagaagatgcacccgcccacgccgcacgtgccgtctatgttcgggcagctcagcccggcatcgatcacagccttttgggtcttgcaattctgcacccggttgtgataagctaatgtatgataccgtttgttatcaaacgtatacggaaatggattcaaagtaaagctcctttgcttggtccaaaataaaaatgggagttgagtatttgttacacattaaaaagctgaatttagacgaaattcgcgaaatttacaacgcatatatgcacgaggcattcccgccgagcgagctgcgcccctttgcaagcatggaaatgctctacaataaaaactgctacccgtgctacggcttttacgacgaaaccgattcactctgcgcctacgcctatttttcgtgcacggaaaacggcaaatacgccctgctcgattatttcgccgtcaaaaaagacctgcgcggcacaggcatcggcagcaagacttttcccctgctgcgcacagaaatgaaagaccgtgacggccttttgctcgaagtggaaagcgttgagagcgccgaagccgaagaagaagtcaacatccgtcgccgccgcatcgcgttttatgagcgctgcgggtgcgaaatgacaaaagccaaaagccttttgtacggcgtggatttcaacatactcgtgctgcccatcgcgcagcccgtgccggaagcgaaagtcgtgctgcatgagctcgaaagcatttatcacgttatgttcgacgacgaactgtataagcgcgtctgtcacccgtttatcgcggaataagcggatttttgaattgacttttttgcacaaaagccatataataaagccataaaccatacggaggtgtaagcatgccggaaggacagaaaacagcagaaaccgaacaggagcgccttgcggattttccgcgtgatctaagccgcagcttcacctatctgcaccgccagcgtaaaaaatatatggatgaccgtctgcgcggctacggctttgtaggtggcatgccgatgatcctgctttacatcaaccgccaccccggcaccacgcaggacgccatcgtctcacacatgtatatcgacaaatgcaccgtagcacgccgcacaaaacgccttgaagagctcggctacatttcgcgcgaaaccggcaaggaagatcgccgcgaaaacaacctctacgtcacggaaagcggcgaaaagctcgtgcccgtcatccgcgagattttgcgggattgggccaaaagcgtcacgcgcgacctttccgatgaagagcgcattttactcatcacactgttagaccgcctcatccatacggacgtggaataaaatttcacttgatatggactaccccgcagttttaaagctgcggggtgtttttcattgaaaaagctccgggaaacacgccttttgttccgccgaaaaatccgtctcgaccgttttatcgatgtcgagcgccgggcataaaagatgcactgcacggcagcagagcatctggtgctccgttctgtccaaatgcccgccgtaaaggtcgtcccccgccacgggatgcccaaggtgcgccatgtgcacgcgaatctggtgcgtgcgcccggttttcaaatggaagtcaacgagactgtacccgccgctcgttttcaccgtttgaaattccgtcacggcttcatctccgatgcccacgcagcgttccaccttatgccccggctttaacccgatgggcacgttcacacacccgctttcgggcgtttcgccctcgcacacggcgcggtacgttttcgtcagctttgcgtttgcggcaaatttgtttttcgccagcaccagtgcgccggtcgtatcccggtctaagcggtacagcggccgaaacacaaagtccggcgtattttgaaaataccacgccgccgcatttaaaacgctgtcgcggtcgtgccccggcgaggggtgcacaggcatattgtacggcttatcgagcactaaaaaatcctcgtcctcatataaaaccgcaaacggcaggtcggctttttcatacgcttcgcccgtctcaagcagcgtcaaagtcagcgtatcgccggctttcaaaactgcattgctgtgcacgggttcgccgtttttaagcatctctccctcgtatttcagcgccgttaaaatgcgtgcggaaaaccctaagtaccgccgcacgaacgtgcgcacgtccatgttttcctgtccgcagtcgatgacgaactccaatgtgcgtttcattacttgctgcgcgtcgcgagcttttccgcaaactcgtgcaggaacgtgctgtccgcgtcaaacgcgtcaagcgcacgaagcgccttttcggtatgctcatcgacgagcgcctgcgctttttccacgcccaaaatggaaacatacgtgcagcgcgcgttttgtgcatccacgccgatgttcttgccaagctccttggcgtcaccggtcacgtccagaatatcgtcgcggatctggaacgccaaaccgatgtgcagcgcgtattcctttgctgcattgatctgcgtttcgttcgcacccgccgcaatgcaacccatcatgcatgccgccatgatgaggtttgcggtcttgccggtgtctttttcgcacagcttatcaagcgaaacggtgcggttttcggttgcaaggtcaatgcactgaccgcccaccataccgtgctcgcccgcgcagcgcgcaagcaccgccgccgcatacgcagcgcgctccatgccgacatttcggaatgcttcactgctcagcgccgtttcaaacgcttttgtcaaaaggccgtcgcccgcaagcaatgcgtaattttcaccgtagaccttgtggttagagggcttaccgcggcgcatatcgtcgttatccatgcacggcaggtcatcgtggatgagcgaatacgcatgtaccatctccacggcacacgcaaacggcatcgccatgtcttcatcgccgccgcacagctcgcagaacgaaagcgttaaaacagcgcgcacacgcttgccgccgtttaaaagcgaatagcgcatggcgtcggtcacggtctcggaaagcgagcccttgcgctccggcaaaaaatgatctaaggctttttcaatgcgttttaccctgtcttccatttttattcctccgttttcgcagcactcagctccgtaattttctgttcggcagtgtttaatttctcatagcaaaagcgggaaagctccgcgccctcgctaaaaagcttcacagattcttccagtgtcacatctcccttttcgagcgtctcggtcacctcgcgaaggcgcagcatcgcgtcttcaaaggtcatggtttttttaggcatcggtcatttccctcttttctgttttctgcacccgcacggtgatcgcgccgtcctctacgcgcgctgtcaaaacgtcgcccggctttgcgtcttccgtgcgctttatcactttcccgttttcgtcggacacgattgcgtatccgcgtgaaagcaccttcagcgggctcattgcgtctaaccgtgcggaaagcgcagcaagctcgtttttcttattcaaaattctgcgctcagcgctgtgcgtcaggctctgcaccgtgtttcggagcgcctgcctgcgcggtgaaagccacgcggacgggttttgcagcacgtttgcgcttgcaagcgcatcgagcatctgccgccgatcgtcaagccccgcctgcacgctgccgcacaagcggcgcgtcagctgcgcaagtgccgcacgcatttcttccctgtccggcacggcaagctctgccgccgcgctcggcgttggcgctctcaagtccgcgacaaaatcgcaaatcgtaaaatccgtctcgtgtcccacagcggagatgacgggtatcttcgacgcgaacactgcccttgcgagcgtctcgtcgttgaatgcggccaaatcctccgcggagccgccgccgcgcccgatgatgatgacatccgccgccttttgagcgttcatcaatttcaccgccgccgtaagctgcgccgctgcgtcctcgccctgcacaagcaccgggcaaaacacgatctctgccgcaggccagcgccgcgaaagtatattgcgaatatcctgcaccgccgcacccgtcggtgacgtgatgacgccgatgcgcgccggaaacggcgggatcggccgcttgtgttcttccgcgaacagtccctcggcagcaagcttttctttcagctgctcaaacgctaagctcagcgcgcccacgccgtccggctgcatttcctccacataaaactggtactgcccgccgggctcatacacggccacacgcccgcgcacgataacgcgcatgccctctttcgggcaaaaacgcagccgccgcgcggcagacgaaaacataaccgccttcaaaacagacttttcgtctttcagcgaaaaatacaggtgtccggagcggtagtgatcggtaaaattggaaatttcgccgcgcgcgtaaatgtcgcgcatgcggccgtcaccctcaataagcgactttataaaaaaattgatctgcgaaaccgataaaacgcgcatatcaggcctcctgcgaaagtgacgccaaaacggcgatgccggcagcgttatccgccgaaaaacgcggctccgcaaacagtgcgccgtacttttcgctcatgtgtgcacgcagcatggagtttgaggacacgccgcccgaaaacaccacgggcaaatcgccgaatgtctcgataagcgccttacacatcgcgtccgatgccgcaatgacgtacgccatgcacgtcgcggcgatttcctccttcggtgcgccctttttcatcagctcgcggcatttattttccacaccggaaagcgagcagttcgcgcctttcatcgaagcgcgcacgcgcagtctttccgtataattgcacgcaatggggtctaaatgtttgccggccggaaacggcagaccgagcatcacgccgatgcggtcaatgacctgcccggcctttaaatcgagtgaagacgcaacaaggcgcgtgcgaaacattttgtcaccctccacaggttctaccaaaaccgcttccgttgtgccgccggacatgtgaaacgccaaaaagcgctcgtgcagcaagtctagtctatcaacagagtaaagcgctgccgcaatgtgcccctgctggtgcgaaaagcgccgcagcggcacccctaacgcctgcgcaagcatctgcgccgcaccgatgccgaccaagaagcacggcatataggagtccttcgcatcacgcggacgctccgaaacgccaatgaccttcgccccgccgatcttatcaccgagcatggacagcacctccggcagctggcgcgtgtggtgaaacaccgcgtcgctctggcgcagtccgatctcgccctctttcacaggcaaaatcatgccgcggctgtccatttcgccgtcgccgaaaaacgcggcgctcgttgtgtaattgctggtgtctaaaccgagcgcgctgatgttaggcattttcgctctccgtctcgttcttcgctccctcaagcttctttgcaatcgtggaaagcacgccgtttacgtaagaagcgtccttttcgttgccgtaaatttttgcaagctccaccgcctcgttgatggaaacgctcaccgggacatcgtcggcccgcataaactgcatctcgcacacggcaacgcgcaaaatcgtcagcgtcattttagaaagacggcgcaaactccagccgcgcagattttcttcgatcgtgtggtcgatctcgtctaaataaagctccgtcaaagcggtcagcttttcgcagtacggatcgacaacaacgtcgcgcgcttcctccgccatttcaatgatgtcttccatgctgtcgcccgtcacggtcttttcaaaaagcagcgtaaaagcctgttctctcgattctcttcttttcgtcatactcggttcctttcccttatctcaataaaattcattgcgtgattcatggcggatataaacaaaaaagcccgccgaaggatcggcaggcaatttgagcagaaatcaggcactttcgggtttcaccggtgccgtttgatgtgcagttttcaagctccagacatacacgccgatatgttctggaatagtataccacgacaaacggtaaaatgcaagaaatcatcttttatttcgccgcagaaatgatcttcacgttttccgcgctgacgccgctttcggaaactgcaatgtcccgcacgatgagcgcgttctgttcgtcctccatgtcgccgtttacaaccaccgtgcagctctcgccgttgatgtacgccacgcactccgtaaagcccttcgcttctatgagggactctatgtttgtctctttcaaaatgttctgcgcgataaccgcagcttcgtccacggcggcctgctttacggcgacctcggcgctgtcgtctttcaggatgtcctccagcagctccacggcctcatcccgtgcggtctggcgcgtcaatctagcgtccgaaagctttgcagaagccgaaaccgcagccgctgtttcttctgccgcgctgctttccgccgcaccgtctgcgggttccgtttccggcagaacgccgtcctcgttcataggcgtgtcggagactgtctccacataggcgttgttcacaagctgcgccgcaccgagagcggaagacgcactttcttcgctgacatcgcccgcgctctgcacctttgtgcccgcaaactgccagtttaagtacaccgccgcaccaagggccagcacaagcgatgccaagatcagctgtcttttaccgtatttcattccgtgttcctccgatcttcactgaatggtttcattcgttgccatatgtatattcgctgtaccccaccacgcatacctgcgtagaggataaatcgagcgcagtcttcacggcctccacaatcttctcccgcattttcgggtcgcttcccccacggctcacgattaccacgccgcggatctccggctccgttttcgtcacgatgagcggcttctgcgagccgtccgccgccttcaccaggatatacgtcttctgcgtgtcgccgtccgtctgtgtgcggttgagactttcgccgctgtactcctcggcgcttttttcgctctgcttatcttcggtcgcatacaccgtttcgcccattgtacgcagcgtcaccgtcacctgcggctcgctttcccccgtgatagccgagaccatctgcgcaatctgcgcggaaagcgctctggcgtagtctcccgccgtcagttccaccgtctccggcgcttcattttccgtgttctttgtgtccataggccaaaggagcatcaataaaacgagcgccgcacaggctgcaatgagcatatacgtcagcttaccgtttttcaaaaggcttttcagtttatccgtctcgcctcacctcctacacgtacacatccaccgggatggcctcggtcagcacgctgcgcaaaagcgcgtccgcgcggtcgatgtctgtcgcaaaccgcacccgtacccgcacacgttccaccgtcaccacgccgtcatcgtcctgcgtgtaccaaatgtcgatattcgctgccggcacgtccatccccgcacttttcaaaagcgccgagagccgctctttcaaaatcgccgtgcccttttccgcgtagctttgcgttatcgtcgattcggcttcgcccgtttcggtcaagtcaaaatcgagcgagaccccgctttgcagctttaaaatgccgtttacaagcaccacaagcagcatcagcgctgcaagcgcgtggataagtgacccgcttttttccgggaacagccgcacgatcatctccgttccgatgagcaccacgcacaccgaaaacaccagcgcatacaattcacgcataagcacctcgcacacaaagcaccacggccgccgagaccaccgccaccgcacccacactgcatacagccgcaatgagtagccgcagcgccgcagcacagccgtttaaaaacgacgcaagcggctttaggcccaacacctctgccgcaagccccgcgcaaaagcaaatcaaaagccacgcggcagcctttatgcacagcggcagaaaaatcgcgagcgatgcaagcagtccaaatgcacccacgccgttttttacaagcgccgcgccggaaacgatgaccgaaaacgcatcggaaaacgcgctgcccacaatggggatcgcgccggagacaagcattttcgccgccttgccgcccgccatctccgcgctgttcgcaaccattgtctgtacggacaaaacgcccgtatataccgtgacggtgagcaccaaagcccatttgataactttatacagcgcgtccgtcagccgctttaaatcaaacgatgtcacggcagaagccacggaaaacgccaaaaacacacgcaaaaccgggatgagcaccgcgctgctcaaaaccgagacggcatttgccgccgcaagcgacagcgcgccgtaggtcggtgctgtcacggtgttccccgccgtgaaaagcagccccgcatacacgggcaccgcggcaagcagaaaaacggcagcagcatccgtcacgcgcgcggcctgctccaaaagcgaagccatcggcgaaagcagcgtcacggcggcgcacagcgccccgcatacggaaacggcgtaggaaagctcctttgcggcgaattcctgcacaagtctgcacagcacgcatgatgcaagcagcgtaaggagtgcccgcgccggtgctgtccactccgcacgaaagccctcggaaagcgccgaaaacagctttgtcgccgcgccgggcgcaggtgtttccatcgggtcggccccgacgttctgcaaaagcgactgtgcttcttccggcagcgcctccataagtgtatccgccccgctgttttggtagagctccgcttcgtccgcgcgcacgggcagcgaaagcagcaggataaacaccgtcaaagccaaaaaaacgcgcaaaatccgttttttcataacaacagcacttcctgcaaaagcgagagaagtcgattcagcaacggcagcgccgtcagcagcaccgctgtttttacggcaagctccacaccgcttgctattgccgattcccccgcgtccttgcaaagatccgccgttatgcgcccgatgagcacgatgccaagcgcttttaacagcgctccgaacacctccggcatgccggaaagctccgcccattcgcggaatgtcgaagtcagcgtttcgatctgcggcaaaatacacagaaaaacgagtaccgccgccgcaagcgaaaacagcagagctatttccttttgcccgcgttttaaaagcgcgccgcacaccgctgcaaacaccgccgctgccgataccataagcaccgtgctcatagcccaaacaccgatttaatcgtatcgaacagcgtgctgatctgcgtgatgagcatcgtcagcaccacaatgagccccgcaagcgtcgtcatcatagcctgctcctcccgcccggagcgaatgagcagctggttcaaaacggccacaagtatgccgatggcggcgatcttgaagatcagatctacatccatagctttgctttcctttccggctgttacagcaaaataagggcggcggaaacgccgacaaacaaccccagcgccacgcacaatctgcctttctgggcaagactttgctcggcggctaaaagtgcgctgcgcacgcggccttcatgcagcgcaaagtacgccatttgcccatcgaggtcggtcttgccgaacccgtcgataaacgcggcgcacagcgcttcatccccgcggtatgtaaaaaatgcatgtgccgccgctttaaacgccgttgtgcaatccatgttttcagaaagcacccacacgcgcctcaaaaaagcgttttcgcggcacagggagagcagcgcgtacaggtcgcccgccgtataggccgcagcgtttttcaaggcgaaaagcgcttccaagaagatgctcagttctttttcacgcatttttagccgcgcagataccgatgacccggcggtcgccgcgcacagaacaatcaggatcgccgccgttgttttcaagaagatcacccgccaaaaacagcttttccactttcgtcggtgcacttcgcccgtgcagcagtgccaccgtttcaaacgcgccgagcgacagaatcccgcggcacagcggtctgcaacacagctcgtgtacactgcccgcgtggatgctcgcaatcagcgccacccctgaaaacgatgccgcacgtatcgccgaaagatcgttttcgccgagctcatcgcagacgatgtactccggtgaaagacaccgcaccgcgtgcgaaagcccctcctgcttcgggtagccctgcaaaatatccgtgcacgcaccgaggtcaaacccgtccgcactcagctcaaaccgctcgtcaagcaccaccacgcgatgccccgccgtaccgatatatcgtgcaatgtcccgcagcagcgtcgttttgcccgaggacggcgcgccagcaagcagcagcccacggctgaggtctacgccgtagcgcagcacctcctctgcacagccgcgcttctctcgcgggatacgcacagaaagactcgtcacgtcgcgcaccgttttgatgccgcccttttcgatcaccgccgtaccgccgatgcccacccgcaacgcgcggtctgcagagacgaatccgccgcgaatctcctccatgtgactgtaaacggaatacccgcacagccgcaaaaagatctcctccacgtcctcgcgtgtcgctgtcacattgttttgcgaaaaatactgcgccgtgtcgccgtcttcccgcaaaaacaaaatgcggtcgccgcagcacagcagcacaggcttatccacactgatacgaatgtcaaacaccgcgtcgcgcaccgccttcggcactttttcaagcatcggtgtaaagcgcccgagcgggcggatcgccttttcaaaatccatcgcacacacctttctttccgttccgtatgcccaattctatggacgtgccgccgggtttagaaccaaagtggaaaaaacgggccatcgccctttttataaacatgcctttatgcctttgaaaagtgtgcccgaaatccgccgcaatttttcaaacatgaaaagcaccctgcaaggccaaaagctttacaaggtgctttctctatggagcaagctatttactttggaagtccgctttgatacaagctgtaaaagtggttcgtcggccccgcgccgtgcccgagctcgagcgcgtgctcgatggcgcacgtcatatagtctttcgcacgcttcaccgcttcagcgggtgcatatccaagcgccaaattcgaggcaatagcggaagacagcgtgcaccctgtgccgtgcgtgttcttcgtttgaatgcgtcttgatgtaaagcttatatgctgctcaccatcgaacagaatatcgatcgggtcgcctgcaaagtgtcctccctttacaagcacagctttacagcccattgtgtaaatcaactttgctgcagcacacatatcgtcttccgtctcaatgtgcatcccggtgatttcctccgcctcgggaatattcggtgtcagcacgtcggcgagcggcaaaatttccgctttgaatgtctcaatcgactgcggagccatcagtgccgttccgtctttcgcatacatcacagggtcaacaacgacgttcttcggacagtatttgcgcagcttttccgccacagcagacatcacctccggcgtcggcagcatgccaatcttcacggcgtccgtaccgatatcttcatagattgcgtccacctgcgcgcggacaatctccggcgcaatatcctgctttttcagcacatgcacagtgttttccgccacgacggatacgatcacgctcatcgcgtacacgccgtgtgcggatattgtcttgatatccgcctgaatacccgcgccgccggagcaatccgacccggcgatggtcagtacgcgcttcattgcacgcatcacagcgaaagctcggaaactgtgaggttctgcacctcaacgggatcctcggcgtggatcgtgaacgtcggcttcgtctcatccagcacatgcgcgatgaccgtgtttgcaacgccgttcaaataaatctctacgctgtttgtatcggtaatgatgtccaccttcatcggctcgtttttcaggcgcggcaatatggattctccgcaggtcagaccgtttttgtcgagcttcatctcaaggccgtacaaattgcatgtaaggtcgccttcctttacagtaaaggagatgcggcaggtcttactgccgagctcgtgcgtgcagtgcgtcaatgtaaagtcatcaagcttgtcagattttacaaccagattttctgtgctcttgatcggcagcgcagagagatagtagcggtcgccgtgctttttcagcgtcatttcggtcggcgtacacatggagccgttgaacggtgcgccgggaatatcgctgcggttccacgcaaagcggatgaccggcttgcccggctcatagtaatacgtctgcgccgcatacgactgcgagttatacgaaagctgcccgaccgactgaatcggctggtaaaggccgttttcatcaaaatcaccgacaaaatacatgtcgtgcgcaccggaatagacccacagcgttctgccgtcatctgctgtaagcggatagagatccgggcactcgtcatcaccgggcaggtcaaatttctgcagaagatcccagtgcagtaagtcctgcgacgtgaagattgcgtaggtgcgctccacaaaatacagtgccatcagccagcgcgcgcgctttgcgtcgtaaataaccttcgggtcgcggttgccgggtgcaatctcgtcgatcagcggatttttgtcatactttttcagcgttttaccgccgtctgtgctgtacgcaaggcactgtgtgctctttttttcgcccgcgcaggtgtaaaagaacaagattggcgtttcatcgccttccttgaggccggaaacattgttgtgatcgactaccgcacagccggaaaacattgcgccgtccatgtcaaggaacatcgcttcttccttatattcccagtggaaaagatccgggctcacggcgtgaccccaatgcatgttgccccacagtctgccgtagggattgtgctggtagaagaggtgatactgtccgccgtaaaagcacagaccgttcggatcgttgatccagccgcgctccgctgtaaagtgcagctgcgggcgcaagacggtctctcccgccgtaagcggcgtcatggcatcctcaaacaccggtgtaaatgcgcactccggctccaccgtgacagtcatcgtcttaccaaggtaatcgcgcaggtcggcataataaaccgcatctgcgttttcttccgtataaacggcatcgaacttataaaccggtgtgccgttttcagaaaaagtaaatttgtgcgaagtgccgtcaaatttcaccggcacgcgtagaaaacgtttgctgactgtaatttccataaactcaagctcctttagccgttatcggtgcattaaaatgcatgcaccacatttattcgaggatattgtagcacaccgcgcgaaaaatgtcatgcatattttgcttaaatttgcgaatttttccgccgcgcaaagccaaactatgtgcgctgcagatctgtaaaggaaagacggtgcaaaggtggcaaagcgcgtttggaaatttgtaaaaagtaaaaagatatttatcgtattactaatactgtatacagttgtctttattttggcagttcgatttatttttcatattctcccgattttgcttggcgggttgcttggatgggtcacagcaccgctatgccgcctgctggaaaaacggctgcatctctcccataagcgtgccgcactttgcactgctgtcgccgtttatagcgtttcactcgtccttcttgcattgcttttcacgcggctcatccgggaaagcgccgcgttttttgcttccgggcgatactttcgctacgaagcactcgcccccgccgtgcggtcgtttttggagcgcacatggcaggaattgccgcagtggatctccgctgcgcagaagaatttttcgggtaacatgggtgccgccatacccgcgctgcaaggcaccgtaaaagcgattttgctgctgcccgccgtgtttttaacgctcacgctcatcccggtttttgcgtatctcaccctgctgtaccgtgaaaatttgctgtcacttttaaagaagctcatcggtgaaaagtgcgtagaaaacctgcaaaaatccgcaaaaagcgaatcatccgtcgggtttgtttccgcctatgcactcatttacaccatcacgtttgcggaaagctttgtgatgctccacctgctgcgcatggaatacccgctgatgactgccgccgttgtgacggtctccgatattttcccggtctttgggccgggaaccgttttgctgccgctcgccgtttaccgattgttatgcggcagcgcggcgcaagcactcgggcttttcatcggatggatcattctaagcgtcattcggcagatcattgagccgaagctgctcgccaaaatgacgcgcaccccgcccgccgtgatgcttttcgctgtatattgcagccttatcagccgcaatttttggctcatcccctacaccggcacttttttcatgctgatcggcatgttgaaaaaagccggaatactaacagtaaaatccaaatcaatataaattaaaaattataaatttacaaaagcaaaactttaaaacaccattttaaaattattgtgttttgataaaatacattcaaaaatcgaaagtgccgtcaaacatctgcttattttcttttagcaagctgtaaaggtactgccccgctccccaatcgctcttttgaatctcacggagccagtgctctttattttcgcaggtgaaatattcgagaatttttctgttgtttttcttttccatatcgttctcctctgaattaaaactattctcccgtattttccaatatagcgaaacttatgttcggcgtcaaggcgattttgaaaagatgtccgcttttatacaaaaaaacaagagaaggacggtctatccctctcttgctctgtattttgtatgaaatttttacatgttcagcagcttttctgcagcggcgagcttgatggagcaacagaaaacttccatggcttgttcgagctcttcaagcggcgggaacgacggcgcaagacgaatgttactgtcgtgcgggtctttgccgtacgggaacgtcgcaccggcatcggtcaggatgacgcccgcttctttgcacagctgtacgacgcgctttgcgcagccgtcaagcacatcgacgctgatgaaatagccgccgttcggcttattccactcggcgacgccgaggtcgccgacattttcctccaacatcagctcacacaggcggaacttcggctccaaaatggcgcggtggcccttcatgagggcgcgcacaccgttgatgtcgtgcaggaacaacacatggcgcagctgattcagcttatccgggccgatggtagacgtgagcgtgtgctccttgaaatcgcggatattgttatcgctcgtggcgaggccggccacaccggcgcccgggaacgagatcttggacgtagaggcaaaaatgaagatctgatcttccgtgccgttttcaacgcagagatcgtagatattgagcagcgtgtccggcgtatcggtgagatcatgcacacaataggcgttatcccacatgattttgaagtcctttgcagccggttttaatgcggcgaaacggcggacggtctcatcggaatacgtgacacccgtggggttcgaatacttcggcacacaccaaatgcccttgatggagtcatcgtccttgacgagcttttcgatgagatccatatccgggccggtagcatacatcgggatgttaatgagctcgaagccgtaatactccgttacggcaaagtggcggtcgtagcccggcaccggacagagaaattttttcttatccagcttgcaccacggcgtgcagccgttgtagccgtgcgagaagccgcgggaaataacctcaaacatcatcatcaagcttgagttgttgccgagaatgacctgcgaagccggtacgccgaccatatcggcgaaaatgcgtttcatctccggcagaccgtcccaaagaccgtagttacggcagtcatcaccgttggaattcgcaaattcgcttctcgctttcagtgcttccaaaacgccgagggcgagctccagttgttttgcgctgggcttgccgcgcgccatgttcagcgaaagatttttggcctgatagcccttatattctgcggaaagctcatcgaaaaccttctgtaattctgctttgctcaagtttgcgtacgccacgaaaacatctccataaataagattttgaattgaaaaataagcattcaattcatttttacgctccaatagcgcctgaaacaattcttattgtaatacaaataagctaaaaatgcaagccttatttataaatcttgcattttcctcgttttgcacgattgtacgacgtgttttcctgcttttccgttcattctgacaagcgtataacaaagcaaaaaccggcacagcgaactgcaccggcaaaagacttgcttttatgaaatttagaactccgcagagcccgttgtgcgcgggaacggcagtacgtcgcggatattggagatgcccgtaaggtacatgaccatgcgctcgaagccgagaccgaagcccgcatgcttgttgccgccgaaacggcgaaggtcgaggtaccaccagtaatcctcctcgttaaggccgagctcgcgaatacggttcagaagcacgtcgtagcgctcttctctctggcttgcgccgcacagctcgccgatgcccggcacgagcagatcggtcgccgcaacggtcttgtcatcgtcgttgaggcgcatgtagaacgccttgatctccttcgggtaatcggtgacaaacaccggcttgccgaactctttttcggtgaggtagcgctcgtgctcggtctggaggtcgcagccccaggagaccttatattcaaagttgtcgttgttcttctcgaggagctttacggcatccgtataggaaatgcggacaaaatcggagtttgccacgtgctccagacgctctttgagacccttatcgacaaactggttaaagaagtcgatgtcctgcgggcagcgcgccataacgtctttgatgatgtacttgatcatgtcctccatgagatccatgtcgtcgttgagatcagcaaacgcgatctccggctcgaccatccagaactctgccgcgtgacgctgcgtgtaggagcgctctgcgcggaacgtgggaccgaacgtatagaccttaccaaacgccatggccatgcactccgcctcaagctggccggaaacggtgagggacgtctgcttgccgaagaaatccttgctgtaatcgaccgtgccgtcctcgtttttcggaacattgtcgaggtcgagcgttgtcagctggaacatctcgcccgcgccctcgcagtcactgcccgtgacaatcggcgtatgcacgtaggtgaagccgttctcgttgaagaacttatggatggcgaacgccgcagcggaacgcacgcggaacgccgcgttgaagaggttcgttctcgggcgcaggtgcgcgaccgtacgcaggtattccaccgtgtggcgcttcttctgaagcgggtattccggcgaggacgcaccctcaacggtaatctcctccgcctgaatttcaaaaggctgcttcgcttccggcgtaagcagcagcgtaccggtgacacgcagcgcagcgccgacattctgggaagcgatctccttgtaattttcgagtttttccgccgtaaagacgatctgtacgcccttaaagcagctgccgtcattcagatcgataaatccgagcgctttggagtcgcggatcgatctcgcccagccacagaccgtgacctgcgtatcgccaaaggtctccggcgatccgtagagggccgcgatttctgttcttttcatgatgaccacattcctttccgtgcggcacttaaactgcacacgcaaaacctacgctttggcatgcggcatttctccgcaaataatcacttttattatcatactacaaacgctatcggtttagcaaggaaaattttgaattttctccccgaaaacgcgatttatgcgcgatctttcttcaaaatcgcataatttgcgatgtcgcacagtcccccattgttctttgcaccctcgcgcatgatgccctcaaactgcatgccgcactttttcatcacgccgccggagtgcgagttgttcacatcatggcgcgccgcaatgcggttgaggccgacctcgtcaaacaggaaattaatcacggcaccgagtgcttcgctcgtatagcccttgtgccaccagttttggccgatgcagtagccgatctcagccgctttgatctcatcatccgtttttaccgcagcgatggtgccgataagcgcgttttcatcctttacaacaatgccccactggtaatagttgagctcctcatagtgcgatgcccacagcgcgaggatctgctttgttacctccacgctgctgtgcgtgggccatgtgaggaactttgtgaccccagggtcggacgcccagttgcggtacatcggctctgcgtccgcaagcgttaagcggcgcaaaatgagtcttggcgtttcgagtgtgacagtccccttgtgttccattgtgtttcctcctgatttctcctgaaaataaaacagtgcagaccgttcattcagcctgcactgttcattacgatttatgcggttaggttctttctaactctcaaaaagcgtatgacaatgtaagcccgcagcaagtaccgttacccatggcatttgcggactgcatattcatcataacgcggacaaagcggaacattgtcatacccctttctttcaaatttgttttgactatcctaccacagttctttcggttttgcaagaggaaaattcaattttcctgaaattctccggaaaatcagcccaaaggcgcgagtttgagcaatttgcgctccttttcgccgtaaaagcgcaccgcgttgatacggctgttaatctcattgcgcagctctgcgttttcgtaggcgtattcgcccgttacggtgctgacatctgcactcagcagcgcaaacatattgcttcttgcgagcgcgccgtaggtgatttccgtttctctatcgcgcaggccgttgtcgctctgcacggcatcgctgtaaaagagttcgaggtatttaaagatttcctcggcgcacttcgtattcggattcaccgccgcataggccgtgacgaacgccgtcac

SEQ ID NO: 409 - DNA, 2658 bp, Unknown
  16S sequences of unknown bacteria
cgtcggcagcgtcagatgtgtataagagacaggttctacggcgatcatcaccttatgcctgcctatggcatttgcggcagtttccggcgcgggtatgcctctcatggtgtttttgatgagctgtacttacgcggccatgcagatttctcctacgcatttgtgccttaccttggcatgcgagcattttaaaacggattttggagcattggtcaaacgaacgttaccagttattggaattttttatgtgattttgaccggatactacatacttttaaatttatttttttaatcgctttttacgtgggtacagctgcgaaaaggctgtgctctttttatttggcagaaaatcatgtggcagagtgctgttttgcctttctcttttacaggcaaagaaaacaatgagttttttataaaatccgcagagaaatatgaaaaatactacgggcctttttatcgcttggattatcatataaaaacctggctttgcagacaatctgtctgcaaagccaggtttttaatttctgatatttgaatagccaagcaatctgtttattatttgctcagtagctctattcctttccggatgcggttaagagactcctctttgccaagaatagcgcaaatttcaattccgccgccgggagtaaactgttttccgcttaccgccacacgaaccggccagagcagatatccatttttcacgcctagtttggcaatcaaatcaaacagggcggtatggatggatccctcggtaaaatcttccagcgattccagcacaggcagtacggctttgagcgcctccagagaggtttcctcgttggttttcatctttttgtgaacatacaatgccgtatcatattcaggcaaacagtcgataaaatccacctgctccggaatttgattcagcacttcggtccgcgcctgcaaaactttggcgataaggcgcgtgtccacatcttcacgctttactgtctgacgaatccagggtaaagcaatttcatggaattgctccaaagagagctgacgaatgtattccgcattgatgtaatccagcttttgattgtcaaagatagaaggagatttgctgattccggaaacggagaactcctttttgagttcctccattgtaaaaatttcctgttcaccctttggcgcccatcctaacaaagcaaggtaattgacgattgcagcaggcaaatatcctttggcgactaaatcctgataggatgcgtctccatttcgtttagacaacttttcagtagcgtttttcataaccggggggcaatgaatataagtgggaatctcccagccaaacgcctcgtacagcaggttatatttgggagtagaagacaggtattcagagccacggatgacatgggtaatccccatggtgtggtcgtccactacattggcaaaattataagtaggcatgccgtcagctttgatgagcacttgatcatctagcgtgtcgttatctacggtgatcagcccatatacctcatcttggaaagaagtggtaccctcggtaggcattttctgccggatgacataggggattcctgccgtcagcttttcggcaacctcttctttagaaaggttgcggcagtgcccatcatatcggggtgcaatgccagaagctttttgcagtacccgcacctcatccaaacgatttttgtcacagaaacagtagtaggcatgaccgctttccactagctgttccgcgtattttttgaacatggacatgcgctcgctctggacataaggccctactgggccaccgatatccggtccttcatcccagtaaagccccgcttctttcagcgtattgtaaatgatgtccacagcgccttccacatatcgctcctggtcagtatcctctatacggagaataaaagtaccgttctgggatttggccatcaaataggcataaagagcagttctaagatttcccacatgcatgtagccggtgggactgggcgcaaaacgggtccgcacgccttccaatttcatgttgtttcctcctgctgccgcagttgcggcgattcctgattgttccatttttttgggaaaaaccgatacagatatatattacctttggcctgtttgcttgtcaagggaggtttgaggataacttccgccctacgtctcgaaggacgactgattccgacaggttacgctatggaaaacggctatactgaaaataccggaaaccatattttatgcacgaatcaaagaaaaaatacctgatggaccggttggatgcaaagaaatgagggataattgtgttaaaaacaaaggaaaagccgatgcctgctatttcccgcttagcagaatttttcaaaggacaggcgatactgctggaatatctggcctgcatgttatgcggatttatcctatctaatgcttttttgctggggcaactggccccttttggtgtagcttttaccgcggcgggaaaaaaagaacgaactacggccgccggtgccggtgcgttgttgggatacattttttcatttcatccggagaataatacccgatatattgcggcggtaacgctggctgttgctgtcaaatggcttctgcctccaaaactgatgcaaaaatatcaacgctggatctgtctcttatacacatctccgagcccacgagaccgtacta

SEQ ID NO: 410 - DNA, 1696 bp, Unknown
  16S sequences of unknown bacteria
attctccgttttctcttttgcgctgttcttccatttccttttcaatatcctgcaacctgtgcgagaagtcccgctccaacagttcgctttcatcggtaaaagaacgcaaaaacttaccgaaaagagattgtatgttgtatctcgatattgcccggcggcgtttgtactttttgtcgttcggctttaattttttatatttcggtttttcgcaaagttcgggttttatagcctttgcaaggttcaaaacaagattgccctgccgccttttataatctgcttctatatcccgcaaaatcgtaagtttgctttcgtctatcttgttgtgatattttgaaaaattcttctcgatttcctctgcggatatatttttatccgtgacggcaaagttcttgccgcaaatgctttttatgagcatttccttgcgtttgagttcccgtataaactttaagtgagccttgcgcgcctgcccgtcatagccgattaacattgcgactatgttatctacccgccctttgtatgccgtcatatctttactgccgtaagtaagcctgcccgttttcggcaagtctttggcaagcgagattatctcttgtttgatttcatccttgcttaccattactcttttgattgccgtcataccccgaagcactctgattgcctccactctcgatttatacagcctgtccctgccgtcgtctacatacattccgagccgaacgaacaaattgtctatcgccgttttttcgattttccctttgcgcctgtatgaaagcactccgtccttgcctttgtatttcggttctttctcccaaaacacgaaatgaaaatgcagatggtcggggcggtctaaatgcaacgcgcacatcaggtcgatattctttttatctaacttcgcgtcctgaaaaaattgtccgaacgtcgcttttatcataccgatacacttttcgggcgtgtcgattttatacgactgctctttattgagcgacacgaaaccgtgccatatattgcccttgttgtttttcagccgttctttcatctccgcgactttttcttccgataaaagtccgttgccattgaatacgcccgttgacttttgcaggtattcgagcgcggttattttccccgtctttttgcctgcgactttaccctccgtcgttatgtacttatatacgttctcgccgcccgtcatatcgaaaaaggaacgttccgctctatgggcttctctttcaagtccgcttgcttttctgccgagttcatacggcgtatactttatattcagaataataggttgattgtccgtaacttattacctccccacgtcctttaacattcgtatttcctcgtttacgagatagtccggcgtgtcctgataaaaacctttcacgagcgaatcaacgtctgattttccgtcttgcaatgccgccgctcgctcgttgaatagcgagcatacgaccgattttgtgatcacttcgtttgcgagcatttctttcataagccgtatcagttggaaataaaacgcgtcctcgttatactcgttcggaacgcttacgggcgtttcttccccgtcgatttccaccgtatcgaacagccgcttatacagtataggcaagccgaacaacaaagcggaatttatgaccttattgaaacttttatcgtagtccggatgagtcataattttgtcgatatattcccacat

SEQ ID NO: 411 - DNA, 2695 bp, Unknown
  16S sequences of unknown bacteria
ctccagcataccggagagctggccttttaaaatggtgacaggtgttttcagctcgtgggaggccgcggagaagaaggccatccgctggcggtccagttcccgctcctgctccacctctccccgcagggcgtggttggcgttctccagctcccgcagggccgtggacagccgccgggacatctcatccaaactgcggcccagctttccaatctcgtcccggcgctcctccccgcactcccaggtaaagtccagctccgccatcttgccggcaatgccgctgagccgaacgatggggcgggtgatgtaccgggagtagaccaacgcacacagcaaggaaaacgccagcagtgtcagcagcagccatggcgccatctgaatcaacgcccgtaccgccacattttccgcctcaatacggggcgtgacgcagagggagtagagctcctgctggtcggcaaaccgcacgtcgaccagcatcgcgtcctgttcagacatggtgacgctcaccatgccctccgcttctgccgtcccagtttcccaagcaacagccgccgtatcatccacggaagtcacaatgcactcagaagctgcgccaaccatcgtcgggtcattttcgcgcagggactgggcggcaagcagggagcccgtggcggcgatctccccgtccggccccaacaatgcagcgctcgccccagtggtgcggataaacgcatccagcagcggcccgcagtcctcaaaagaggatcgcgccagatcgcccagcaggtcgtctacctgccgcgtcaaatcgtcgttgatcactgtggtataggtaactggcgcggccagtgcaaccagcccgaaggtgacgcctccggcgccaagcaggacccatgcagtgatgagaaagatgcgtgcggtcaaactctcactgattttccttcgcagcacgataccccactcctctcacagtctcgatatatccccgccccagcttatgtcggaggttcttaatgtggctgtccaccacccgttcgtccccgaaaaagtcatagccccagagcttggccagcagcatttcccgggtaaacacacgccccggcgcggccaaaaaggtgtgcagcagttcaaattcccgggcggttagctccaggggacggccctccagaaggacctctctggcgtccagccgcatggtcagatcccggtagcgcaggcagctctccgccgcgccggtattccggcgcagaatcacccggattttctccagcagaacgggcatggaaaagggttttgtcacatagtcgtcaatgtccaggccaaatccccggagctgctgttcttctccgtccagggccgtaagcatcaggatcgggacctgggaactccggcggatcagttcgcagactccaaagccgtcgattttcggcagcaggatgtccaggagcaccaagtcaaaggagcgtgattgaaacagcgtcagagccgtcacgccgtctcccgcggtagctgtttcatacccggcatcccggaggtaggcacagagcagctcctgaatatccggctcatcttctatgattaagatttttttcacaagcaatcaccacgttgcagtataacatgggattgtgaatttttcatggagaattgttttttagcaatacaaggatcatgtcatatttccttccaaatttaaatctgtgtaaggtggggttcaatattctgtcaacatcatgcagagggaacttgattgctgcttggcgggtttgatcacttaaccgttcccatatataacaccgccggaaacgcagatatctatcagcctagcatagctgcaaaccacccacgtcagcatggcaaaacagcaatgtataaggtatccgctccaataagcaggacaaggtatcacttagcgataccttgtccgttgctgtactttggcaatcttcttttctgctccgcaccttcgcgaaccatattcacttcggttcttcgtacagagggcttgccatcggttccatatccaaattgtatctgcggcgcctttgaaacgcactttaatcggctgcaatcagcccccgccgatatccacttataatgtcagggatggcgcggaataggttcggttcagcagctcgctgtttaacatataaaggctcttggcatccccaccatacagctccatttttgtaatctggtctgcagagctcttttcctcctcgccttgttccttgataaaccagtctaagaactgaaccgtccggaaatcattcacgccctgagcagcagcataaatgttgttaatcagtgatgtcacgtatttttcatgttcaagggcaattttgaggggccccatcaaatctgtaaagattttatcgggcttggcgatctctttcagtgtgacagattgatcattattgtgcagatagtgatagatcagcattgcatggtccatttcctctttagcctgaatctcataccagttggcaaagccatccagccccttgtcatcataataattggcaatgtccaagtataaataggcggaataaagttctttgttgatctgatcgtttaatagctcaaatacgtgtttttccattttgatgtacctccattaatattgtttttgtgatattcatatttttaaaaatcttcatctaatagttggtgtttttttgcaaaaatcatcagcttttcaaaggattctgtactaata

SEQ ID NO: 412 - DNA, 5612 bp, Unknown
  16S sequences of unknown bacteria
agtattccagcacagcccgggcgatgctcataccgtcgaaggtggaggtgccccggccgatctcgtcgagaatcagcagcgagcgggaggtggcctgccgcaggatggaggctacctcgttcatttccaccatgaaagtggattggccggaggacaggtcgtcgctggcgccgatacgggtgaaaatacggtccacgatgccgatgcgggcggattttgcgggaacaaaggaaccgatctgagccagcaggacaatcagggcaacctggcgcatataagtggacttgccggccatattcggcccggtaatgatggcggtgcggtcctctttttcacccatgaaggtatcgttgggaacaaacagggagtccctgagtactttttccaccaccgggtgccggccgtcgtggatctcgatgacgccgctttcgtccacagtgggacaggcgtagccattgcgtacggctacagcggccagagaagcataagcgtccagctcggccacctcggcggcagttttctgaatgcggccggcggcgtcggcgatttcctgacgcagagccgaaaacagctcatattccagtgccgatacccgatcggaggcggtgaggatagtgtgttccagatctttcagctcctgggtcacatagcgctcggcattggccagagtctgcttgcggatgtagtgctccggcacctgatctttaaaggaattggatacttcgatgtaatagccgaatacccggttgtatttgattttcagcgtacggatgccggttttttctttttcactggcctcaatgccggcaatggtgcccttgccgccgctgaggatgtcccggagccggtccacttcagtatggaagcctgggcggatgaagccgccctcgcgcacggagaagggcggttcgtccaccagcgtctgcgcaatgcgcgcacccaaatcagacagagtgtccaaattccgggccagctcgcccagccggccggaagagaaatgggagagctgtgcggccacggcgggcagtttttcaatagcgctgcgcagcgaggccatatcccgcccgccggcggtgccgtatacaatgcggccgataaggcgctcgatgtccccgatgccggtcagggtcaggatcagctcttcgcgggccatagtatcttccaccaaggcggccacagcgcgctggcgctttccgatggcggtgggggaaagcaggggacgctccagaaagccgcgcaggcaccgggatcccatgggcgttttcgttttgtccagcacccacagaaggctcccgcgcttttccttgctgcgcagggtttccgtcagttccaggttgcgccgggcggccacgtccagctccataaattcgccctgctcatagtaatccagatcgtttatgtaagaaaggtctgttttttgcgtctcataaaggtagctgagcaggccgcccaacgccatagtcacggcgggaatactctgggggagggccttgagcgcctcttcgccgaactgccggcgtacggtgcgctcggcggcggccaaatcgaaggcggcgtccttaccccgttcgcggtggcagtggagcctgtcgcggaggaattcgttcaaagccggatgatcggcggctgcgccgcccagcaccacctccgcgggggagaaacggcccagttcgttgatgaggtgacccaccgattccgctccggaaaaggcggtagccatggtccggccggtggatacgtcgacaaagcacacgccggtgccgttgtcgctgagaaacacggcgctgatgtagttgctgcggccgtcctccagcatagaactgtcggttacggtgccgggggtgactacgcggatgatgtcccgctccaccaaccccttggccgtggccggatcctccatctgctcacagatggccactttgtagcccttggcaatcaggcgggcaatgtagccctcgcaggagtggtagggtacgccgcacatgggagtctggtcggccttgtccttgccccgatctcgggtggtcagggtgagatccagttcccgcgaggcagttttggcgtcctccccaaacatctcatagaaatcgcccagacggaagaaaagaagggcgccggggttggcctctttcagttttacgtattgctgcatcatcggcgtgagttcagccatgctttcacctcgtatgtgttctctttctggtcggtggggagaaatttaccggaatttgtaaggttcaacggcctgcagttccacatagccgcagccgggacagacatggcagcgcacagcactgcggatttccataccctgccagttgggcacgccctgggagagcgtcatattcacgccgggcaggccgaacagatttacttttttcatttccattccgcatttgatacattccatggtgattggctccttttctgttgaatttttttgaaatcaaatatcgctgtggtctgtgcgcctgggcattactccgtcagttcgccaaagagcgcccaggtgttgctgtcggtaatttttgcggttttgaagcggccgatggacgcttcatcacccaccagatgcaacaggcgcccgcctgctgtgcgggccgagagcggccagcgggaatcaccgcttttgccgtccaccagcacccgctgcaccgtgccgacataggcggcgtgtttttgtgcagagttggcgttctgaacctgcagcagggcgtcgaaccactgctgcttttccgcgcggggcaccgggtcgggcagttttgctgccggagtgccgggacggggggaataaataaaggtgaacagcgcgtcaaagcgcacctgctgcaccagagagagggtttcttcaaacgcttccttcgtttcgccggggaaacccacgatgacgtcggaggtgagcacaatatccggcataacggtgcgggcgtagtccaccagcgcaagatattcctcgcggctgtagccccggttcatggcctggaggatgcgggtggaaccggattggaagggcaggtggagatgacgggcgattttctcatgacgggccatggtgtcgaggagcttgtgggaggcatccttggggtggctggtcataaaacgcagcaggaaatctccgtccaggcgggccagctcgtccaaaaggtcggcaaagtcgcacgcctctggcaaatcctttccgtaggagttcacattttgtcccagcagggtgatctctttataaccctcggcaatcagactttttacatcggcaacaatgcaggctttgtcccggctgcgctcccgaccccggacataggggacgatgcagtaggtgcagaaattgttgcacccatacattactgaaacccaagctttggcgccgccttcgcggacgatgggcagcccttcggcgatggagccgtgggagtcgtcaatggagaacacacggccgtgctgatgatagaccttctgcagcagctccggaaaacgccacagggcgtgggggccgaataccagatccacgtggcggtaggaagcgcgcaccttgtcggccacctgtttttgctgggccatacagccgcacaggcagattatctgccggggattggcctttttggtatgggtcagagcgccgagatttccatagacccgctgctcggcgtgctcccgcacggcgcaggtgttgaggatgaccacatcggcctgatgaggatcctcggtaaaagcgaagcccatttcgcggagcatgcccataatatgttcgctgtcggccacgttttgctggcatccaaaagtgtctacgcaggccaggggcgcatgatccagggtttcctgcaaatgcgtgcggatctcctgcatgatctcccgctgccgcgccagctgctggggggatacaacgacttcttctcgcttcaaaaaacattctcctgtctccccggccgcaaaagaccgggaggcaaatcctgccaaattatactttaactaatacagtatagcgcgttttgcgtgccagcacaatctttttttgcgccgaagcggcaaaaaattggcctggccgggggcggtggccagggatttctttttccatctggccgtgctacaatgggaccggaaaccattccgaaggagaaaggggaatgtcgtgtgcgtttgctgctggtggaggacgatgaggagatcagcgccatgctcagggattttttggaaagcgaaggtttttcggtagatacggctgccgacggggaggcaggctgcgcccgctttagcgcagcgcagtacgatctggtgctgctggatctgatgctgccccggcgcagtggcctggatgtgctgcgcgccattcgaaaaagcgggagcactgttccggtgattatcctgtctgcccgggacagcgattcggatgttacgctgggcctggggctgggagccgatgattatgtggttaaacccttttccgtcagccaggtgctggcccgcatcaaggcaaacttacgccgctccactgtgtgggcagagggcgcggaggcgccggcggaggtgctgcgtgccggaacgctggcgatggattgcgcggcccaccgggtggaaaaggacggtattccagtggagctgacggccaaggaatacgcgattttggagctgttgctgcgcaatccaagacgggtctacaccaaggcgcagctttatgctgcggtgtggggcgaggcgtatctgggcgatgagaacgcggtcaatgttcacatcagccgcctgcgctccaaagtggaagacgaccccaaaaagccccgctgcatctgcacggtttggggcattggttacaagctgggggatggcgatgggcggtaacggtgtgctgctgcttttggctgccgtactgggctttgcggcgctccattttgctctgcggcagcggaggctgcggcggcagctttcgcaggcggcacagcaattggcggttattttagacggcgggagcgacgaagcgctgcttgtgccgctgtgcgacgacgctttgacgccgctgttggggcagatcgaccggctgctgctggaaaagaaaaaactgtgtgtgcagcagcggcgcgcccgtttggcgcagcggcgtatgcttgccaacatggcccatgacctgcgcacgccgctgactgtacttctggggcagttggaaatcgcacggctgcggggtgaagagagtgaaacgctgcgccgggtgcaggccaaagccgaagaagtgctggctttgagcgaagcgttttttacactttccaagctggaagcgggagacacgaaactgccttgtgctgcggtggatctgagtgagctgtgccgtgctgccgcgctggaatattacgattttctgacacagcagcggtttgaggtggaaattcacgtcccggaggaggcgtgtcccgtttgggggcacgaggaatctatccgccgcattttatccaacctgatttccaatgcagtgcgctacggtgcggcgggacgctatttgggcattgtgctggagcagcaggaggacggcgcctgtgtgcgcgtgcaggaccggggacagggcattgccccggaggcgctgagccatattttcgaccggctctacacaccggagggctcccgcagccgtgctc

SEQ ID NO: 413 - DNA, 3554 bp, Unknown
  16S sequences of unknown bacteria
tcatgagcaagtagcgaagcggattgcgaatgtccgctttactgactatgtattttacgcctttggtgctgtagggtacaaaagacgtaatgtggggggtaagcgcccacagatctgtcgcgaagcgattgcgttcgctgacatgataacatgaatagaaagggctgctgcggacatgtgaatcatcagaattgttttctgaaaattacggtctgtagcagccctttacagcagatcctgcaaggctatccagtctggcaggaccattcatttattgcgcgaagaaagactgcagaatatcagaagggcagccggattaccggaagctgtccatcccggcatattgcgtgcagaaaggaagactatgtttaaagttatattcagatttgaaaatggcagtgctgtggaagcgtttgccgcagaaggggagaaccttctcgaggtggcacggaagacgaatgttgccatcgatgcaccgtgctctggaaatgcagcctgcggaaagtgtagagtaaagcttttaaagggagagctggattcccagcagacccttcatattaccgatgaagagtacgcacagggctggaggttgtcctgtgtcagcaaggtaatcgcagatgtggaagtagaagtaccggatatcgcgtctgcatataagagcagaatgaaggtagcggacctggattctgcaaaggagattgagatttttgagcggacaaaagcggatgtggaagaggccggaatcgtgtttaaaaacgatatggatgtcatccgcgtgaccatgaacgagccgacactggacgataccatgccggatctggagcgcctgacctgggcagtggagaaggtctgcggcacggagcgtgtaaaggttccgtttacagttatgaaaaatatggcggaaacgctgaggaaatataaatttgatgtgcagtgtgtcattagaagaggcaaagataaggtcgaagtgcttgatatcctcggatcggatgaggacgtcagggtatgtggccttgcagtggatattggaacgacctctgtggcggcgctgattattgatatgcagaccggaaccatactggcaaaggcatccaccggaaacgggcagattcgatacggagcagatgtaattaaccgtattatcgaggcagtaaagccgggtggcaggaaaaagctgcaggatgcaattgtaaaagagactctgaatccattgattgctgagatgtgtgcggcatcgaagatcaaggcgagccatatttaccggatgtgcgtagccgggaatacgacaatgaatcatcttctggttggggtatattccgatccgatccggatggagccatatattccgacgttttatgagacgacaaatgttcatgcacaggatcttggcattcatattttcccacatgcacgtatcattatggctccgaatattggcagctatgtcggaggtgatatcacagcaggtacttttgccagctgcatctggaaccgtccgacgatgtcgctctttattgaccttggtacgaacggagagctggtgtttggaaatggagagtttatgatgagctgtgcctgctcagcaggaccggccttcgagggcggagatatcagctgcggtatgcgtgcgacggatggcgcgatcgaggcatgttccattgacaaggagacgatggagccaacattatccatcatcggagatccggggcagaaggccgtcggtgtctgcggttccggtatcattgatttgatcagtgagctgttccgctgcgggattatcaatccaaagggcaaatttgtccgggagggaaaacgtgtccgctttgataaatatggaatgggcagctatgttattgtatttcaggaggatgcggcatcggtgaaggatgttgaaatcaatgaggttgatattgataatttcatccgtgccaagggcgcaattttctctgcaatccgtgtgatgctgaattcgcttgattttacggtagatatgattgacgatgtatatgtggccggaggaatcggaagtggcattaacatgcagaatgcagttaatatcggcatgttcccggatattccgatcgagaagttccattatatcggaaactcttcgctgtcgggctcctatatcatgctgttgtccaatcaggctgaggagaaggtaacggagatcgcacataacatgacatatctggaactctccaatgagccgacctatatggatgaatttgtggcatcctgcttccttccgcacacggatgcatccctgtttccgcgactgacttttaagtaaagaaagagctgatcagcgaatttggaaacagtagccaggtggttatagcaatcctctaaaataatgcatcttaatccagcccatcagagtgtgaaatcctgctgaactgtcttaaatgcattgtttacgaggatcgctatagaagaaaggatagaagaatggaaatcgaaaagaacaacaacaaagagctggtgcctcttgagcattatcttgaagagtatgcgaaggcggatccggcagagatcagcagacgaaccggtatgccgtatgatgccgaaaagcatcagtttaccgtgtatttttttggacgcagctacgcggtgggatatccggaatttaccgtacagccgctgaatgaagcgtatgcatttgatgcgctctcaacgatgaatccggcaaagattctggtcgtgcgttttcttcttgagagtgcggcgacacagggaaccggaaaatttcttacttatcgtgaggtgccctggggcgaggtatattaccgtcagtttaacggccgctgtatgctgcggctggcatatggatttggaaataagctggatgcgttcagaaaagcgatggagactatgcatgcagagccggtaaaggcggcggatgtggcatatcaggtggaagtatttccgggctactttgtacagtttcttctgtgggaaggggacgaagaatttgccccgtcttcccagattctgttcagcgataattttccggccggatttcatgcggaggatctcgttgttgtctgcgatgtccttattacgattctgaaaaatctgcaataagcgaatactcagacaggaattcagttctggtatggtaaaacagcaacaaaatttacaatgaattgtgtaagaaaacagaattaagtattgaaattggacagtttttatcatatgatagaggtaaaaggggcaaagactgcccattcgcaaaggaaaagtattccgctgcgggaaaggagaattttcaatgggattcaagacagatattgaaatcgcacaggaaacgacaatgtctccgattacggagattgctgcaaaggcaggtattgatgcaaagtaccttgagcagtacggcaattacaaggcaaagatcgactacaatcttttaagagagacagacaaagaggatggcaagctgatccttgtaacggcgatcaacccgactccggcaggagaaggaaagacgacgacgacggtaggtctggcagatggtatgcagaagcttggtaaaaatgttatggtagcgc

SEQ ID NO: 414 - DNA, 7526 bp, Unknown
  16S sequences of unknown bacteria
ggtgcgcaacaccgaggacgaggacagccctgaaagggctaccgcagtccgaagcccgcgccccgtaggggagcgggccgcagagcgctgttcgcgggcgatggcagccgatcagggtttttcgacagtctaggcagaacgcctttcgtcgctctgcttttttcctttcccaaaatagtttgaaatgggggttgcccttttcgccactactgaatataattcactagtgttcgaacaagaacaaagccgaagggaggatttttcctgaatagtcaatataaaaaaggcgtgctggaactgtgcgtgctggcccttctgcataagggcgactgctacgggtacgaaatttccagccagctggctcagcgtatggagctggccgacggcactgtctaccccatcttgcgcaagctgaaaagcgacgggatgctggacacctacctgcaggaggagagcggcggcccgccccgcaagtattaccgactgacccaactgggacgggaaagctacgccgcccaaaaacaggagtatctgctctttgccgacgcggtacgggatctattggaggaggatcctcatgacgaagaatgaatttctggcttcttttcagaatgaactgcagaagcgtcacatccccgattgggagtacgtggtaagcgaatacgagcagcactttgccctgaaacaggccgacggcttcagcgatgaggaaatcgccgcaaagctgggtgctcccgcggaactggcggcgcagtttgaggcggcggacgaaggcggaaaaacgccctccggccctgcggcccatctgatccgtttcggcgtgggagccatggacgtggtggctgcgctgggcatggtggtgctggcggcatggctggtggtcatggcagcctttacggcggtctgcgccgtggcgggcatatgcctgatcttcgactggaacatcgtcgggctgctgccctccatgccccgcctctgcgcggtgctggccgggctgatgctgttggctctgtgcggcctgagcgccgtgggcacggtgtactatgccgagttcctccgtcagctttgccgcgcctatggccgtcagcggagcaatgcgctggccacagcccggaaccgggcggggctgcctgctctgcccctgcatccccagctgaaaaaggaatgccgtctccgtctgcggtcggcttccgtggtgctggtgatcctctttgtactgttcctcgccgcctgtgtgatcgcatccgccgtcagcgccggttcgctggaattctggcatgtatggggctggtttggatatggagcgtaggtgggaccaaaagccgatttatttaggagagcatcctgagttccgtcatgaactagacattcccccgccaatgcctattgacaccctgcggcctcctctgttatactgcccgtaacaactgaacaccttatgaagagtggttgagggacgggcccgatgaaacccgccaacctgcgcaagcgaggtggcaattcccgcagcgtgcaaacgctggcagataaggtcgtaaatacaatccttctcgcgcccgctttgcagcgggcgtgtttttgtggggaaaacagcccgcgcaccccgttcggttgtcattctttacacccacaaaaacgaaggaggtcattttcatgcgtaccgttttcaccagtgaatccgtcactgaaggacacccggacaagctttgcgaccaaatcagcgatgcggtgctggacgctatcctcgccaaagaccccatggcccgcgtggcctgtgagacctgcgccaccaccggcctggtgcaggtgatgggcgagatcaccacttctacctatgtagccatcgacgaaattgcccggcaggtgatccgggacatcggctacaccagcagcgatctttgcttcgacggcaacagctgcgccgtactgaccgccgttcatgcccaaagtcccgatatcgccatgggcgtggacaacgcgctggaaacccgcggacaggcgggcgaagcttcccacggtgctggcgatcaaggcatgatgttcggctatgcctgtaaccagaccccagaattgatgcccctgcctatctcgctggcccaccggctgacccgccgcctgaccgaggtacggaagaatggaatgctgccttggctccgacccgacggcaaaagtcaggtgacggtagaatatgaggacggcaagcccgtggccgtggacacggtggtcatttccgcccagcatgacgagcaggtcagccgccgggagctggaagacggcattctcaccgaggtcattcacaaggtcattccccagcagttctggaagcaggacaccaaggtatacatcaaccccaccggccgctttgtgcttggcggccccgcgggcgacacgggtctgaccgggcgcaagatcatcgtggacacctacggcggctatgcccgccacggcggcggcgcgttcagcggcaaagacccttccaaggtggaccgctccgcctgctacgccgcccggtatgtggctaaaaatctggtggcggccggtctggcggacgaatgcgaagtggcgttggcttatgccatcggcgtggcacagcccgtcagtgtgcaggtaagcaccttcggcacgggcaagcttccggaggacgagctgggtcgtctggtacggaagcactttgatctaagccccgacggcatcattcgaatgctgaatctccgccgccccatctaccggcagacggctgcctatggtcacttcggccgcacggacattgaccttccttgggagcacacggacaaggcggagcttctgcggcaggatgcggcactgtaatttttttcctttttagaacccttacggaatgtttcacgtgaaacattccgtttttatctggtcaagtgcaagagaaaattttcgatcatcggaacgcatgaatcggtcccagcatagactgaaatgtttcacgtgaaacatttcagcactgacaaatacagtcgcaaacgaaagtcaaattgtttcacgtgaaacatttcgtaaggccacaaaaaccatgcagaataccgccgaaacccgcgtcacgattgcaaccagcggcgttttctggtataataacccggttcctgccttcatttagcaggggtcagtcacgacaaaggaggcttttcatgccaaccgccactttcgatgttgaatccattaaaaacagtatcgtcggcaagctgcagcgctattacggcattaccgtgcccgaggcaacgccccaacagctgtaccgcgccgtcgcttccaccgcccgcgaccaaatcatggatcgctggatggtttcccgcaaaaaacgccatgagcagcatggcaagcgggtctattatctttccgttgaatttttgatgggccgcagcctgaactgcaatctcatcaatctttgcagtcaaaatctttacgccaaggcgctggacgaactgggcatccagctcagcgacgtgctgcccgaggaaccggaacccgcgctgggcaacggcggtctgggccgtttggcagcctgcttcatggacagtctggccagtgaaagcctgcctgccatgggcgcgaccatccgttacgagtacggtctgttccgccagaagatggtggacggtcagcaggtggagctgccggacaactggcttgccaacggcaacgtatgggaaattgccgccaccgaggacacctgccagatccagttcggcggccatgtagaacagtacgaagaaaacggccgggaatgctaccgcaccgtcggggcctacaccatcgacgcggtgccctacgatatgcccattgtcggctataataacgaatgtgtcaacaccctgcgcacatggagcgcccgcagccagcagcgtatcgacctgcgctccttcggcgaaggcgagtacatgaaggccatggaagaaatgcagatggccgaagtgatctccaaggtgctgtaccccgaagataagcactatgaaggcaaaatgctgcggctgaagcagcattacttcttcaccagcgccaccctgcagtacgcgctgaagaatttcaagaagtactatggcaacaactttgacctgctgccggacaagtgcgtcttccacatcaacgacacccatcccggtctggcaattcccgaactgatccgcttgctgatcgatcaggaagggctcgactgggatatggcctgccgcatcaccaagcgttgcatggcctacaccaaccacactgtcatggccgaggcgctggaatgctggcccacggacatgatgcagcagaccctcccccgcatctacatgattctggaggagctgaaccgccgcctgtgcgccgacctgttcgtaagctaccccgaccagtgggagcgcatcggtcacatggccatcatcggctacggtcaggtgcatatggcgaacctgtgcgtggcgatgtgcttcagcgttaacggcgtgagccagctccacggcaaaattctctgcgataccctgttccacgacttttacctgctggataagcagaagttcagcgccatcaccaacggcattacccaccgtcgctggctgttggaggccaacccggcgctgacctcgctcattaccgaggccatcggcgacggcttccgcaccgacgcagagcagctgaccaagctgacgccctttgccgacgacgctgccttccgggaaaagttcgatcaagtcaagaagatcaacaagcaacgcctgcaaaagctagtgaaggatcgtcagggcatcgacatcgacaccgacttcatctttgatacgcaggccaagcggctgcatgagtacaagcgtcagatgctcaacgccctgcacattcaggtgctttacaaccgcatcatggacgaccccaatttcaccatgccgccccggttgttcctctttggcgccaaggccgccccgggttatatgcgggccaagctcattatccgctacatcaatgcgctggccaagctgatcgacgcatctccccgggcccgaaagatgatcaagatcgtctacattgagaactacgacgtatccaccgccgaggtgctcattcccgccaccgagatcagcgagcagctttccacggcgggcaaggaggccagcggcaccggcaacatgaagttcatgatgaacggcgcgctgaccatcggcaccatggacggcgccaacgtggaaatttacgatcaggtgggacaggacaacatctacattttcggaatgcgttccgacgcggtggagcggctctatcaggagggcaactacaaccccatgagcatcttcgaaaccaatcaggagctgcacaaggccatcagtcagtgggtggacggcactctcttcccccacgagccgctggcgctgcaggatctctaccacaccctgctggcgggcgactggggcaccatggccgacccctatctggtgctgaaggacttcggctcctacagcatggccaaccgccgcatgatgaccgactatcaggatcgggaaaagtggctgcgtatggccattaccaacaccgcatcctccggctatttctcctccgaccgcaccatccgcgagtacaacgaaaaaatctggcacatcaagccggtgctgtaacgttcccaaacaaaacaaatccccgcaggaaaagccctgcggggattcttctattccagccggtacacatccagcccgtcgatcaagccctgataacgaaaacctttccgtaccgcaatgcgtttcgttgcctgctgctggggagcgcattcgatcaccagctgcctgcgttcctgtctggctctttgaatcagcagatcagtcagggcagacgcatagccatgcccccaatattcgggcagcagcacccagccgatctccctgcttttctcatcataagggtgatcgatcacataaccgatgggcacgccctgttcttcggcggcatagatcaggggactttctgacaatcccgcacagaacaggaatgtttccgcctgctccctgctgtagggcggttccagccagcgcatgacctccgggtcggacaaaagacgataaagccagcccaagtcctctttcctcattctgcgaatcgacagatccatatggaacctcccggaagcgttttgcccattgtaacggttcgtcagggaaaaagcaaccttcccgctccaaatccgcgaaaaaaagcgattttccgcttctcctgcaaaggggctttctcttatctttcatttgtgctatactgagcgtgagcaagaatcgttcgtccgggatacaagccgggactatttgccaaagaacagcacagggaaaggcagcaagggaaatgatacaacgcaccgcctgcctgattgcgcgtggaaacgatgtgtttcgcaatctggcgatcgagaaacatttgatggacaccctgcccgaaaacacggccattctctttttgtcccagaaccgccacgccgtggtagtgggacggaatcagaacccgtggtacgagtgcaaggtagaggcctttctggaatcgggcggcaagatcgtccgtcgactgtcggggggcggagccagctatcaggacatgggtacattgaatttcagcctgatcctgccgaaaagcgagttcaatgccggccgacagctgcacctgatcggcgaagccctgtcgtccgttggggtcccgtgggaaatgggccccatgggcagtctgcgcttaggcggacgcaccttctgccagaatgatttctacaaggccggttccgttgccatgcatcacggtacgctgctgtataacacggcgctggacatgatggagcactatttccgcacccggcgcaaggacccgtccctgcaggatgagactccaatccagaaccgcatggtcactctgcgggagctgaacccgaacctgacgctggacaggctggaacgggcgctggtcgcggcctttgcccgctgcttccgcgcccaacccgcatggctggatgagcagctgctggacggatccagcattgaccggctgacctcccgtttttctcacccggaatggacctaccccgctcaggaaaactatgacttcgaggtgtctgagcggttcccgtggggcagtgtgaccgttctgctgcgccgggaaggcggcatgatccgggcggcgaagattttctccgacgccatggaagccgggcttttcccgcccattgaagaagggctgatcggctgtcccttcctgatcggggccatcggcaaaaggttcgatcaaaagctggccatgcttcgggacccccggctgatccagattgccggggacgtgtgtacgctgatctgcggacgcatccgcgcgcaggaccgcagcggcgcgggcgcgtaacagaaaacaggcacaaaaaggcgcgggaatggccgcgcctcaaattgctgaaaaagtggaggtgcaggaggcactgctgccactcaatcgtcgcagggactactgccgtagtccctgctcgtttcgtgtcacacctgcgggtcgctaaccgcctacggcggttgtgccca

SEQ ID NO: 415 - DNA, 8155 bp, Unknown
  16S sequences of unknown bacteria
tgggggtatagctcagctgggagagcgcttgaatggcattcaagaggtcagcggttcgatcccgcttatctccaccatatcaagggaaagaacttttcctcgcttccgaaaggaagcgaggttttgttttcatgcggcgatttctacgatgtccagtcccaggctgaactgcgtaaaatcaatgttgaaatcaatgtgcagcttatagccccgatagacctccacccggcggatcaggcagttgacgatcattttctttgcctccaggctggccgtgtcgtaaagatctgcccaggagattacattgtcgtactgctcctccagggagtgcaaaacggtctgcccttcctcataggcggcttgtgcgtcctcaaactgcttttgtagttcggtgcatttggcctcagcctcggacaccatagagcctagcaggtctttggaaaaggtgctttcccctcgcagagccttgatgacttccgctttgagcatatccagttcatcggctgccttggtgtagtcgacccgaatggagcggagcagattttttcgttcttccatcttttcccgatagcgagcgttgacaatctcgcttttcgggattgccttcatgcgctcaaagatttgccgcaccagcttgtcgatgatcctgtccaggatatgtgccgtgtagcccgtctgcccgtcgcagtcagtctgcttgcgggttttgccatagcagatgtaccgcacccgcttgattacccggtggggatcttctttacagggataggccttgccgctggtggtgaggttgagccgggcaccacaatggccgcagtacacattcccggacaagagcgactggcccgcgatgttgcggggaacggtacgctccgtttcattggcccggttagtacgaatccgctgggcctcctcaaacagttccggctctatgatttgcaggtggggcagcaccggggagcggctttccccgctgcggagtacgccggtataggtcaggttacagaggatgccccggatggtggcgtggtgccacatcttgccgctccgggcccggtagccctggttattcaggtgggtggcgattcgctgggccccatagccctcatgcacatacttgtcaaagacaatgcggacaacggcggcctcggtttcattgagagccagctcgtagacctcatgcttgcgcttattcacgcgcccgcttttcacaaggtcatagccatagggggcgacgccgcccttaaagcctccatcctccacaagctgccccagggcagttttggtacgtatggaggttttttcgctttcaccgtccgcttgccagaaccggatgtagttggtgagtttgtcggtgtggttgtcaaaccgctgctcgccctcctgggtgctccagacccggacgccgttcttgacgaaccattccaccacaaagggcgtttcatccgcgatccgcccgatgcggtcaaacatgaacaccagcagaatatcaaacttgccctgccgagcccgttccttgatgatttgcagcttgtcccggttttccgcccgtaccttgtgaccggaaacgccgtcctcctgttcctcgtgaacaattgtccagcccattttctcacaaaaggcgtggcaggctttccgctgcatgggaatgtcggcctggtttttatcgttgtgatccacctgcttatcggtagacacccggtataaacaatcaacgcgagtgccagttatcatttgattttccatgtataagccatcctttcaaatgtcatttaggcaggtgaaaagaggctttttgtacgcaggatttttgaacttgtcaaggtgcatagggactacccccaccattattatccctctgttccgagggcttgacaaggatgactccgggccggggggatgaggtctgcgccacaaaggacgaaagcaaaatctgcttgacctgcccgatggccgctgtgttttgtgactctgcaaaggtggcggatatttcaaacccatcaatggcaaaaacggcatttgcttttggcatatacggcctcctctctcatggacggactgacataaacaaactccccgttgtcccgtggggcaaggaacagggccagcaccgtttccgatgctggccctgttccttgcctcacttctggacaaagtgtccataggtctaaagatggggccgccgcgctcatttccttggcctgtcgttagacagcaatactcggcgcaacggccccgcgcaaaggggcggcggcccggacggtcaggtggccagcctgacccggcggatcgtggccgtgggatggcctgtcccacttgcggcgctggtgtcagacacccgccgctaagctccccacgctatatcggggccccggtgtccatttgcggagaggaacctcctctcatatacccccagaaaaaaggggccaaatggagatggcaattagaaattttcctgcaaatattttttcatctgcttgataccgctctctaccgagtgccggacggcgcttttgtctacgccctcttcgcgggcgatctgacggtagcttttgcccagaatcaaataggcgtccacgcggcgcccctggatctccggcagagaattgagggcgttccacagacgaaagaacaactccttgcgatccatgagttcctgggggctgggctcgtgcaggcaggcggaatattcgatcccatcgtcacaatccagggaataataagccttgttgtagcgcgcccgttccgtatgggcggcttcgcgccgcctgctggccatgagctcctcggccacttcgtcagaaacctctgtgtattcatcgtgggtgtaccacgggtaaaagtctttcagattgatggtcgtcatttgtaattcctccgttcagatggttagggggtgaatggcaatctgaacgggggaaggtggagagcggcatcgaaactcaactcgtttcttttttcttgatatgaatcgcagtacactttgttttccgtaccgaacttctatgcaacattgaaattcacattcgacaactcagaaaaccaaagtggcctgggattcatcgaaacctcccttcaccaaacaaatgaattgtaatacctaaaaaaggcgcactgtgatgaatttagtcagaaaagagtgtattgtaaaatatttttgaggtgaattacaatgcaatcttattctaggcctttaggcgacgcagtaaagcgtgcgcgagctgaacttggtttcacccagaatcaagttgcagaagcggcagatattgatgtgcgtacagtactgaacatagagaactataaaggcaatcctaaaatggaagtgctcttccctcttgtacgtgtgttgaaaatggactctagagagattttctatccagaaatgcgtcgtgaaagtccagcaattcgccggttgcgcttcttgatagaagaatgtagcgaagaagaagcagaggctttagcacctgcgatagagtctattctgtctgtattgagatcaaaaacagctgctacggttggctaatcataaaaaagagagcctgcgtcccttatattggggaagcaggctcttcatgcctaagtgtcaggctctttgtttactaccattttcagttgtacgacatctaccctgatttcctttttacatttagggcagtaaagggggaatttcacaaggacagtatctgcatatatttttgttcgtgtctttccaccacaaattgggcagcaaacccacagtgagccttgttgatcgttttttactggttctattccgtcgtgtctctgcgttaatcggcgggatctatcagacgaaatatacataccctcaaaaggtcagttggcttcaagcgagatttgatgatttccgtatttcacatagtctacctgagacagatccaacggagcggcgaacacataatactccatgccttccatacccgcagtctcactaatagctactgtggagccgtcctttaagacaacttccaagggaccgacatacggaacaatgcggttgttgttaggttctgtagcggagtaactgaaagtaaggctcaaaggcgaaagagttaggttctccagcgtactggtatatccgtattcttcatccgtccaggtcaggccagccgtatccagcgagagtatctcggtatcattataaagggtaatgtcgaaggaaaactctccactcagaatttgagtatattccttttcgggagtctgaagccatagcccatgaagggtaagctgcttggacacctcgtcattgaaacggacatcggttccggtttgagctccaatccagataacaacttctttcaaattatcctggggattttcatcagggagccaatcacatttgaggatgtaaccactatcggaataggcaccatcctcaaaggtaagctccaatgcttcaccaggcccaaaaagctggtagcatccatctgtcttgctatcataatcgggtagaatcatatcttccggtgccttgatctggagacggagatagtaaacgttttcgtcggccagagctgcaataggtgtaatggttgtgccgttgctggttacaccattctcaaaagtctttcccatctggtcaatgacctgaatctggccatccgaaagagagccattcttttcagcaaagaaattctgaagcagcgctcccgcaccgagtacatgaccaactgccaacgcagaaacagtaagtgtagaaatgattgctgcaaccgccaaaaaacgaagtggacggacgtgtttccgcggtttattcattgatactttattcatagttaactccttaatccgtgacgaggagtaaggagtagtaatgcccaaatccaaaccctctaccgggtatgaatccagcaaatcggaaatattacgcttcattaacaaatcccttcctcgtcagtatttcttttagttttgcgcgacctcttctaagcctggttttgatggttgattcattgattgccatgctaagggagatctcttgaatcgtttgagcgtagtaataatatcgtaaaaaaatctcttgatcttgttctggcaacgattggattgctttacgaacgagctgttgctcctcggcctgctcaacatcattcagcggatcattggggccgggaatatcaagaaaatcatcttctagtggaagagtttttcccatcttccgtaacttgttttttgctttatttctcgcaacggcagcaagccacccttttacaaaacccggtttcaattcggatgattgctgccatgcagccagaaatacatctgatacgacctcctctccgtcctcctgggacatagcaccgcgaagaatattccataccacagtagaaacataaggtatgtaaatatccataagtgattctagcccagacggatcaccggtttgcattttatgcaatatggcatcttctctcataagaaaggctcctaactgtctttgaaagctgctttcgcttataatatcacaccattttgatgctaggtttcaaaaatttttgcttttgacggctactgaaatcggtagcagttttgggaatattcatcgatgaatttgagatattgttcacggctcgtaatttctaacggtagtccgttttccgtagtatgaaatgatacaatgtgattttcctcgtcaatccatacgcgccatgattcgcacagatctttttctacttccattcagtatccctccatctaccatggttgcttaagaaaattctttataaagttgattgttgcaataaggacagaatttgttttatatcgcctcgcatcactaatatcacataaaaactgtgcgtagtttcaaaaattaaaaaggaaatatatggaatatatagcgcgtgtggcattgcaattttggcaagcaattcgggtgtggccacactccgaaattttcacaggccgcaggcccgtgaaaatgcttgttggggagctccccaaacccgctgaacttctggacactttgtccagaagtcccggcgcaagcgcctgttgtcggtggcccggcgctaacgctcctgggccttatttttttgctcgtccgcgtggccgagcaggtgatcgatattcgccttgactgctacggcctgccgcatatccgcctgggccttgcggtattccgcataaagggcctttttcttttcggagagttcccggtgctcctttttcagcgtgtccattttagggagctttgccccgcccaaaagctcactcatggccacctttgccatccggtagtctgccagctccgcctcgtgctgggccagatattttctgctataccgggccgctttgtagccgtcaaacacgggccgcgtctttgcgtactgcaccaccgcgcccatgagctcggagtttttggaaagggtggcctccgtgtcccgcagctcctcggccagcttgtgagcccgatccaccgccgcctcggtgcttgccacaagagcctcgtaatcggcaagcccatgctcccggagatacaggagtgcggcggccatctgctttatgttatagactttggcccaccgctcataggccgggcccttgccctgggccatgcgttcttgaatgtcgatgatcagattgacgcgccgggctggggctgggctatcctgggggagctctgggatgggccgctccccggcaattgccgcccggatgtcatcgggatcgaaacctgggcccagggtggatgcccgcaggcgggtgtacttatcctgccccggcacaaggaacgagattgcaccgccccgcccctgcttcacttgaaagccggactcctccatgagtcgcagaaacgccgggaagtcggcgggcttttgctccagagccgccacgatccccagccgcacccgctgcctgctgggccgagggcggcttttctccgatccattgtccatagtggagaaagcggcccttgctgtgctgcttcggattttgaatgacagacagctcgtgctcaatgcacacccggtcagaaagccgccgcaccgcaaagctggagccaatgaagttatggaatttccgggaacagtcctgggcggtggagttgtaatagatgtggttgtgaatgtggcccttgtcaatgtgggtacagacaaagaactgatacttgccctttgtccagcgcatggctgtttcatagccgattttgtttgcctcctccggcgtgacctcaccgggcgggaacgcctgccggatctgaaagaacagggccccgcgctccacggcccggcccgtttccgcctggtactggcttttcagcagcaggaactcagcgggggcggatgccggatcacagagataggcagacacggcccccagctttttcggattgagcccataggcaaaccgctcctccatcgtctggatggccgttttcccagcggctaccttatagggccggatgtaggttgtagcgatagccgcacctcctttcccagcagaaaaaacgggcggcggtctgttccacccgccgcccggaacttctggacaaagcgtccagaagtatcagcttgccataaagtccatcgccgcatactttacaccatacaggcgctccaccagccagccgcccagggccgggagcccaaagggggaaaccaggaacgccagcaccagcatggcgatacacccggtatgcagccctgcaaaaaaggcgcaggccgccagcaggacgaaaaccgtacacgccagccagcacaccgcccccgctatgcaggagaggaacgagagcaccgccacagtgagcatcagcgccagaacaaagggggctgcgataatttttatgattgtccgcatcgttcatacctcctacaaaagttcgttatttgcctctatatgtatattataactccgcaggagagggccaacaaggatgcctccaagcccttataaagcaaagagaatatttgacgtgaacccagaaaaatggtaaaattatcttaatatagtttataaggggtgattgttcatggcaaagaaaaagatctttgtttcttttgattttgaaaaagataggcattacaaatacgctttaaatatgtgggataaaaatcctgaatttgagtttacttgtgacgatagatctccaagtgaaattcaaacggatagtgtagctgctgtctcttataca

SEQ ID NO: 416 - DNA, 32759 bp, Unknown
  16S sequences of unknown bacteria
tttgggttagacccataattaggggctaaccctgtaacttaactaaatgacattgttacctgaacagtaacgcaaaagcatgtaaatatttgccatttttccttctttacaacacttttttaacagagtattgtataatttgaatgaaataatttttatgaggtaattttatgtgtgaaaatggaaaaaagaaatccgagcctatgaaactttttctgtaaaataacctaagtaaggtccttctatgatacaataaatatcattaggagggccttttactatggcaaaacaaaagaaacctgttcacagagttgaaatgactgaaggaaaaaggaacatcatccgccagcttctcgaagaatacgatatcgagaccgcagaagatatccaggatgcactcaaagatcttctgggcggcacgattaaagaaatgatggaggctgaaatggatgaccatcttggatatgagaaatcccagcgttctgacaatgacgattatcgtaacggttataaacgcaagcaggtaaacagccgatatggctctatggaaatcgaggtcccacaggatcggaaatcgacctttgaaccacaggtggtgaaaaagcgtcagaaagatatttctgatatcgatcagaagatcatctctatgtatgccaaaggaatgaccactcgtcagatctcggaaacgattgaagatatctatggttttgaaacatcagaaagtttcatatccgatgtgacggataagatacttcctcagattgaagactggcagaaccgcccattggatgaggtatatccaatcctttacatcgatgcgatccactattctgtgcgggataatggagtcattcgtaagcttgcagcctatgttattcttggcattaatgcggaggggaaaaaggaagtcctgacgattacgattggtgacaatgaaagtgcgaaatactggctgtcagtcctgaacgaactgaaaaatcgcggagtaaaagatatcctgatcatctgtgccgatggccttacaggcattaaagaagcgatttcagctgcgtttcccaaaacagaataccagaggtgtattgtccatcaggtaagaaacaccctgaaatacgttccggacaaggacagaaaagcctttgctgcagatttaaaaaccatctatcaggccgctgatgagcagaaggctctggctgccttggaacgtgtaactgaaaaatggactccgaaatacccgaattccatgaaacgctggaaagacaactgggatgctgtttctccaatttttaaattttcaaccactgtccggaaggtcatttatacaaccaatgcgatcgaatcactgaactccacataccggaagctgaaccgtcagagaagcgtatttccaagcgataccgccctgttaaaggccttgtatctggctacttttgaggctacgaaaaaatggactaccaccatccgtgattgggctcaggtttatggagaactgagcattatgtacgaaggacgcttacccgagtaagcaaaagaagggttaagaagacaggcgggaaaccgcctgctcttgacatacccgtaagcaactgttatatataaaacaagaacgacaagcctgattcacaagcttatcgcttttaattatcatagaagaatcttatttacagagattttctcatactctcagaaatccaattctattgagatgaccacaggctctctctggaaaaatatactcctcttcagccttccccttatgggttcgcaggtactggaggttctttttaacttaagcgatgttgccgttgttggacggtttgcagattacatggcactgggtgctgtcggttccacaactttgctggttacgctgtttaccggaatcctcattggaatgggagccggtgttaacgtacgcgtagctcacgaactgggagccggaaataagagagggacagaagaaacgatccatacttctctttttttgtgtgcgctcacaggattgcttgtctgcgccatctgccttctgttttccgggcggatgctatccatgataaacacaaagccagaacttattgatcaggctgttttatatatgaagatttattctttgggaatgcccgcaatggccgtatacaattttggaaatggcgtattaagtgccagaggcgacacgaaacgcccgttgatttacctttctattgcaggtgtgatcaacgttcttctgaatctgtttttcgttattgcctgccatatggcagccgcaggtgttgcaacagccagcgcgatttctctgtatgtctctgcatctctggtgatgattcatctcaccagaagaaccgatgactgcaaagtgtctctgtacaaaatccgcctgcatcccagggcctgcaaagcagttctcatgcttggtatccctgcaggtcttcagaacggaatttttgccattgcaaatctgtttgtgcagacgggtgtcaattcttttgacgcagtgatggtttccggaaatgcagctgccacaaatgctgactccctgatctataacgtcatgttttctttttatactgcatgtgcaagctttatcggccagaattggggtgccggaaataaaaaacgaatgctgaaatcttatggagtcagccttacctatgccttcatctcaggtgcgatcctgggtggactgctccttgtatttgaccggcagtttctttctctgttcgctacggaaccggcagttattgatgccggtatgcagagaatccatatcatgggattcagctatgcatttagctgttttatggacggtagcatcgccgcatcccgaggtatcggaaaaagcattccgccagccatcatcgttatccttggttcctgcatattccgtattgtctggatttatacagtatttgcacacttccagacgatttcatccctgtatcttctgtatattttttcatggggaattacaggatttgcagaaactttgttctttgctggaagctttaagaaaatacaggtcgggaaataaccgctgccaaccagtttgtttccgtcataggacgatagtaaatgctaccgtacagtgatgggaacaaaaacgagaattcctttcctgctgttgattacaaaaagcgaattaaaagatcataaagttattgagccagaaaaattttcatggtatcatgaaaccatatttggaaatgatggtgccaaagaattttttacttagaaagcaggtgtaatattgggaagctatctgaatcctggaagtgcagcgttttgcaatagtttaaggtctaaaatttacgtggataagagcgccctgattgccagaataaacgaattaatctgtacggagcagagatttgtatgcgttagccgaccaagaaggtttggcaagtcgatggctgccaatatgctggcggcatattatgaaagggaagaggatgcttccgggctgtttgaccatctgcagattcacgaatacgaaagctacagggagcatatcaacaactacaatgtaataaaaattaacatgcaggaatttctcagtgtcaccaacagtgtagatgagatgctggtgaggttaagaaaatacgtgctttttgatttactggatgcttatccggatctgcgtttcagagatccagatgatctgatccaggtgatgaaggacattttttcaaaaacaaagtgtccgtttgtgattctgattgatgagtgggattgtctttttcgtgaatataagcaggataaagatgcccagaagcgatatcttgactttttaagagtgtggctgaaggatcaggattacgtggcgctggcctatatgacaggaatcctgccaattaaaaaatacggctctcattctgcgctgaatatgtttacagagtattccatgacaaatccaagggaaatggctgaattttttggctttacagagaatgaagtcagagcactgtgcaatcagtataaaagaagttttgaggaaacgagagcctggtacgatgggtatgaactggtaacattggatggagaccagaagaaaaattatgcaatgtacagtccaaaatcagtagtggatgccatgctgagcggtgtgtttgacaattactggaatcagacggagacgtatgaagcgctcaaaacttatatccgtttaaattatgatgggctgaaagatgcaattgtaaaaatgctggccggagataaagtgcagattaatacgggaaccttttcaaatgatatgaccacatttcagggaaaggacgatgtgctgacgctgctggttcatctgggatatctgagctatcactggccggataaaacagtgtatattccgaataaagaggtttcgcaggaatacataaatgcaatcagtacgatggaatggcatgaggtgattgattctgtagagaattccagaaaattgctggaagctttatgggcgctggacagtgaaacggttgcaaaaggaatcggccgtgtgcacagggaaatttctgttttgcagtataatgacgaaaattctctgagctgtaccattaatcttgcattctattttgccagggaatactatacgattattcgtgaattgccggcaggaaaaggttttgccgatatttgtttcctgccgagaaagcttcatcaggacaagccggccgcaataattgaactgaaatgggacaaaagtgcgaaaggagccattgaccagatcagaaaccgccagtatggagaggcgttaagcgattatcagggagaacttctgctggttggaatcaattatgacaaaaagacaaaaatgcatgactgtgtgattgaaaaatatcggaaaaactgctagcagacaggagagcgaattgtgaagatctgctttgctccaggattccacacttttgccttccattcgcatatgatacatcagaacggatcagaacttgagaaaccgttcggtgggaggtggatggtgtggaacctttactggagctaaaacgcgtgagttatgcttatcacacaaaaaatggcgagacgtatgcattgtcagatttatcgtttcaggtacaaagcggcgaatttatagcaatagttggaccaagcggttgtggaaaatccacgctgctttctttaatttcagggcttttgcgagcagagagcggggctattttactgaatggaaaagaggcggagacatttcagaaaaatatcggatatatgctgcagaaagaccatctttttgagtggcggagcatttaccgaaatgtaattctcgggcttgaaattcaggggcgattggatgaaaaatctaaagaaagagttgaaaatatgttggcggattatgggctggcgcggtttcgtgatgcgcgtccgtcacagctttccggggggatgcggcagagggcggcactgatccggacgctggcgccggacccggaacttctgctgttggatgaaccgttttctgcactggattttcagacgcggctgtcggtctgtgatgatgtgtgggcaatcctgcgaagagaaaaaaagacagcgattctcgtgacccatgatctctcggaagcggtgagcatggcagaccgcgtactggtgctgacaaagcgtccggccacgatctgtgccgatatccgcattcagtttgaaaaagaaaatgtcacgccgtttgagcggcgaagcgagccggaatttaaggattattttaatgagatctggaaggagctgaatctgcatggatgagagaaaaatatcacagaggcagcagcattatctgcagatgctgcgcaggcggcagcgccggatcactgtagttcaaatcctgatctttgtgctctttcttgtcatctgggagagtgccgtgcggctttcgtggatcgatggttttattttcagcagtccgtcgcgggtcgtgaaaacgtttgtgggtatgtgcgaggatggaagcattgtggcgcatactatgagtacgctgcttgagacaatcgtcagttttctgtttgtggctgtgaccggaacgggacttgcagttgcgttgtggtattttacggagctttctgagattctggagccgtatctcgtcgtgctcaacagtctgccaaaatctgcgcttgcaccgcttttgatcgtctggcttggtgcaaatcagaaatcgatcattgtctctggtatgtcagtggcaatcttcggaacggtgctcaatctttttaccggttttcaggaagtggatccggataaaatccgcctgatttatacatttggcggaacgaagcgaaatgtgctgacgaaagtggtgcttccgggaacgctgccgcttttactcagtgtaatgaaggtcaatatcgggctctgtctggtcggcgttgtgatcggagaatttatcggggcaagacaggggcttggctatctgatcatttacggaagtcaggtcttccggctggatcatgtgattatgtcgatctgcgtgctgtgcgtgattgcggtgctgctgtatcggattcttgggattgcggagaaagtctgccgcaggcggagctgaggtcaaagcagatatgcgtaatccgcttcgctgcttgttcataaccgagcagctgctcggttatgaaatatttaaacacgttctaatggaaagcagaaaagcttttgtaatattacaactgaaaatggatatgttttacctgaattttacaaaaaattcaggataaccagatagaaaaaagcggtgcgtgcgatagaatgaaggggtgactgaaggagaagatagattatagcagcctaaagtgcaaagagaaaaaatattacaaaaagaaaagtggacagaaagtaattttccagattaaaggatcgagtgaaaaggcgagcatgtattggatggagttacagaaaacaggaagcagtggatgactttcctgtgccatgagtgggcaaaatacgaaagagaatggttctataaaatggtacaaatatctgctttcatctaaagaagagtaggctgcagaaagaggaaaaagaacaaagatgagcaaactgcaatacgaagacattcgaaaatcagaggaagtgaatgcatatctggcacagggaaacgagatgctgggtgtgcttggctataccgaccattctgcaaaacatgcgcagatcgtggcggatacggcagggaaaatattgaaggagcttgacgcgccgaagcggcaggtcgagcttgcacagatcgccgggtatatgcatgacatcgggaattgcgtaaaccggacggatcacgcgcataatggagcgattcttgcaagaagtatcctgaaagatatgggcatggaagtgaaggagatcgcagcagtgatgaatgcaatcggatcacacgatgaaaaaacaggctgtgcgacggacccgatctcagcagcactgatccttgcggataagacagacgtgagaagaaaccgcgtgcgcaacaagagcaaatcaagctttgataaacatgatcgtgtaaactatgcggtgacagcttcaaagcttcgcattctgccagagaaaaatacgatcctttttgaaatttgtctggacgaatcgatttgcgcattaattgattattttgagattttcatgcagcggatgatgatgtgccggcgcgcagcggaggtactgggcatgaaattcaagatgacggcaaacgggaaaaaggtgtgctgaaaatagaggtgtcctgccaaggggcatctttatttttaccgtaaaaaggaattggtgagatcaaaaggaaactcgcggttcattttaatttttgcttaatttgattaaaagttaggatagattttaaaatgctaatatggtatgctgatgattacaaagaatcataacggcaaggttttcaaatgaagaagggagaggttatgaaatgaaaagaaacaggagaaaacagtttggaattcttttgctggcagtcgttttattgtttggcagtgcattgccagcggctgcggcgagccaggatgtgacccagaaatacaggagtccagtcgcgcggatgtgtcggcatttggacagttatctgggctatggatgcggaagaaatgcggtatttaaatatgacatctatgcaaagacgacgatggtttactttatgaatctgacttacatatatagaaagacgataaaacaggcaaatagaatgtgcgcatcagatatgaaaacctactttggcacaacaaaaacagctctgaaaaaatttgccggatatactttcccaagaaatccgtcttacttacttagaaaccgaaacggaaaagtggaatatattggtggaaactggggagatgaggctccgaagggaagagttacaaaagtattgaaaactggttccaataagtatgaagcgctttatgatatttattactatgattattatgagcatagaacactttcttatatgggaacttacaaaatatatctgaaaaaggtcagaaataaatatggttttacgattacaaacatgaagcgaaccaaaacaaataatgtgtggatatagaaaatttctaataaaaaaaggcaacgatagtcagaaaaacacaggaaggtctcttcgatgataaacagtcatccgaaaggcctttcttatattttccgaaaacgtttcagcggtagcgcattcacttactggactttcttcccttcagactatataatgtaaagcaaaaaacgatcttgttttttatttcagagccaaaactatttcaggtgctcagaaacaaaaacaggagtttgaggaataaatgatgtcagaacaaaaacgaaactatcaaaaagaaatggaacgcctgctggcctccaacccgtctccggtgccgacacttttgctgcacagctgctgtgcgccgtgcagcagttatgtgctggagtatctttcacagtattttgaaattacggtgctttattataatccgaatatttacccggaggaagaatatttcaagcgggtaaaggagcaaagccgcctgatcgagacaaagaatcaggagggaacgggatatccgatccattttcgggaaggaacattcgaaccacgggaattttatgaggcagtacgcggcctggaacagattccggagggcggcgagcgatgttttgcctgcttccgcctgaggctttcgtgcgcggcacaggcggcaaggaaaggaaacttttcttattttacgacaacgctcacgatcagtccgatgaaaaatgcgcagaagctgaatgagatcggagaggaacttgcagaaaaatatggtgtacattggctgccgtctgatttcaagaagaaaaatggctataaacgatcggtggagctttccgcgcagtatgggctgtaccgccaggactactgtggctgcgttttttcaaagagggagagggaagcacagaaggcagaaagaaaattatagaaatggactgaagggataacttacagcaggtgattaactggacgaaaaaatggattgtgaatattgaaaacagggatatttttgagactgcgatctcgctgcgcaggaaattgcatttcccttgcaagcacggcaaagctgtggtaaactaaagcgcaaaagcgcttctgccagaacagatgatatatactccaaaccggcagaagcggtgaatcaacagaaaagaggacagaatatggcacagttatggggcggtcgtttcacgaaggaaaccgaccagatggtatatgatttcaatgcgtcgatcacatttgacaagcggttgtataagcaggatatcgaaggcagcatggcacatgtaaagatgctcgcaaagcagcagattctgacggagcaggagcgggatgagattctgaaaggactcaccggcattctgcgtgatgtggaaaatggaacgcttgcaattacgacagagtatgaagatatccacagcttcgtggaggcaaatctgattgaccggatcggcgatgtcggcaaaaagctgcataccggacgcagcagaaacgaccaggtggcacttgatatgcggctttacgtgcgcgaagaggtgctttatacggaccagcttgtgtacggacttttaaaagtgctgcagcgcatcatggaggagaacatcgatacgtttatgccgggctttacacatctgcagaaagcacagccggtgacgctggcacatcatatcggtgcttattttgaaatgtttcgtcgtgaccgttccagactgaaggacatttatgagcgaatgaattactgtcctcttggcgccggtgcgctggcaggtacgacctatccgcttgaccgtgattacacggcgcagctgctcggctttgcaggtccgacgagaaacagcatggattccgtgtcggaccgcgattatgtgatcgaatatctgtcggcgctggcaacgatcatgatgcatctgagccgtttttcggaggaggtcatcatctggaacacgaacgagtaccgatttgtggagatcgatgatgcttacagcaccggcagcagcatcatgccgcagaaaaagaatccggatatcgcagagctggtaagaggaaaaacaggtcgtgtttacggagcactgatgagcatgctcacaacgatgaagggacttccgcttgcgtacaataaggatatgcaggaggacaaagagggcgtatttgatgcaattgatactaccacaatgtgtctgacgctgtttacaggcatgatggacacgatcgtattcaataaagatgtgatggaagcttccgcaaagaacggctttacaaacgcaactgacgtggcagattatctcgtaaaccacggcgtgccgttccgtgacgcgcacagcatttccggccgccttgtacttcgctgtatcgcagaaaacaaggctctcgatgatctgacgctggatgagtataaggaagaatgcccggcttttgaggcagatatctacggtgcgatcagcatgaagacgtgtgtggagcgccgcctgacgctcggagcaccgggcgaggccgtgatgcgccaggtgattgcggagaataaagcatatctggagcgtgaagcgccgtcctgcgatcagaagtaaaacagatgttgttttagtatgtgaaaagcaaagttgatatgcgcagtatttgatttagtacttgacatgaacagaaaagaagtatatcttattaaaagacaaatgtacgtcgtacgaaaacaaagacgtgcatctgcaccggaaaagccaaagaacatttcgtaaaatcagagtattttatttgcggaagagggggagctgtaccgggactgaccaaagcggccagccgaaaattacaagtgaggagattgaaaaaatggatcagaaactgagagtcggtatcttaggcgcaacaggaatggtaggacagagatttatttcactgcttgaaaatcatccgtggtttgaggttgtcactgtagcagcgagcgcaagaagcgcaggcaagacatatgaggaagccgttggcggaagatggaaaatgacgactccgatgccggaagctgtcaagaagctggttgtaatgaacgtaaatgaagtagaaaaagtggcatctaccgttgattttgtattttccgctgtggatatgacgaaggatgagatccgtgcgatcgaagaggaatatgctaagacggagacaccggttgtatccaataacagtgcacatcgctggactccggatgtaccgatggtagttccggagattaacccggagcattttgcagtcattgaggatcagaagaagcgccttggcacgaaaaagggatttattgcagtaaagccgaactgttccatccagagttatacaccggcacttgcagcatggaaagaatttgagccgtatgaagtagttgccacaacgtatcaggcaatctccggagcaggaaagacatttaaggactggccggaaatggttgaaaatatcatcccgtacatcggcggagaggaagagaagagcgaaaaagagcctttgcgtgtgctgggcaaggttgcggatggcgtgatcaaaccggcagatgaaccgaagattacctgccagtgcatccgtgtaccggtgcttaacggtcatacagcagctgttttcgtaaaattccgcaaaaaaccgacgaaagagcagctgatcgaaaagctggagagcttccgcggacttccacaggagctggatctgccgagtgcaccgaaacagttcattcgttacatgcaggaggataaccgtccgcaggtaacgctggatgttgattacgagaagggcatgggtgtttcaatcggacgtcttcgtgaggattccatttatgatttcaaattcgtaggtctttctcacaatacagtcagaggagcagcaggcggagcagtgctttgcgcagagacactgactgcaaaaggttatattcagcacaaataagttccgtaaaatagttgcaaaaaagttttttgataacgtataataggactgtcgcggtcttggatcgcggcagttctgtcgtttttaaccgaatcaagtaagtcccctgcttcaattgatgggaagcggattgcgaatgtccattttacttttaaaaaaatgtaaaaatagtatgtgatgagttgacagaatcttaaaaatgtggttagatgaatacccaaagaggacacatgttcgaacaatcgaacattcagaggcgaagccgtgtggtgcgaaggggagaatacgcaccggaggcacagccaaataacagtccttatggcagacaaaaggaacagatcaggaggaaacggatggcaaaatcactgtttattgcggagaaaccgagtgttgctcaggaattcgcaaaagcattaaaagaaaagatgagtcgtggggatgggtttctggaatcagattcctatgtggtgacctggtgtgtcggccatcttgtgaccatgagttatccggaggtttatgatccgaaatataagcggtggagtcttgctacacttccgtttcttccggaaacgtttctttacgaagtgatcccgggagtgaaaaagcaatttcagatcgtcagcagattattgaaccgaaaggatgtatcctgtatttatgtctgtacggactcagggcgggagggagaatatatttaccgcctggtggagcagatggcaggtgtgaaaggcaaagagcgaaagcgtgtctggattgattcccagacagaagaagagatccaccggggtattgcggaagcgaaggatctttcggagtatgatcatctttcggatgcagcgtacctgcgggcaaaggaagactacctgatggggattaatttctcacggcttttgaccttaaaatatggaaatacgatctcaaattatcttgggacgaagtatgcggtcatttccgtaggacgtgtcatgacgtgtgtgctcggaatgattgtcagaagagagcgggagatccgccagtttgtgaagacgccgttttaccgcgttgtgcagcagctggagctggagggaaagcagctggagggtgaattccgtgccgtgcagggttccgcttatttccagtcaccgaagctttacaaggagaacggttttaaagagaaaaaagatgcacaggagctgatccgtcggctgcttgctgatccgccgcctgcaaagacggttgtcgattcgattgagcgaaagaaagagaagaaaaatccgccgctgctttacaatctggccgagctgcagaacgactgctccaaaatgttcaagatcagcccggatgagacattgcgcattgtgcaggagctgtacgaaaagaagcttgtcacgtatccgagaacggatgcacgtgtgttatctaccgcagtagcaaaagagatttcgcgcaatatttccggactgcgcaactttgctccggcgaaagcatttgcacaggaggtactggatgacggcagttatcagggaatcgcgaaaacacgctatgtgaatgacaagcagatcactgaccactatgcgatcattccaaccggacagggatttggtgcgcttggttcattaaagggaaatgcatacggtgtttacgcggcgatcgtacggcgctttctgagtattttttatccgccggtcgagtttgcaaagatcacaatggtaacggcgatgcagaatgaaaggtttttttattctttccgagtgctgctgtcagagggatattttaaagtagccggtaatccttacgagaagaaaaaagaagccggaactgcaggcgctgagaatgaaaaaatgcgcatatcattcaaaactggatcagaagaaaaccaggagaattctgagacggtcaacagtagcaaggagcttttagaactgttgaaaaagatccgaaaaggcatggaatttccgataaaggatctggtgatccgggaaggagaaactgcaccgcctaagcgctacaactccggttccatgattctggcaatggaaaatgcgggtcagctgatcgaggatgaagagctgcgtgcgcagatcaaaagctgcggtattggtacaagtgcaacaagagcagaaatcctgaagaagctggtggcaaataaatatatcgctttaaataaaaagacgcagattcttacgccgacgctgcagggtgaaatgacgtacgacgtagtattttgttctattcgttcgctgctgaatccggagctgactgcaagctgggaaaaaggactgaattatgtggcagagggctcgattacggatcaggagtatatgcagaagctggagcactttgtccgttcacgcacagacggagtactggggctgaataatcagcagctgctgcggccgctttttgatgctgcggcagtttattataaaaaaggaagaggcggatcgaccgtctccaaacaggagggctaatatggaaacgtgtaaaatcaaaaatctttatacgctggaagaaacaatcgcaaagccattatttgagggagcggagtatccgtgggaacttctgccaaagatcagtgcatttattctggaactcggagcaacactctcagaggaagagtacgaaaaggtcggagaaaatgtctggattgcaaaatcagcaaaggtagcaccgactgcatttattaacggtcctgcgatcatcggaaaaaacgcggaggtgcgtcactgtgcatttatccggggaaatgcaattgtcggagagggtgcggttgttggaaattccacggagctgaaaaatgtaattttgttcaataaggtacaggtgccgcattacaattacgttggagattcgattcttggatacaaggcacatatgggagccggatcgattacctcaaatgtaaaatcagataaaaagctcgttgtcgtaaaggatggcacagagcggattgagaccggcctgaaaaaattcggtgcaatgctcggcgatgaggtggaggtcggctgcggatccgtgctcaatccgggcacggtgatcggacctcactcgaatatttacccgctttcttcggtgcgggaggtcgtaccggcaaattcaatttacaaaaagcgcggagaagtagcagaaaaacactgatggaaacatcagataaggaaggaattggaaaatggcaaaaagcaacacatacgacgcgagcagtatttccgtactggaaggactggaggcggtccgcaagcgtcccggaatgtacattggaagtgtttcaagaaaaggactgaatcatctgatctatgagattgtggacaatgccgtggatgagcacctggcgggttactgtaagaaaatagaggtctatctggaaaaggacggctccgcaacaattgaggatgacggacgcggtatcccggttggtatgcatgaaaaagggatgtctgcagaacgactcgtgtttacgacgctgcatgcaggcggaaaatttgatgatactgcctataagacaagcggcggtctgcacggagtggggtcttccgttgtgaatgcactctctacctggctggatgtgcaggttatgcgagaggggaaggttcatcatgaccgctatgagcggggaattcctgtacttgagctggaaaacggtctgcttcctgtgatcggcagaacaaaaaagacgggaaccagaatccagttccttccggatccggaaatttttgaaaagacgcggttttctgcaaccgagctgaaatcacggctgcatgagactgcatatttgaatccggagctgaccatttattttgaggatcgtcgcggggaggagacagagcagattacgtattcagagccggatggaattacaggatttgttcgggaactgaaccaggaagaagaacctgtctgtgagcccgtttattttaaaggggaggcagacggaattcaggtggaagcagcatttcagtacgtcaatgaattccatgaaaatgtgcttggattctgcaacaatatctataatgcagaaggtggtacacatctgaccggatttaaaacaacttttacaacggtaatgaatacgtatgcgcgtcagatcggggtattaaaggataaggacgcaaactttaccggtgcagatatcagaaatggaatgactgctgttgtctcgatcaagcatccggatccgcgttttgaaggacagacgaagacaaagttggataatcaggatgcggcacgtgcggttggaaaggtgactggtgaggagattgtccgatactttgataaaaatctggaggcattaaagagtattcttgcctgtgcagaaaaatcggccaagatccgcaaatcagaggagcgtgcgaagacaaacctgctcacaaagcagaagtattcatttgacagcaacggaaaactggcaaactgtgagagcagagatccatctgtctgtgagatttttatcgtggagggagattccgctggcggttcggccaagacagccagagaccgaaattatcaggcaatccttccaatccgcggaaagatcctgaatgtggaaaaagccagcattgacaaggtacttgcaaatgcggagatcaagacgatgatcaatgcgttcggttgtggattttcagaaggctatggaaatgattttgatattacaaaactgcggtatgacaagattatcattatggccgatgccgacgtggatggcgcgcatatcagcacgctactattaacgctgttttaccgctttatgccggaactgatttatgagggacatgtatatattgcgatgccgccgctttacaaggtgattccgtcacgcggacaggagcagtacctgtacgatgacaaggcgctggaaaagtaccgaaagacacataaggcaccgtttacgctgcagcgctataaaggtcttggtgagatggatgcggagcagctctgggagacgacgctgaatccggagacaagaatgatgcagcgggtggagattgaggatgcgcgtcttgcatcgaatgtgacgcggatgctcatgggcacggaggtgccgccgcgcaaggaatttatccatgagcatgctcaggatgcactgcttgacgtataacagacgagtaaggacagaaaaaggagtcagaaataaattatggatggacagataatcagagcggagtattcggacatcatgcagaagtcatacattgattatgcaatgagcgttatcatcgcacgtgcgcttccggatgtgcgggacggtttaaaaccggtacaaagaagaacgctctacgatatgtatgaacttggaatccgttacgaccgcccttaccgtaaatctgcgcgtatcgtcggggatacaatgggtaagtatcatccgcacggagacagttcgatctacgaggcactcgttgtcatggcgcaggagtttaaaaaaggaatgccgctcgttgacggacacggtaactttggttcaatcgaaggagacggagcagcagccatgcgttatacggaagcaagactgcagaaggtgacgcaggaagcctttcttgcggatcttgacaaagatgtcgtcgatttcgggccgaacttcgacgagacggaaaaagagccgctcgtgcttccggtgcggattccgaacctgctggtgaatggttctgacggaattgcagttggtatggcaaccagtattccgccgcataatctttctgaagtgatcgatgcaacaaaagcgctgatcaaaaacaatcagctgacgacagaagctcttatgaagtacatcaaggggcctgattttccgaccggcggaatcattgttaatcaggcagatctgcagaagatctatgaaagcggacaggggaagatccgcctgcgcggaaaggttgaggtagaacaggttaagggcggaaaagaacgtctcgtgatcacagagattccttataccatgatgggcgcgaatatcgggaagtttttaaatgatattgcatcacttgtcgagacgaaaaagacgaccgatattgtggatatttccaaccagtcctcaaaggctggtattcgaattgttctggagttgaaaaagggagcagacactgagagacttaaaaaccttctgtataaaaagacacgtctggaggatacatttggtgtcaatatgcttgcggttgcggacggaagaccggaaacgttaagcctgcgccagatcctggaatatcacattgattttcagtttgaggtcaatacgcgcaaatatcagagcatgctcgataaagaagagaaaaaacaagaggtgcaggaaggactgatccgtgcctgcgatgtaatcgacctgatcatcgagatactgcgcggcagcaagaatcgtgaacaggtaaaagcgtgtctcgtcgacggtgtaacggacggcatccgttttaagacggcaaaatcaaaaaaagaggcggcaaaactgaaatttaccgagatgcaggcaaatgcgattcttgatatgcgtctttataagctgatcggactggagattgacgtgctgatgaaggagcatgaagagactctgaaaaatattgcgcgttataccgatattttaaataattacagctcaatggctgaggtgatcatgaaagaactggatcagtttaagaaagaattcggccggccgcggcgcactgcgcttgaaaatgcagaggaagtcgttctggaagagcagaagatcgaagagcttccggttgtctttttgatggatcgtttcggctacgtacgaacgattgatgagacggtatatgaacgcaacaaagaggcagcggatcaggagaatcgctacgtgctccactgtatgaatacggatcgggtctgtgtttttaccgataatgggaaagtccatttgttaaagctgctggatgtaccgtatggtaaattccgtgataaaggcacaccggtagataacctttgcaattacaacagcagcgaagaaaattttattgcagtaatggcattaaatgacattcgtgataccgttctgacatttgtgaccaggcagtcgatggtaaaacaggtacagggaaatgaatttgacgtatcaaagaggacgattgcggcaacaaagctgtccgatggagatgaggtgatagctgtatacgcggccggagaacagtgtcagatggttctggtctctcataatggttattatcttcgttttccggtgtcagagattccactgaaaaagaagactgcggtcggtgtgcgcggaatgaagctggcagaaggagatcagatcgcagatgtttactggctggagaaggacagtgatatagaggtgccaatcggggagaggacgcttcacctgaatcgtctgagaatcagcaccagggacgggaaaggaacgaagcagcgatgaagttttttcatttgtctgatttgcatatcggaaaacggatccatgaattttctatgctggaggatcagagatatattctgaatgagattttgcagctggcagataaggagcggccggacggtgtattgcttgccggggatatttatgataaagccattccgacggcagaagcggttcaggtttttgatggttttctgcaggggcttgtaaaacggagaatccctgtatttctgatcaacggcaatcatgattcggcagagcgccttacatttggtgccggctggatggatcaaagtgggatttatatcgccccgctgtacgacggaaccgtaaaatgtgttcgcctgaaggatgcatacggaacggtttgtatccatcttcttccgtttcttcggcctgcgctggtccgtcatgtacaagaagagcgggcagaagagatcgtggattatccaagtgcgctgacggtagcattatccgggattaaattaaatccggaggagcgaaatatcctgatagcgcaccaatttgtgactggtgcgtccagatgtgattcggaagaactgcaggtgggaaccattgatcagattccgctttctctttttgatacgtttgactacgtggcgcttggacatatccatagtcctcaaaaggttggaagagagacggtccgctactgtggttccccactgaagtattctttttcagaagcagaacagcaaaaatcggtgacggttgtagagctggaggaaaaaggcagaacagtaatccgtactctgttgctgcagccacagcatgatcttcgaaaagtaaagggaacgtatcttgaggtgacggcgcgttcattttatgaaagcagtaattgtgaggattatcttcagattacgctgaccgatgaagaagacgttgtggatggcctggctaagctgcgtacaatctatcctaatctgattcgcctggagtatgataatcgcaggacaagagaaaacggggagattgcagcttctgacccggttcagcagaaaacagagctggaattgtttcaggaattctatgagatgcagaataatcaaccaatgtccggacagcagcacgcatacgtccggaagctgatacaggagctgaaagaatgaagccaaaaagacttaccatcagtgctttcggaccatacgcaggaaaaacggagctggattttacttcgctgacaggactttatttgattaccggagataccggggccggaaagacaacgattttcgatgcgatcacgtttgcgctttacggcgaagcgagcggtgaagtgcgtgaagccggaatgttccgcagtcagtatgcaagggatggcgttcgtacatatgtggaatttatttttacgtacggaggaaaggattatacagtaaggcgaaatccggaatatctgcgtccgaaggacaggggaaacggatatacaaccgagaaagcgaatgcggaattgatttatccggatgagcggcagccggtaaataaaagcagagacgtaacgcgcgcaattacggaactgcttggtctggattaccatcagtttactcagatcgcgatgatcgcgcagggcgattttcaaaaactgctgcttgccggaacgacagagcgcagtgaaatctttcggaaaatttttcatacagagctttatcagatgctgcaaaaccgtttgcgggaggaagtcaaggccagatggaaaaattatgatgagatgcgaagaagtattgcgcagcatctggatggaattcgctgtggagaaaatacggttattcaaaaagaactggcagatttaaaaaagaataaatatgacggaacggtgataccggcacttgagcttttggaagagctgcttacaaaggagcaggctgagctggaagagcaggaaaaaacacttctgcaattgaatcaggatattgaaaactgtagtcagcagcttggccggacagaacaaaacaggatttctttggaaaaaaagaagcacaaggagatcgaacgggaagcactacttccgaaatttaaagaagcggaagctcaaatgcatacggcgcaggagcaggcagtggtctgccctgctattgaacaggcagtgcgtgaaaaggaggctcagctggaattactggagaagctttcgcagctgcacctttcctatgaaaaactacagcttcagctgacggctcttatggagcagaaaaggcaaaaaacagaagagacagctgatctgaagaaacaactggtcgggcagcagcaaaagaaagaagcactggatagctcagagcttttgcttgagcgaatcagaagacaaaaaaaagagtgccgggaacgaagaaaaacgctcgcagattttgagcaaaaggaaaaagaagatacgaatgagctgcaaaagcttgttgaaaactgtgcgatacacgaacaaggacggaagaatgccagagaaagatccgaagcactgcggatggaggcagagagcctggtggaacaggaatccgttcttgcactggagcaggaacaatataggcgtctgaagcagcagtacgatgaactaaatcgcgaagtagctctgtaccggaataatgggatacttgaacaagagacgcagcagaagcttgggcaacttttggatgagcaggaacaggcaaaaaaagcaaaagaacgtcttgatataatggaaaagaatcagcttgccaaaaaccagaaagcatttcagcttgaaatgaagaaggaaagactggtacagctggaaaagagcctgctggagcaaagccggcaaaaagaagaactgcgcaggctgcaggctgcatatcaaagggcagcaaaaaacagagatattctgcaggaggattacctgtatcaggagcggctgtttcttgacgcacaggctgggctgctggcaaagggactgaaacaaggtgaaccttgtcctgtttgtgggtcccgatgtcatccgcatccggctcagataccggcgcatattcctgaaaaggcggaattggagaaaaaaaagcagctgcttcagaatgcacagcttgaggcagtacgcctgagtacaaaatccggccagaaaaaagaaatgatagagcgggcagactcagaagtcagacagctgcaggagcttctggctgaaaaggcggaggattcggcagctgttggtgccatgcttgaacggatcagggaagagcagcttcgggaaaagaagatcagggcacaggaagaacaggaaatgcagcttcttacgcaccgcgtaagggaagcagaaagcaaaacagaactgctggaaaaaatgcagcaggagtataatgagctactgcagcagcaggctggcagcaggattcagatccgaaagcttctggaacagattgaaaagacggagccgaaagaaaatccgcctgagattgatcagaaagtacagatgctcatggatatggcagaaggagctcaaaagaaagcacttttggagctggaagctctggaagtaaaaatcgctcaggcaaagaaaaagcagagaagaaggcaaagctgtctggaagaagccagacggacagatctgcaggaggcagaggaaaacaaacttttacagcaaatgctgcgccgaagagaagttcttttagaaaacaggaaaaaccgtacggaaaaatggcaggcattgcttgagcaattgggtactgagcttgcaattacagatattaataatatttttccgaaggaatcattgacggaaaaaaatgaaagagtacttcagaaactggatgatttgatgaacgaactttgctatctggagatgaaaacgtccggtgagcttgaagaatggaacagatgcagacagaaaattcttcagcttgaagagcttctggaacagacagaaggcgaaatgcatgaaaaagaacttggtgcggaacgggtacgggcacagtgtagtgctttgaaagaacaggaagaggagcttcagaaaaaactgtgcggaataacaaagcaggacgtagagcgtgaaaaacatttgcttacagagaaaaagaattctctggaaacagccgtaaaacagacagcagaaacatggcagcagctgaaaaatcaaattctggtgcttgattctgcaatctctgcacttgagcgcagcatcggaagggaactcccggatgaagctgcattgctggaacagaaaaagaatcttgcaaagcagaaagcctttgttgaagaccagagaaccgggcagtattccatctggcagaataacaggcacattcaggaagcggtctgccggaatcgggaaaaaatggaagaagcagaaagagaatacgtctgggtgaaggcactggcagatacggcgggaggtgcactttccgggaaacaaaagatcgagctggaaacgtatgtgcagatggcttattttgaccgggttttgcgcagggcgaatctgcggctgatgaaaatgagcaggggacagtatgagctgaagcgaagaatggacaaagacagccggaaagaaaaagcaggacttgatctgaatgtagtggatcactacaacgggacggagcgcagcgtaaaaacactttccggaggtgagacattccaggcgtctctttctcttgcgctgggattgtctgatgaaattcagtcttatgcaggcggcattcggctggatgcgatgtttattgatgaaggctttggttcacttgatgaggatgcattaaatcaggcaatcagtgcactggagggactggcagaaggcagtcggatggttgggatcatttctcatgtgccggagcttagagaacggatcagcagaaaggtttttgtaacaaaagaacgcagaagagacgggatcggaagcagcgtacagataataaacggaatgctgtaagattacgtttttacggattcccggtattttgagcaacaaaaaaagcggataacgggaatcgaacccgcctatccagcttgggaagctggtgttctaccaatgaactatatccgcattacgtatctatcataccacatttttcggaaaaagcaagaaaaaattgaaagggcttgcatttcatggaaaatagtgctatgataagcaggaatttgatactgttactagagtaggagtgggccagttggtccactcttatttgtgaaaaaaagtattttgttgctgcaggaaggaggattgtgatgagcaaacgggaaacatatgaacagagaacagaggagctgatcatgccgatcattgagcagaatcagttcgaactggtagatgtggagtatgtaaaagaaggaggcacctggtatctccgggcatacattgacaagccgggaggaattaccgtggatgactgtgaggttgtcagccgtgcgctgagcgatctgctggataaacatgattttattgaagatgcctatgtgctggaggtcagctccccggggctgggaagaccgctgaaaaaggaaaaagattttgccagaagcataggagaggaagttgatgtccggacattccgggcgatcagccatcagaaagaatttaccggtatcctgcgggactatgacaaagaaaagatcgtacttgaaatggaagatcaggaactgctcgagattgcacgcgctgatatcgcgctgatccggctgtcatttgatttctgatcacgacaaagcaaatactgggaggatagaatcatgaatagcgaattattcgaggcactgacgctgctcgaaaaagagaaaaatatcagcaaggatacactgctggatgccattaagcagtcacttctgcaggcatgtaaaaaccactatgggaaggcagaggcaaacaacgttatcgtaaatattgatccgcagacgtgtgaatttgaaatttatgcagagaagaaggttgtggatcacgtagaggatgagcttgcagagatcagcctgacgaatgcaaaaatgaaggattccagatacgagcttggcgatgtggtacgcgttgatatcaagtcaaaggaatttggccggatcgcgacgcagaatgcgaaaaatgtgattctgcagaagatccgcgaggaagagcgaaaggttcttttcagcgagtattatgagaaagaaaaggatgttgtgaccggtgtggtacagcgctatgtcggaagaaatgtcagcgtcaaccttggaaaggtagatgcgatgctcagcagcgaagaaatgatcaagggcgagacctaccatccgaccgagcgtattaaggtatacgtgctggaagtaaaggatacgccgaaggggccgaagatccttgtgtcccgcacgcatccggagctggtaaaacgtcttttcgaggaagaggttaccgaggtgcgcgatggcattgtagagatcaagagcattgcaagagaggccggcagccgtacaaagatcgcagtatattccaatgatccggacgtagatccggtgggtgcatgcgtcggattaaacggtgcgcgtgtcaatgcagttgtagaagaattaaacggcgagaagatcgatatcattaactgggatgaaaacccggcactgctgatcgagaatgcactcagcccggcaaaggttatttacgttatcgctgatccggatgagaagactgcaagagttgtcgttccggactatcagctttctcttgcgatcggaaaagagggacagaatgcaagacttgcagcacgtctgaccggttttaagatcgatatcaagagcgagatgcaggcacgtgagtccggagatcttctggagtatgaggaagattactacgaagatgaggacacagacgagtcattcgatgatcaggaactgaattctgagcagacagaagagagcgaaccggagattgcggcagcagaagcagatgatgagcttccggcagaagaggaataatccatggctgcaccggtaaaaaaagtcccgctgcgcaaatgcacgggttgtcaggaaatgaaaagcaaaaaggaaatgctgcggattctcagaacagcggaaggagagatcattgtagatacctccggcagaaaaaacgggcgcggagcttacgtttgccgctgtatggactgctttgaaaaggcagtaaagagcaaggggctggagcgtgccttaaaggtgcgcgtcccggaagagacgtatgagagtctgaagaaggagattgaatcgattgaagagagatagcgtattatcgctgatcagtatagccaaaaaggcaggcaggatcgccgccggagaatttcagacggagactgccgtaaaatcgggaaaagcttatcttgtgatcgtttcgtcggaggcttccgggaacacagagaagaaattccgaaatatgtgttccttttatgaagttcctttctgcatctatggaacaaaagaggcgcttggtgctgcagtcggatgcgaatttcgtgcatcgctcgcagtgaccgatgagggacttgcaaattccgtgatacggaaattagaagctgctttgggagcgcaggcagtgacggacggaggttgtgtgaatgacggagatcaaaacgaataagcttacgaaggaaacaggaaaagagaacagagagggaaaaatgaaggaggatgtgcagatgacagatgcagagaacaagacaggggctgaggcaggcacacagccgaagaagaaaaatatcagtgcggtgttccgtcctcagaacagtaaaacgggaatggtaaaaccgggatcgagaccgaagccggcaagacagaacacaaataaatcgcaggatgcggcaaaagtaccggcaaaggcagcagatgcgcaggaaaagagcacaccggtaagaacgtctgcagaaacgcagggcgcggctgagacgaaggctccggaaagaacaacggcacaggcaagaccggcagcagagcgcagagaagcaccgcgccagggcggtgagagaagagatggcggcagccgttatcagggcgagagacgagatggcagaagccagggcggtgaaagaagagatggcggcagccgttatcagggcaacgcatccagaaacggtcagagtggcggcagatatcaggatggagcaagaaacggtcagggcggacgtactcaggacggtacaagaagcaaccagggcggcagattccaggatggcggcacaagaggcggccagggcggtgagcgcagagacggcggcaatcgttatcagggcggcacatccagaaatggccagggtggcacaagaggcggccagggtggaagattccaggacggcggcacaagaggcggccagagcggaagattccaggacggcggtgcaagaggcggtcagggcggacgttccgcaggaattccgaaggctccggtagagtccaagccgcttgagaaagagagcagaaaaagaacggagcgcggagaccgcaaccgtgtggaaaagggcgagaagctcgagagactggagaagaaccagaatggacgttcccagcagaagaacggaagaaagcagtccgcaccggtaaagccgccggtaccaaaacaggaaaaaccggaggagacgatccgcacgatcacaatcccggagaagcttaccattggtgaactggctgaggcgatgaaggtacagccggcacagctggtaaagaagcttttcctgcagggtacaatggtaaccgtaaatcaggagattgaatttgacaaggcagaagagattgcacttgagttcaactgtatctgtgagaaggaagtaaaagtcgatgtgatcgaagagcttctgaaagaggatgaggaagacgagaaagatctcgtagccagaccgccggtagtctgcgtcatgggacatgtagaccacggtaaaacatccctgctcgatgcgatccggaatactcatgtgatcgaccgtgaggcgggcggtatcacacagcacatcggtgcatatgtggtatcaatcaacggacagaagattaccttccttgacacgccgggacatgaagcatttactgcaatgcgtatgcgtggtgcaaatgcaacggatatcgcaatccttgtagtcgctgcagacgacggtgtcatgccgcagacgatcgaggcgatcagccatgcgaaggcggcaggaatcgagatcatcgtggcaatcaacaagatcgataagccgagtgcaaatatcgaccgcgtaaagcaggaactgtccgagcagggactgatcccggaggactggggcggaagtacgatctgcgtaccggtatctgcacattcccatgagggtatcgacaacctgcttgagatgatccttctgaccgcagaggtagcagaactgaaagcaaatccgaaccgtcgtgcaagaggtcttgtgatcgaggctgagctggacaaaggaaagggtccggtcgcaacgattctggtacagaagggtactcttcatgtcggcgatccgatcgcagcaggtgcctgccacggcaaggtgcgtgcaatgatggatgataaaggacgcagagtaaaagaagcaggtccgtccacgccggtcgagatccttggactttctgatgtaccgaatgcgggtgagatctttatggcgatggagaatgaaaaagaggcgagaaactttgccgagacctttatccgtgagggaagagagcgtctgcttgaggaaacgaagtccagaatgtcactggatgacctgttctcccagatccaggcaggtaatctgaaagagcttaatgtcattgtaaaggcagatgtacagggctccgtggaggcagtaaagcagagccttctgaagctttccaacgaagaagtgattgtcaagatcatccatggcggcgttggtgcaatcaacgagtccgatgtgattctggcttcgacctccaatgcgatcatcattggatttaatgtacgcccggatgcgacggcaaaggcaacggctgagcgtgaaaatgtagatgtacgtctgtatcgtgtcatctacgatgcaatcgcagatgtagaggcagcgatgaagggtatgcttgatccggtttacgaggaaaaggtcatcggccacgcagaggtacgccagacattcaaggcttccggtgttggtacgatcgcaggctcctacgtgctcgacggtgtattccagagaggatgcaaggcaaggatcacaagagagggcaagatgatctatgagggagcactcgcatcgctgaagcgtttcaaggatgacgtgaaggaagttaaggccggttatgagtgcggtcttgtatttgagaaatttaatgatatcgcggaaggtgataccgtagaagcatatatcatggtggaagttccgagatagaaggttttgaggtgagatctgaatgagaaaaaacagcattaaaaatacgcggatcaatggagaggttcagaaagagctctccaggatcatccagaacgggatcaaagatccgcggatcgcgccgctgacttctgtggtatccgtagaggttgcgcctgatttaaaaacatgcaaggcatacatctctgtacttggaagcgaaaaagccgcagcggacacgcttgccggtttaaagagtgcggaaggatttatccgccgccagctcgcacataccgtaaatctgagaaacacgccggagatccgttttattctggatcagtccattgaatatggcgtaacgatgacgaaactgattgacgacgttgtaaagacagaacagaggaatgaagatgaagatagagcggacagtgaatcttgataaagaactcaaaaatgtgaaaaccgtcggaattgcaggccacattcgtccggatggagatgcggttggttcctgtgtggggctttactggtatctgagacagaattatccggagattcaggtaacggtatatctggaaaaaattccggagtcttatcatatgattgccgggacagacgaaatctgccatgattactctgaagaaaaggtctatgatcttttcttcagcctggactgtgcggatgaaaaacggcttggagacggtgtgaagtatttaaacaccgcaaaacggaccatctgtatcgatcaccacatcagcaatgcgggttttgcggatctgaactgcatctatccggacgccagttcaacatcggagatcgttttcaatctcctcgatgaagataagattacatttgagagcgcagaggcgctgtatatgggcattgtacatgataccggagtgttccgccactcctgcacttctccggaaacgatggaggccgcagcaaaactgatgcggtttggcgtacgctgcagcaagatcatcagcgatacgtattatgacaagacgtattatcagaaccagatcctgggccgtgcgcttctggaaagcgtgcttctgctggatggaaagatcattttcagtgcagtgcgtcaaagagaaatggaattctatggtgtgaagccgtcggatctggatggcattgtgcaggtgctgatgggaacagcaggggtcgaagccgctattttcctttatgagacagcgccgcaggaattcaaggtcagcctgcgttcacgtgaaacggtcgatgtggcaaagatcgcaagctactttggcggcggcggtcatgtacgtgcggccggctgtacgatgcagggaagtgtatacgatgtggtaaacaacattacataccatatggaagagcagatttgtcaggagaaaaacggtgactgacggaattatcaatgtttataaagagcgtggctttacttcccatgacgtggtggcaaagctgcgcggtattttaaaaatgaaaaagatcggacatacggggacactggatccggaagcggaaggtgtcctcccggtttgtctgggaaaagcaacaaaagtatgtgagctgctgaccgataaagaaaagacatatcaggctgttctgctgcttggtaccgtgacagatacgcaggatacgacaggagaagtgctggaaacgcatccggttgtctgcagcgaagaggcagtctgtgaggccgcggcaagatttaccggagatattcttcaggttccgccgatgtattcggctttgaaagtaaacggaaaaaagctgtatgagctggcaaggcaggggatcgaggtagagcggaaagcaagaccggtgacgataaaagagatccggattgatgagatccgttttccacgtgtcacaatgactgtaacctgctcaaagggaacgtatatccggacgctctgtcatgacatcggagcctcacttggctgcggcggctgtatggaaaagctgctgcgcacaaaggtcgggccgtttattctggaggatagtgtgcgtctttccgagatcgagcagaaacgggatgatggaagactggaggaggttatccgtccgacggattctgtctttatgaaatatcaggctcttttgctgaatgagacaggagaaaaggcggtccgaaatggaaatccgatccggcctgaattggctgtgaagacagtcctgcaggagacttttgtaaaagaaggggcttgggacggtgatgccttggaaaaaaggcaggaattcgaaaacaagatggaagatgggatacgttttcgagtctatgatgcttcccggacgtttctggcagtttatgaatggcgcagtgagaaacactgtctctggccggtcaagatgtttctgtgacaagataagagtacattacattggagatgcgtatgagatatttttgcaatacaacggacttttattctgacggaccaacagcggtgaccttaggcaagttcgacggactgcacagaggtcatcagaagctgatcgaagagattttaagactcggatcaaaagaggaagttcagaccgccgtttttgcgctcgcttccgatgaacggccgtatctgctttcaccggaggaaaaaaaagaacggctggaaagatacaatatcgattatctgatccgctgtccttttatcccggaaattctcgggatggagccggaaacatttgtgaaagaagtgctgaaagaacggctgcatgcgaagtatgtggtggtcggtaccgattttcattttggacacaaccgaaaaggtaatgccggttttctgaaaacgctggaagaggcgtatga

SEQ ID NO: 417 - DNA, 29223 bp, Unknown
  16S sequences of unknown bacteria
cggaaataaactggaacgtccggcttcgcccgccaaagagggctatgtctttgagggttggtatacggacgaagcgctgacgctggcttacgatttccaatcgcccgtcacggcggatatgacgctgtacgcgaaatgggaagaaaaggttcccgattcctcttccgaaacctccgaaaacgcttcggggagcgggacctcttccggatgcaactcgggctgtaaatcggcagccctgccgattgcggcgttcgcggtgtttgccgccgctttaacgttttcgaagggcaggcgccgataaaaaagcgggaaagaaaaaggaaagagaggtaaaaaaatgatgggaaaaatgaatctgagaaaaaacaggggaagaatagggacggcggcgatggttttcgtgctgttactgatcgttttggtcgccgccgcactgcgcatggaaaagacgacggtagaaggcgaggctctcgattttacatcggagcgctgggacgtggaaagcggcaagaccctgggcggaaattccgaattgctttcggacaaggacgcggacgcgggcgaaaacagaattttgtaccgcacgaaagcttctttcgacaattataaattgagcttcgaatatcgctattcgggcacgaatcgggaagagccctggatgggatgtaacggcttgattttaaacgattcggcggattcgctcgacggtttttacgtcggtttttacgactggggcggcgctctgtactgttctacgggatattacagaaacggggagttcgctttcctctacggcaatcacacgggctgggacacggcgggcgccgcaaataacgtctacgagatttacgtgcagggcgatctggcgaacgtcgtgataaacggctggatatttacgagcttttcccttccgtacaggcagggaggatatatctccctcctggcggacggctgttccggcgtctataaaaacctcacggtgacgccgctggattccgatttctgtcttgcttccaagctggtgcgggcgaactggggcggctacaatatttgtggcgcgcagtattatttttacgaaacgggaaaaaatcagacttttcaaatgaggctccccgacgatttgacgcaggtgaaaaaatactacctcgccagacagtccaagcttgcggacttagatcaggacgtggaagtctatctcgacaaaacgggcaaactgacgcttgcggacgagtggacggataagattgcggactggggggacagcgcttacggcaatcgggatttcggtttgaatacggtcgctctcgatccctcccgttttgaagggcttggggaaggagagaatgcgggattctttttgaaaaagaatacggacggctggtattcggcgtgcgaatactggctgctctgggaaaacgccgcgggggaaattttcgtgtccgactatttcgatatggcgtatgaattcgataagcaagcgcactcttacgcgagcgccgagccgtccagctatttcttcggctatcagtttatcgcccaggacaacgccatgctcgtttcgagaatgagaggcgcgaaagcggaaatcctgcgcacgcccgaaattgccaaaaagggggatatcgaatatacctttgccctggacgaaaaagaaaaagttttcgatttgaaagattacgtgagcgtaaagaccaatcatttcagctgtcaggttagatatttcctcgacggagcggaaacggacgagatcgtgttgcccaatgacaacgcggagggaacgatccttgtggaaattctccctgcgggcgctaacgacgccagcggcaatctggatttcggggaaaagaaagtgacgataagttataaaacgattaaaacggtagaggaaacatatctcgaaaaaatttccgatatagaggtctttgccgcgagggaagggcagacgctggaacttctggattacgtccgcaccaatgcaaaggaaggggagtggagctattccgcgttcggcggggaattcgtttcgggaacggagttttccgtgcccttcgaggaaaagacggggcctatcgtgttaagattcgtttccgcgcagggggaagagctgcgcacggagcttacctattcgtcgaaaaagatcgtcgtaaagagtccgccgtcgcttccctatctggacgcctgcgacagcgtttctgatttttggacgcctttgtccgaagcccccgtcgctgtgaaagacggtaagtacgtcagctccgccgaaaaccgttggagcgcgattgcggatacgggactgaattcgtatatgtttcaattcactttgaacgtagcgggagcgcagggcgacagagcaaaacacggcgtccttctgcacgccttttacagcttgaagggactcaacggcaccctcgtcggtttcgagcttcaaggagataaactgatgtgttccgtcggctattatgcggacggtaaatatacggaatacgcctataaacacacttattttaacggcgctttggattatatcgtaaaaattacggtggaaggctccgccgttcagctgatgataaacgggtggaacacctttcagatgacggataaatattccgcgggaacgggaatcgccctcttaaacggcgacgcggaaatttcttatgacaattttgttttgatagagtccgagggaagcatggacgaatttgttttcagagaagattggaaaggagcggacacctatcagaaaaacgcgcgtttctcctccccgttcaccctgtttttcaaaactttttccggcggcacgaattacagattggcgcgcagaacgccgctcggcgaaacggcgcaggccgccgaaatttacgcggacgggcaaagttacgggacgtggaaaacggtaaaaggggaacaatacggcgacgtatttttcggactctccgacttttccccgcagggagcacagtgttcgattcgcgtggagccgcgtgacggaaacgtgttttcggcttcctatctttggctgatctgtgaaaaggacggcagggattatatcgcggactgcgtttatttcccttacgagtacgacgccctgctgcacggagtcacggagattcccgctgtcgatgcctcggatacggggttcgtggcgacgggcaatgagatgatcttgaatacggcgacgggcgaagaagtgcgctacgcggcgaacgacggtgtgctgggcaagatgcagccgctcacctattccgataaaaaagtttctcaaaccactactttgccctatcggttatatcttcccgaaaattacgattcgtcgaagaaataccccgttcttttatacttacacggcgcgggcgaacgcgggagcgacaatatggcgcaggtggccggctccaacctcggcgtgacgtttccgctcaaacgcatcatcttcggcagctatcggaacgacgtcatcatcgtcgctccgcagtgcccgctcgataaaagatgggtggaaacggattggacgccgggcggctataagatagacgaagtgccgcagtccgtcccttccaaattggcggcctccctgctttataacgaaatcttccaaaagtattcggtcgatttgtcgcgcgtctacggggcgggcatttccatgggcggcttcggcatcacggatatggcgatgcgctatcccgatctgttcgccgccatcgtaaacagcgcgggcggcgccgacagcggcgaattcgcactgctctccacgacggcgctggcggggtacaacagcaactcggatacgacggtgggttacgaggcccttgcgcagctgtgcgggaatatgaaagacgcgggactggacgcgaggtatacccatgtcgaagatatcggacatctgtcctggctggtcgcttatcaggacgcggaactcctgcattggctcttctccaaaacgaagaaatggacggtgaaagtcaacgcgttcggcgggagtttgaacggcgatattttagaaagcttcgggatcgatcaggaaagggtcgtcctgcccgacgcctataaagaaggtctgactttcgcagggtggtacacggacgcggggtatcagaacacaatcgcggaatttgacggaagcatcgcgcggaatctcacgctttacgccaaatatgtaaaaaatatcaccgtcagcttttcggacggcgaaaaaatcatcgacacgttggaaacgacggacgaggaagaagtcgatctctctaaaatatctctgcaaaaggaggggtacacgctgacgggctggtcggacggtacgaacgattattcgctcaccgagccgcacgcgttcggcgaaaacgtgactctcaccccgaaatggagcgtcaatcggtatgtcgtgaagatctacgacggcgaaacggagcttttcaacgaaagttacgattacggaacgtcgcccgagatcgcccctttgcaaaaggcgggctatcgattggaagggtattataaagaagcggatttcagcggagaaaaagtttcgctgccgcagacggtgacaggggatttaatcctttatacgaagtggattcccgaacaaactacgtcggacggagaaacgtccgcttcggattccgtaagcggttcctcgtcggagagcgactcccgggatacggcgtccgattcgcacggcggctccgacgggactgtgatcggcggctgcaagggctgcggaggcgtttccgtgcccctggcgggaggtctggcgctgttgaccgcggcgattttcaaaagaagaaaaaatcgctgatttaaattttttcaaagatttgcctctattctttggaagaaaacgtacaaaggcggcgcaaatctttgcgccgcttcgtatagagagcgcttacataattttataacgtctatgttttagaggaagtcttcccgatcggaaaaaagaagaggaaccgcatagggaaaaagcgcgcaggatctttggcggccgtacacgagcagtacggctgcttctttttgcctctcttttattttgtatcgacaaataaaagtattttacttgacttatttcatttttgcgcatataataatagaaacgattttttctattatgagggtggctatgaacagaatttataatttttcagccggaccggcgcaactgcctttggaggtgctcaaagaggcgcaggaggaaatgctcgactatcgcggcacgggaatgtccgtgatggaaatgagtcacagaggcaaggatttcggaaaaatcatcgcggaagcggaagcagaacttcgctctcttgcggatattcccaaggagtataaagttctgtttttgcagggcggcggaaacacgcagtttgcgatggtgccgatgaatctgatgaaaaacagggaagcggattacatactcacgggcgtgtgggcgaaaaaagcggctaaggaagccgggattttcggcaaggtgaatattctcgcctcctccgaggacaaaaccttctcctatatccccgattgctccgacctgcccgtttcttctcgtgcggactatgtatatatctgtgaaaacaacacgatttacggcacgaaatttcatgcgctgcccgataccaagggcaagcctttggtggcggatatgtcctcgtgctttttgtccgaaccctttgacgtgaaaaaatacggcttactctttgcgggcgcgcagaaaaatatcggaccggcgggtacggtggtcgtgatcgcgcgagaggatcttattcgggaggacgcgctgccgggtactcccactatgctgaaatactccgttcacgccaaggaaaacagtatgttcaatacgccgccctgttacggcatttacatttgcggaaaagtgttcaaatggatccgttcccgcggcggacttgccgcgatgaagcaggtgaacgaggaaaaggcaaaaattctttacgagtatctcgatgcgagcaggttgtttacgcccaccgtcgcaaagcgcgatcgttcgttgatgaacgtacctttcgtcacgggcagcgaacagctcgacgcgcagttcgtcgcggaggcgaaagaagagggactcctcaatctcaaagggcacagaacggtgggcggtatgcgcgccagtatctacaacgcgatgcccaaagagggcgttgaaaaattagtgcgcttcatggaaaaattcgaaaaggaacacgggaagcaaagagatgtataaagtaaaatgttttgataagatagcgaagtgcggactcgataagctcggaaacgggtatgtttttacggacgatatcgcggaggcggacgtcgctttggtgagaagttcgtctttgcacgagatagacgcgggggaaaatcttttcgccgtggcgcgtgcaggcgcgggagtaaacaatattcccgtggacaaattcgcgcaaaaggggatcgtcgtgttcaatacgcccggagcgaacgcaaacggggtgaaggaactggtcatcgccgccctgctgctttccagccgcgacgtcatcgacggcgtgaattgggtcaggacgatcgaaggcgatgtgggaaaggcggtggaaaagggcaagaaggcgtttgcgggcaaagagatcgcggggaaaaagctgggggtgatcggcttgggcgccatcggcgttctcgtcgccaacagcgccatatccctcggcatgacggtgtacggctacgacgtcaatctttccatagaacacgctcttgccctcaaaaacaatatcatcacggtgaaaacgctggacgagatgtttgccgaatgcgactacatcaccgttcacgttcccctgctggaaagcacgaaatacctttttaacgcggacgctttcgccaaaatgaaggacggggtgaatatcatcaacttttcccgggatcttctcgtcaacgacgaggatatgtgcgccgcgatcgcgagcgggaaggtgcaccgctatgtgacggatttccccaacgaaaaggtacggaatatgccgggcgcgatcgcggtgccgcatttgggggcgtcgacttcggaaagcgaggacaactgcgccgtaatggcggtagggcagctcaaagattacgccgcgacgggcagcatcaaaaattcggtcaactttcccgcactcgacgcggggagcatcgcgggcggataccgtatcgccgttctgcataaaaacgttcccaatatgatcgggcagtttaccgcgcttttgggaaaaaaggggatcaatatcgtcaatatggcgaataggagcaaggggaactgcgcctataccgtcatcgacgcggaagcggatcccgcggggatcgccgcggaactctccgcgattgaaaacgtttacagggtcagaatcatcaaatgaaaatcggaatgcctattctgtattctttcgattcgcttctcgataatttcgcttttgcttcgcgcggcggattcgattttgtggaactcaatctgaatttttcctattgccgcaaagcgcttctcgaaaaggggcttttaggctctctgatcaagaaatacggcttgggaattacgctgcattttttcgacgaagcggatttcggcacttatgacgaagtcgcggaaagctatttaattctcttggaaaggtatctgctgcccgcggcggcagaaggactgaaaacgctcgtggtgcatctgatcgaaggtcccgtcgtcacgatcagcggcgtgaaaaattacgtgtacgaaaaagagttcgacgaatatatcgcgcgtttgaagagaacgctctcccgcgtggagcggctctgccgcgaaaataaggtggctttggcgctcgaaaactccaaaaccgtcccctatatggaaaagacgtatgccgctttgcaacacgagggcttctctttcactttcgatatcggtcacgacgaagtctgcggcaatctgccgcgaaaaatttttcaaaaaacggactttcgcggcgtcaaggagttccatatccacgacgtcaaatcggaaaagagcatgaaaaaggatcacgtcaatctgggcgacggaaaggtggacgtcgcgtattataaacgcgtcgcggaaagaatcggcgcggactgtttgctcgaactcaaatgcaccgccgatctggaaaactctctcgcgtacttcaaaaaattgtgacgcgggacgaaccgcggcaaatccgtttcgctctgtaatacaatattttttttgcgcaaggagcgtcttcctccctatacgggattgttgctttgcacttaaaaggatttaaaatagtttccatgaattcgcaaatagaaacgacggtcgttttacgacggtcgttttttttcgtttgggcaaaggaagaaaacgtatcgaagggtcgcaaaaatttttctgccgcggaatacgaaattttgagaagagccgaagagaaaactcctggtatggcaaacggattcaaagggtaaactaaaagcataaggtggaaaagaaattgaaattggaatcggtttggcagggtgaaacaaaaaaatatccggggctggaaaaagatatcgactgcgacatcgccgtaatcggcggcggcattgccggctatctcacggctttcaaactggcggaggcggggcggaaagtgacgcttttggaagcggacagattgttttcgggaacgacggggcgcacgacggcaaaaatttccgctaaccagggcagcgtttacgccgagctttccgctcgttacggacagcgcgccgcaaagctgtactactgcgcgcaggaagagggaaagcgggaatatgcggaactcgtggaacggcatcatatcgagtgcgactggatggaaacggacagttacgtcttttccgaggacggcggttctaatctcgaaaatacattcgaggtcttgcgcggaatcggagcggaatgtgaaatggtatacgaactcccgccctttcggggcgtgtgcgcgttgaaaatgaagggggagtatttgtttgatccgctgaaatttttgagcgcgctgcccgtcggctttgaaatatacgaatccacccgcgccgtaaaggtggatacgaagcgcaaactcattcaaacggacagggcgacggtgcgggcggataaaataattatagcgacgcactatcccatcgtgaattcgcgcggcggctatttcatgaagcttaggcaatccatgtcctacaccgtcgccgttcgggaaaaatgtacggaaaatatgtatctcaacgagcgggaagacggactctccgtgcgtccgtatgcggaaggcacgcttttcggcggcggggaccataggacgggaaggatagaaagcgaacggcatttcgatagactgaaagagcgcgcgaaaagtcttttcggggcgaacgccgtcacgcattgctggtgtgccgaggacgtcatgaccttcgacgggatgcctatggcggggagatactcgaaaaataccgccgacgtatacgtggtgacggggttcaataaatggggtatgaccaatgccatggtctgtgcgtccgtattgacggatgcccttttgaaaagaaaaaacgcctatgcggaaattttttctccgcaaaggcatattaaaaaatcgttcggggattttacgtcgaatgcgatgactaacgcaaagggacttattctcggctatttcggcgtttcttttaaaactgccgccgacgtgcctgccggcagcggcatgatcgtcttttacaacggcaaaaggcgcgccgtctatcgggatttagagggaaatctgcacgtcatcgggtgtatgtgcccgcatatgcactgcgaattggcttggaacggcaatacgaatacgtgggattgcccctgtcacggctcccgtttcgacatttacggcaatatcctttccgagcctgcggtgaaagcttgtaagtacgagagaaagaacggggaagagtaaaaggcgattcctttattttactgccgatagacgagcggggacgaatagttcttttgaagatagccgaacgcaaaatcgatatcgcccagccaggcttcgatgtccgcttcgtttactaaaacgggaatgcggtcgtgaaagtctttgacgggcggagtggcttccttcgtcagaataatacagggattcttatcggaaagccgtttgtaaaagccgccgagaaataagggtttgtcgtcggagcgatgaaacagatatttttgcttggaggaagaccattcatagaagccgcttgcgggaagcagacagcgcctttcgaaaaaatcccgccgaaacatcggcttttccgtcaccgtttcgctgcgggcgttgatgatgacgcccttttcgttaaatttatcatatccccacgtgagcaattcggtcgtcacattcccgtttttcatcaccagagcgggaactttctcgctggggaaaatttcgcccggatgaagaccgtcgtaattgtatcttttttgaaggtcgttgaaaatgaattccatatagggatcgccgagattgaattcgaatcttccgcacataactaaatcacctctctttcagtatacaccttttctgcaatttttacaaacgcttgcgtatgccaaaacaaaaataaaggcatagaaacgggcgtttttctatttgtacggcagataggaaaagcgatttttaaccaaacgcatccgtatcgctattttcgcttaaaaaaatttttatagacgcgataggaaaacgtccgaagagggcgtttttttatgtgcgccgttttgtttcgacgcgcgccgaaacttcttaaaagaaacgttgacaaaaagagtgcatagccgcggcgtttatcgcccacatttacagtgacgcaatcgggagtatttgaaagagagaacttgaaatactttcacagtcctgcccaaatcggggaaaaacaggaataaaaaatagaaaaatgttttgtggaagcgttacaaacaacaaaattacaagaacaaaacacattctactattcaaattcctggaaaaatgttgtatccttattttggcattgtgatagaagtcaaggaaaaaataaagctttaaaaaggcggcagagatgacggaaacaacagatacgacgagagataaaaaaatggcggaatggagcgacgaggaaccttatcgggagcctgtggacgaaaccaagcctttcgacgtccgatatccttgggaactgcattacaacaaatatatcgaaaatgcgcagttgtccatttatgaaagcggctggcagcattgcagccccggctacaaatacggaccggcgcgctggggatattttcttctgcattttatcgaaaacggacgcggaactctcaccgtcaatcacacgagctacaagctttcccgcaatcaggtgtttctcactcttccggatacggatacgacgtatacggcggacgaagagctgccctggcactattgctgggtagggttcaacgggctcaacgccaaggagtttttgattaaatcggggtttatcgaaaacggcgtctatataaagtctttttcctcccccgagaagattttttccatctttaagcagatcaacgattataacgcccgggacgaagcctccgcgctgggtatgctgggatgtctttacgttctgtttgccgagatgttcagggaaaataaaaattttgaacttcccgtcgtggaaaatgagagctatatcgacagggcggtgcgatatatcaatgaaaattacggatttcccatcaccataaaagacgtcgccgattacgtcggattcgaccgcagctatttctttaagatattcaaacagcagatcggcgtatccccgaaggagtacctcatcaatcagaggatgtccaaggcgcgcagcctgatgaaagacaccgagtattcctgttatgagatctgcaaaatggtggggtacgaggattattccaatttttcgaaaacgtttaagaaaagatacggcaagacgccgcgggagtacgtggcgcagccctttgaagccgacgcgctgaccgaatgaccataggagataagcgcaaagcggcgaaaaggggacgcggagaagcgaggttattatgaaagaaacggaatgtaaaaagggtatcctgcgggcaaagacagacggcggtccgccgaaagcgggaaggcgaacgggcttcaacgaaaacaggctgcgaaagaatctgtttatcgtgggaatgctgtcgatagcgatcgttcattttctggtcttttggttgtacgtaaatttgagttcgattttaatggcgtttaagaacgtgacgatagaaggaacaaaatggggattcggaaacttcaaaattatgttcgacagttttaggaatcccacctcggagctgcgcggcgcgtttgtcaacaccatgattttttttgccgtaaatcttctcatcaagctgcctttgacctttatctgttcgtatttcctctataaaaagatcaagggatataaatactaccgcttcgttttcttcctgccgagcatcatttccgccgtcgttcttacgtcgctgctgaaatacatggtcaatcccggcggtcctcttcccagaatatacgagatgctgtggggcagggaagcgccgctgtttcttgcggacagcgactatgcgctgggcgtcatcctcttttataccatctggtccggattcggcgtcaatatcatcctctttcagggcgcgatgagcagaatcccgcccgagatcatcgaggcgggaaaaatagacggcgtgggaatgacgagggaacttttccaaatcgttacgccgctcgtctggccgacgatttccaccgtcgtggtgctggcgttcgtgggtatcttttcgtcgagcggggagatcctgctgtttacaaagggactttatgggtatgacgacgctggctgtggcgcatctggacgaacgggagcgggtggcggattgcctgcaaaagatctccgtttcgtcccggcatcttttaagccttatcaacgacgtcttggatatgagcagaatggatcgttccaaaatcgccctcaatctcgtcgaattgtctttgaacgacgtactcggccagctttcggacatcatgggtccgcaggcaaagtcctgcggaatcgatttccgcatacgcagggagaatctccgcggcgaggtcttttacggagattctctgcgcctcaatcaaattttgatcaatctattgagcaacgccataaaattcactcccgaaaacggcagggtggagtttgtcgcgcaggagatcgccgccgcgcagacggggcgggtgcgctatcgctttaccgtgcgggacaccggtatcggtatgcccgaagagtttatctccgagcttttcgtaccgtttgcgagaagcaagagcgcgggaaatgtcgagggcacgggactgggattgagcattaccaaaggcctgatagatttaatgggcgggaaaatttccgtggaaagcaaagtcggcaaaggctcgacattcgtcgtggaacttgaattcgacagggcgaaagagattaggaaggcgcctctgcccgcagaagggacagagaaagacgacgatcggatctttcaaggtcggttgtttctcgtcgccgaggacaatgcgatcaatgcggaaattttgtgtgaactactggcgatgcacggggcaaaatcggtggtgagaaaggacggcgcgcagacggttcgtgagttcgagaagatgccgcccgccacgtacgacgccattttaatggacattcagatgcccgaaatgaacggctacgaagcgacgcgcaggatacggagtctaaaccgttttgacgcggggacaatccccatcatcgccatgacggcaaacgctttcaccgaggacattcaaaacgctttaaatgtcggcatgaccgctcatgtggcgaaacccatcgatatggagattttgcgttcgactctggaaaaagtgcttccataatatatattacgtaaaaaagccaagagcgcggagaaacccgcgcccttttttcgtccgaaaatctctttttatcgccgtcgggaaaggggagaggagaagcgggaaaaattgctctttaaacgctggtaaattataccgccgaagggattgcttccggagagaggcgttttaataaagttgcgccataataaaggtatcgaaaagatgggcgaaaggggcggcgaaaggtatgcgtataggacattttttttgttttagttccgttttttcggaagtaaacgcggaaaaacgtatcataaactagtatttacacgggaataaaatggtgttataatgaatttacaaaaataaaaattcaggaggatgaaaatgaaaaagacggcaaaatcaatcggatttttagtgacgggtattttatcgttgagctgtattttcgggggctgcgccccgcagggcggcgactcgggagaaagtgcgggcggcggttttaccgtaatacgcttctggaacggttttacgggggccgacggcgaaacgatggataaaatcgtttccaatttcaacgcggcgtatgcggacgaaaagatcatggtcgtcgcggataagctcccctgggatacgctgttcaataaaataacgacgacgagttccaatttaaagaccgcgcctcacatcgtggcgatgtcggcgagccgtatcgcgggaatggaggcaaaaaaaatccttcttcccttggagggaatcgaagaatatctgagcgtttccgagtcggattatatttccgcggcgtggaacggcggcgtcctgggcgacgtgcgttacggttttccgctggacgtgcatccgacggcgatgtattataacaagaatttgattgccgaagaggaacttccctctacctgggacgaatttctcgacgtgtgcatcgaaaagacgaaagacggcgtctacggctggacggtcccttccatgtactcggtgacaaaagacgtgtttctcaatatgttatacagcgcgggcggctccatgttcgacaatggaaacaaagccgttttcaattcctcggtagcggaggagaaattgcaatatctctacgatctggtgcacggcgaaaatcccgtttctccggagaacgtaggctccggtggcgacttcaccctgttttcgcagggaaaatccgtgttctatttcgacggtccctgggtcatcaacactttcgggcttttcgataatcccgacagcaatatcggcgtggcgtcctgtcccgattcgttaggggaaggacagctgaattttgcaggctcccatcagtttaccctgatgaaaaacaccgtcaccacggacacggtcagaaatgcgtgttacacgtttatgaaatatgtcagcgaccattccctggactggggaaaagcggggcaggttcccgcgaaaaaatccattcacgaaacggcggaatacaagagcctcgccgcgcttcaaccgtttacgcagatggcatataactcgacgctcggggagatcgattataaatattggtacgaagcttataacaacatgggcgtggcggtatccaatgcgatttccgatatctcgaagccccgggatgctctcaatgcggcggtgagcgatttcaacgacttcgtaatcgatcaggagctttaatttactgccatgaatacgcagataaaagaaaagcggacaatgttttccgcgagaaaggcggtgccgtatctattcgtcgcgccctttatgatcgcgtttatcacgttcggtctgattccgctcgtcatgtgcgtcgtcatcagcttctgcaagtgggattatgcctcgcccatggagtggtacggtctgaacaactacaagctgcttttgggcgtgatcggctcgggaaaggtggcgaaggattttagaagcgcgattttgcacacgttgcttttcgtcgtggtggaaacgcctctcctcatcgtggtgccgatgctgatcgctcttctcatcacccgctgctcggcggtgcggaagttttcgatgggatttttctacttccccaccattctttccatcaccaccgtctgtattctctggaatttccttctcgatacgaattcaggcatcatcaatcattttctcggcagggagattccctggatcacacagatgccttacgcctggatttctatttttctgctctccacgtggtggggcgtcggcggcaacatggtgctgtatatcgcggggatcgccaatgtcccgcaggagcttttggaggcggcgaccctggacggcgcgggcgcggtgaaaaagtttttctccatcacgttgccgtgcatgagaatgaccatgctctataccatcgtcacgacgacgatagggagcttcaatatgctggggcaggcgcaggtgctgacggcgggcggtccgaattacggcacgagaacggcgatgatgatcatctacgataccgcgttcggcggcgtcaataatttcgggcgctcgtgcgcgatgtccattctgttcggcgccattatgcttgtctttacggtgacggcttatcggttgcaggtagccggcgacacggagggctgatatgaacgagcaaaacagagtatccttaaaagaaaaatggaaacgctatcggctgaatcactccgcacaatccatcgctgcttccgccgccctgtatttcctcctcttcctttgcgccatggcgatttttctgccctccatctgggccgtgatgacttcgtttaaagaggaaacggaagtattggacgccaacgtgacgctgtttcccaaaaaatatatactcgacaattacaggcatattttatccaatcataacgtgcccattttccgctggtttttcaacagctttaagatcgcggtgacgtatgtggtgctgtatcttctcatctcctcgatggcggcgtttgccttttcgaggctgaaatttaaaggcagggacgccatgttttggctgggtatgtcgtccatggtgattccgggcgtcatcaatatgattccccattatatcatcatcgataaattgggtttggtggacaatatgttcgccatggtccttccgggtctgggcggcgtcggcggggtgttcctgctcagacagttcatgaaaggggtgcctatggcatacgacgaggccgcgaagatagacggcgccaacgagtttcacatctattggtacgtcgttctgcccatgtgcctccccgtgctggtcacgctggcgatcttctcctttcagggcaattggaacgattatgtctggccgttgatcgtcaccaattcggcgcagtcgagaacgctgaccgcgggacttgcgacgttttcgggaagctatgcccatcagtacggaaaacagatggcgggcgctgtgctttcggctctgcccattcttctgatctttgtgctcgggcagaaatactttattaaaggaatagccataggaggaattaagggatagtgggagaaattactaattacggcaaacgctgcccgaatccgcaatttgaaaggaaagactgtttttttctgtgcggggaatgggatttcgcttttgccgacggacagagcgaacctcctgcctttgacaaaaaaattattgtcccgtacagctacgaatgcagggcgagcgggataggcgacgagcgcgttcacgaatgcgtgtggtacgagaggacgttttttctcaaagaacacgcgggaaggattctgcttcatttcgaagcagtggactatcaggcgttcgtctatgtgaacggaagtttcgcgggcgaacacaagggtggatttacccatttttgtctggatattacggagattgcaaagacgggggaaaacaagctcaccgtcaaagtgctggacagtctggataaatcccaattgcgcggcaaacagcggacgaaaacggaaaattacgattgctggtatgtgcagacgacgggaatctggaaacccgtctggatagagtacgcggggagcgcgtatttgcaaagctgttgctttcaggcgaagtgcagcggtaaagttgcggcggaatttctgttgagcgaagcggaagagttggaattcgtcgttacggacggggagggcgccgacgtctacgcggcgcgcctgccgaagcagggaaaaaaggtcggatacgcttttgacattccctcgcccaagctttggagcggagaaaaccctcatttgtacggcgtaaaaatccgcgtcttaggaaaaacggcggacgaagtgcatacatatttcggcatccgggagatcgaagcgcgggaagacggggtgtatatcaacggcaaacgcgaatttcagcagatgatcctcgatcagggatattggaaggacactatgctgacggcgccgggcgacgaggcgatcgaaaaagacgtccgcgccatccgggaaatgggattcaacggcgtgaggatgcatcagaaggtggagagttttgtcttttattcgctgtgcgacaaatacggcctgtacgtatggggagaaattccgagcgcgtacgcctttgacgaaagaatgaaaacggagtttctccgcgattgcacggatatcgtggaacagctgaaaaatcatccctgcgtggtcagctgggtgctcttcaacgaaacgtggggcgtcagcgacatcaaagagaacaaagaagaacagaatttcgtacagagaatgtacgaggaggtgagaaaagcggacgacaggccgatcatcaccaacgacgggtggtatcacctcggaagcgacatcctttccctgcacgaatacgagcaggattccgaaacggtcgccaaagaatacgcggataaggcgtacgtggtggcgaataaaaaaatcaacgcgaatttttacggctttgcctttgccgacggctaccgctacggcggacagcccgtgatgatttccgaatacggcggaatcggcgtcgagggcaaggagggatggggatacggagataaggcggagaacagcagggagtatgaaacccgtttgcgaaaaatcgtcgattccgtgatggggattccgtatctgacggggtgctgctatacgcagttcaccgacgttcagcaggaagtaaacggtctgctcgacgcagacaggcgccccaagctgcccataaagacgattcgggagattttctcccgacgaaaataaggaggcggacatgaaaaaaacgaaaaaatggattctcggcttgcttctcgccggctgtctgatgctttcgcttcctgcctgcggcgaaacggaaaaaaaagcggaggaagaaccgtatcaggcttctttggcggtaagcttttccgccgcaggcgagaaagagtatgtcaatcccttgatttacgggcagtttatcgaacatatcgaaacgtgtatttacgacgggatctgggcggagcaggtgctggacagaaagttttattacgaagtgggaaagtcggggctttcgccgtggaaaacgacggacgaaagcaaggtcgtcagcgaaacgagccttacgctttcgggcgggcactccgcgaaaatttgcgcgggcggggatatttatcagcaaaaaatgtcctttgaaaaaaaggagtatgcgggatatttccactgttatacggagagcggctgcaccgttaaaatttctcttgcctatcgggacagcgaggtgagcgcttccgttcaggtgcccgcgaacaaggagtttacgaagtttacgtattccctttcctgcgatttttccgcgctcgcgcaagggacgtacaaattcgaagtgacgaaaggagaggggtatttcgacagtttatcattgatgcccgccgacaattacaagggaatgcgcaaagatacgctggaaacgctcaaagaactgaacagtccgttgtaccgctggcccggcgggaatttcctttcggggtacgactggctggacggagtgggaaatatcgacgaacggccttcgcggcgcaatctccactatatggggctggaaagcgatttcgcttccgaagaagcgatgatttcttcggacatcatcaaattgaactccctcggtttttacggcggcatagagccgaacgattacggtctggacgagtttatggcgatgtgcgaatatttggacgcggagcctttgatgatggtcaacgacggactggggagcgtggaggacgccgcggcgcaggtggaatactgcaacggcagcgcctccacgaaatacggggggatgcgcgccgccaacgggcatacggagccgtacgccgtccgatattggggcgtaggcaacgaaatgttcggcaattggcagctcggacacgtccccgtagccgaatacaccgttcggcacaatactttcgtagacgcgatgaaaaaggtggacaaagacatcctgatcgtcgcaagcggagaaaattcctccgcttggtcggattcgctttttaaatcctgcggagagaaaatggatttcattgcggagcatatgtacgccgtacaggacaatacggacgtgtttgcgcaccttagaaacatgaagacgaatatcgagggtcgcatttccaatcatcgggcgctgctggcgaaatatcccgcctgctcggacgtcaagatcgcctttacggaatacgcctacgccaatgcgaccaatccttcccgcttaaaggacggcatgggcatcggggaatttttaaactcggtcatcgccaacgcggacgtgtttgaaatgtgttgttattcttcgacggtcaacgcgacgcagggctgcgtcaccaccgaagtgggcggggcgacgatgcagggcgcgggatacgttttgaagctgtatcgggattatatgcaggaatacgcaatccaaagcgcagtgaagttcgatccgacctttcagctcgacgtcagcgtgacgatttccggggacggaaaggctttgtccgtcgccgtcgtcaatccaagcgagtttgcggtgcggctgaacaacgcggcgtttacgaaggcgcagggaattgcccgccgcaccctcacgggggactattacgattcctataattccgtcgcgcgggacgagatgtatatgcaggagaaagacaatctcgccaacgtggtggctccgcccatgagcgtcagcgtgttcgcaatcgatttataaggagaaaactatgaaaaaaagaattctgacaatggccgcggcgctcttgacggcgctgacgtgtgtctgcgcctgcggcggaggcgaaacgtcccaaagccagaatagcggaaacagcgccgccgaatacgacctcgaatacgcgatggcgatcacgtccttagaagcgggaaacgaaatatccccgctcatttacggggagtttttggagcatattccgggctgcgtatacggcgtcatttgggcggaaatgctggaagacaggaaattctattatcccgcgggagaggagggattgtccccctggaagacgaaaggcggcgtgacgagcgacagcgagtgctattctctcaacggctacgccgccgttctcgaaaaaggcggagagatctctcaggaagtcgtgttttcgaaaaaagcgtacgcgggatatttttacgcgagcggcgacggaaagatagaagcggatatcgggggcgtcaaaaaggagttcgagatagagggcgaatttaaaaaatacgcctttgaagcggacagcgcggcagagggaaaaaggaaggtttccttttcctgtacacaaggaaacgttaaattagacagtttctccctgatgcccgcggacaactatcgcggtatgcgcagggacacattggacgcgatgaaagcgctggcgggaacgatctatcgttggccgggcggcaacttcgtatcggggtattgctggaaggacggcatcggcgatagggataaacgcgcttccttgcgcaatcaggcgtggtttcccgaaacgggaaatatcgaggacgacaaaaagcggctggaaagcggcttttacggcaggatcgagccgaacgatatgggtacggacgaatttatggccatgtgcgaatatatcgggacgatcccctatatggcggtgaatacgggcagcggcacgaaagaggaggccgcgcagctggtggaatactgcaacggcgattcgtctacgccgtacggcgcgatgcgcgcgcaaaacggacgggaaaagccgtacgggatcaggtattggtgcgtgggcaacgaaatgcagggggactggcagatcggtcacacctccgtttccaattacgtccaaatacacaacgcgttcgtggacgccatgagagaggcggacgaagaaatcgtcgtcacgggctgcggggacaattgcagcgagtggacggaggaaatgttcaaaaactgcgcggggcgtctggattatatcgcggaacacctctacgcggtgaacgataaagaagtgacgacctctttgcatatgctcagcatgacgaacaacctcgatatgcgcatcgaaaatcatcggcgtcttatcgcggagattcccgcggcgaaaaacgtgaagatcgccttcgacgaatacgcctatcagtggaatgcgcaatcgacgatgcgggacgccctggggattgcgagcgctctcaatctctttatccaaaacgcggacgtcgtcggcatggcaaactattcggacgccgtattcagcatttccacggcgaacgcgccgggcgctctctatgcctccgaacaccgcctcgtattttcgcctatcggatatgtcttgcaagcttacgcgcagcatatgcagccctatgccgcggaaatgacgatccgccagacggataaaacgacgggcttaaactatcaggcgacggtgagcaaagacggaaagacgcttgcgatagcggtggcgaatccgtccgaaaagacgatcgcgctcacttggaaaggacagatcggcaaggtggaaaaacagatcgaagtggtcggaaaaacgcccgcgtccatgaataactttgcggaagaggacgtcgaaaggacggaaacgaaagcgcctgctcaaatggtgttgcagcccgtcagcgtcaatgtgtttgttatacaaatcggatgaaaccgtgaaaacggttttaaaataaattttttaaggagggattttgtatgaatctcaaaaaaatctttttgcccgtacttctggctatcggaatgatgatcggctttgcgggctgcggcgacggaacttcttccgaatcgatccccgaacccgttgtggaaacagtcaccgacaaagtttacgacggcttcggcacctttacgggcacgacggtggacggcaaaccgaccgaaggaaaactggtgacggatgagtatacctacgagggcacttttgaggacgggttcaaactcacgggaacgggaaagctgacctataaaggcgaggacgcgggctggtccgaaggcacgtttgtcaacggactgatggacggctacggacaggtctactatacgggcggctatcacggcatcggacagtggaagaacggaaagttgcaggggaccgctttctttgtctggccgcagggcgaaggcgcttacgattggtattacggcaactgggaaaatcagcagcgagtgggcgaagacggatattatcagtttaataacggatgctattattacggggagttcgcgggcgactggatcaacggcgaaggcactttccattgggtaggcggcaatttctggacgggaacgttcgagggaggctctcctaagaagggtacatacggctacggtcagatggacggcgttcaaggctatatcgcggtagacgcggaaacgggcgcatggagctggtacaacggaacgctcgaagacgggaccgaagtcgtaaacggtcagcccgccgaagcggaataagataaaagagcaatacttaaaaacagagaggtgacatggatgaaagcaaaaaaaatatcggcgctgttcgcggtgtgtgcgctcggactcgtttccctttacggctgcggcggaaggggatcggaaaataacgtacagacgatccaattggaagacggcagcgagtatgtgggcatcgtgacggatggcaagccgaacggcgagggcactttgacgaaccttctcggcagcgaatggaagggaacgttcaaagacggcaagcttcaagggtacggcacctatctcggctacgatctcgtggaatacgagggctttttcgcggacggggaattcagcggctacggacaccagagcggcgcaaacggcgacgagtattggggtatgtttgaaaagggcgccaagaacggcgtgggaagaatggaatatacgacgggctgcgtctacgaaggcggctgggtggacggttttatgcacggcatgggctggatgacctggcccgtgggcgacgcatatttcggggaatggaaaaacggcaacccgcagggctttggctgtaagatattctacgacgccgctttcagcgtcaaaaacgactattccacctataacaaatacgtgggaaatatggagaacaactttcccgacggctggggaatcatgtattttcaggagtcgggaggcgtttacgtgggcgattgggacacgggcatccgcagcgacgaacacggcgtttactacttcgagtcgggcagcgaattcgtcaagttcgaaggcgcgttttccaaggaaaaaaacagcggctggatctggggcgaaggcacgatgtggtacgcggacggcagagtggtgacgggcgtttgggaaaacacgacgtgcgtagaagaaaagacggaacagaccttgtcgaacgtttccgtcgtctatgaagaagcggaagcgcaacgggcggaatttttgtcgaatcccctccttttgcagacgatggaaaaaacaaagtaaagcaagacgtttttgaggaaaaggcagccgctgcgcttttaagcggagccttttctttgaaggcgggaatagagaagggagaaaaacatgaaaattcttaaaaaatcgatatacgttttcattgcggcgattttatgcgcggcgggactttgcgcctgcggcggtaaaacggaggattcctcgtcgagcgccgcaagggaagaaaaggtattgatggtcggcgattcgctgtttgacctttggaaagccacctgtgaaaaggacctcgcgggcgcgaaaaatctcacgaatatcgcggtcggaggcacgaacggcatttattggtcgaagagcgaaaagctccttatcagggaggatccgacaaaaatcatcatttcgctcggcacgaacgacatcgccgacctcaggcgcacgggaaaggaggcggcggaatgcgatacgggtctgcaaaatgtattgcagactttccatagagtgtgccccgacgcctatatttatctgctcaccgtcaatatctgcggggaagagatccgttggagcctcaaagacgaaataacggagtgcaattccatcatgcgcgaatattgcagtcgatacgactgggcggaaatcgtggaaaccgagtacgctttttacgatgacgcagactatacaaagaaaccgagcgccgaatattttgtaagcgattatctgcacttttcttcgaagggatactcccgattaaagaccatcgtgcgcggcgctctgcaattggattgatcggacggcggaggaaaaatatatgaaaaaacgcggattttttatagcggcattatgtgcgcttttggctttggtaggtgcctgcggcggaaaaaagaacgaatcgtcctcgggtggggagtcttcctcctactcatcgcggcaaagcgccgagtcgacgatggtttcctcttccgaagcggaacaggcggaaaaatgccttctggtgggggattccctgttcgattattggaaagagggatgtcaatccgcccttgcgggcgcgcccgatctcacgaatataggagtcggcggatccaccagtgcctattggcttttgcagctcgcaaaactcaaaaatgagaatccgacgcagatcgtcgtttgcgtcggcacgaacaatatcgggttggggcaaaagggcgtcacggcggcgacgggaagagaaggtttgcagccgatgttgaacaaatttcacgaggcttgtcccaatgcttacatatacttccttacgatccccatttgcggggaagaaacccgttggggagcgcgggaagaaaccaagacctgcaacgagttgatgagaagtttctgcgagaaaaaagagtgggcggaaatcgtggaaacggagtacgccttttacgatgacgaggattataccaagaagcccaatcccgaatattttacgggcgattatctgcatttttctcccaagggatacgaggtgcttgggggaattctccgcggcgctctcggtttggaaaataaataaaaacggcgcgtgcggcgaaatataaagcgaaagaaagaaacagggcgacggaatttccgcgatgaaaaaagaaaaaacaaaaagggtattgaaaaaaacttcggcgtgtgctataataaaaacgagaacaggggagcgcgaaggagctgcacatagttttatgcctgacccaaaactctgccgttctctaagaaaggcgagggggcgcgggcgcggagagaacgcatatgttttcgccgtttctctgactatgacgcgctctgtcgcggcgcaaaggaaagtacctatgcgcaaggcgcttgcggggctttgcgcatcctgttcgcaaatagcccgctatgccattctaagcctgctgatcgccgcgcagttgttgtgcgcggtcgcctgcgggggaaaacgactgctcgaaagcgagatcggttacgaggaaagcgaaatgttaaaggaagcaaacgaatacatcgaggcaaatcaagggacggtcaacggcagattccgcggagattatcatttacagccccaaatcggctggatgaacgatcccaacggattcgtctattacaaaggcaactatcatctgttttatcagttccatccgtacagcgcggacggcgggctgatgtattggggacacgcggtcagcgaggatctcgtatcgtggaaatatctccccgtcgccctggcgcccgaccgcgattacgatgcggacgggtgctggtcgggttccgcgatcgtcgaaggcgataggctgtatctcgtctatacggggcattacgaccgaaacgggaaaagggtgcagacgcaaaatctcgcctattcggacgacggaattcattttttcaaatacgaaggcaatccgatcatcggtcccgcacagcttccggaagggacgagcgcggccgatttcagggacccgtatatctggaaacgcgaaggaaaatactatattttgatcggtaccatggaagagggcgcggcaaaagttcagctgtatcagtcggacgatctctttcattggtcgtatgcaaacgactttttgcgccgcacgcacgcgggatattgctgggaatgtccgagcctcgttacactgaaagaaacggatctgttcgtctgcgcgcccgtggattatccgcacggggagtatgcgttctggaattataattccaatgtatacgcgacggggaaagtggattataaaacgggaaaaatgcaggcgtcggcgttttcggaaatcgacgcgggactggatttttatgcggcgcagctcatccgaggcaaagacgagaaaatcgtgatgattgcctggatgaatatgtggaacagaaaaaacgtgacgtcatggctgggcgacggctgggcgggcacccagatcctgccgagggaagtaagcctgcgggaaggaaaacttgttcaaaagcccgcagaggcgatttacgggtattgcaaaaataccgtgcgcatagaggactcgctggaaggaagtagatcgtacgaaaacgtcgagggcagaagcgtgcgcctgaaaatttccgcagatctgaaagaagcggagtctttcacggtttccgtctttgtcggccgagattgtcatacggatatttcttacgagaagagcacgcagacggtgaaattcgaccgttcgaaaagcggttatccgattaccgccgacgagcgcgatatgtcggaaggcaggtaccgtttggcaaagtatccccttgacaacggcgttttggaaatggagatatttttggataaaagcagcgtggaaatatttttcggcaaaggggaactgacgatgacctcgctttcctataatgccgaaaccgcttcgggaatcgtgttttcctgcgaagggaagaccttggtgaatatggaaaaaagcgatatcgtcctttgaggtaaacatggaaaaaaactgcacgattttttttgacgaatacggcaagctgctcgatttcgcggcggcgctctcttctcccatccggatgcggatcatgaaggaacttgcggcgaacgccatgagcgtaaaggagatcgcgctgaaactcaacattcccatgtccacggcgtccgcaaacgtgaagatgctcgaagaggcggatttggtccgcacgtcctatcaggcgggaaagcacggctccataaagctctgcgcgataaaatacgaaaaggtgttcgtggaatttacaaaatcccccgagagcaaagaatggagccgctatatcgtcgatatgcccatcggcgagtttttcgatatggatatccgtcccacctgcggcatggtggacgaatataaatttatcggcaaagacgacgacgtgtgttccttttacaatcccgacagagtgcgcgcgcagctgctctggttcaacgacgggtatctcgaatatcgcttcccgagaaatttcgaatatctctatcttaaaaacattcagttttctttcgagtgctgctcggaagcgcctggttacaggaacgaatttccttccgacatcactttttggatcaacgacatcgagatctgcgattggcgcagtcccggggatttcggcggcgtaaggggaacgtatacgcccagctggtggccgatcaattccacgcagtacgggactctgaaaaagataagcgtcacggaaacgggcagttttttggacgacattttcgtgagcgccacgaatcttaaaaagctcgacatttccgcgcgcaattatatttcttttaaaatcggaatcaaacccaccgcgaaaaatataggcggcatcaacctgttcggaaaaaaattcggcaactatgcgcagaatatcctcatggtgatcgagtatgcgaaaaaggaagcggagagaaaggaaggcgacggggagaaagactcctttaactttaatcaaacgctttaaattttacagggcgttttcggcagccgg

SEQ ID NO: 418 - DNA, 32759 bp, Unknown
  16S sequences of unknown bacteria
tctgtatgaactcttttatttccctaaagtgttgcacttaatagtataattcacccaaccaaaaaaagagggggaagcgtcgcttctccctctttgctatggatttttcagtcgtcggcataccgtttggccaggcttttcgcgcagacggggcagacgttgcgccccttgaacgtgaccacgtcccgggactccccgcagaaaatgcaggccggctcgtattttttgaggataatggtgttgtcctccacaaatacctccagtgcgtccttgtcctcgatttccatcacccggcggcattccaccggcagtacgatgcgtcccaactcgtcgaccttcctgacaattcccgtggatttcatcatgtagtttcatcctttctgttacggccttccgaaacctggcggattcatccggcttcctgtttcttttacaatttaacaaaattatatcttttatgccaatttatgtcaatcataaagtggagatctgtcactactggtttccaaaatttatcaattgcctaaaaatacatacaaaaatctttttataatcaggagttaagccctgatcttgtatgtacaaaaaatttttgcttgacctttcccagcgaatcttgtagaatatcttgtgcatatttgatttaaaccgttacggtttaaaccgataaagcgttcggccggtcaccctgtgtccgtccgtgggaggcagcatccctgaaacgaaaggatggcgtcgtcatgcctaaggaagcggttatttgggtgaccatcggggtctattttgcgttcatgctggtcattggcctgatcagcagccggcataccaacagtatgggggagttcaccgtcggcggtcgtaacgccggcgcctggacctccgccttgtcctatggcaccgcgtatttctcggcggtgatgttcatcggctacgcgggcggcactggctggaaatatggcctgtggggcgttctgcccggcatcggcaacgcggtgttcggttccctgctggcctggctggtgctggcgcggcgtacccggtcggccacccgccggatgaaaatcaaatccatgcctcagtttttcgacaagcggttcgtcagttcccctatgaagctgttcgccaccttcgtcatcttcatcttcctgctgccctactccgcctcggtctataaggggctgaccagcgtctgtgcggtgctgctcaaggtggacgagcggatctgcatggtggtcatcgccctggcggccatggccgtggtggtgctgggcggttatgccgccaccctgaaggcggattttgtccagggcattatcatgttggtgggggtgaccgccctcatcgtggccgtggtgcgctgcgaaacggtgggcggcctgcaggccggcctcgccgccatctccgccaaaaccggggagctgaacctgggcctgaaggagcaccttggcttgtgggccaccgtgctgatgacctccttcggcacctggggcctgccccagatgatccataaatattatggcatccgggacgataaggaggtcaagcggggcaccgtcatttccacgctcttcgccctgctggtggccggcggcgggtatttcatcggctccttctcccgcctgtttttctccagcctgaacgacctgcccggcgccggcgccggcaaccccgactatctggtacccaatatgctggtggacgcccatctgcccaccgtcctgctgggcgtggtgctggtgctgctcatcgccgcctccgtttccaccctggcctccatcaccatcaccggatcctccaccctgaccatggactgggtgcaggcccgcctgcgccccggtatgagcggcgcggccaccgcccgtttgaccaaggcggtctgcgcggtgttcattgtcctgtcctatatcatcgccaacaccgacacccctattctcgatatgatgtcctattcctgggggattctgtccggctccttcctcgccccctatctcctcgccctgtactggaaggggatcaaccgggcgggcgcctgggccgggatgatcggcggctttgtcgtcgccgccccgccggtgatttgcaagctcctgtttcctggtgctgtcctgcccttcttcggcaggctggtggactgcggccctcatttcgcctgcctggccatggcggtctccttcctcctctgtttcctgggcagcgtccttgcccggcgggccggctggaaatccgcggccgacaaccccgctttctatgaggagacagaggcccagcccgtcgccggctgaacttttcgctttacttttccccgcaaggggggtacaatggtttaaagcacaaaagcatgaaagcatggaggaggactcccgcaatgaacgccatttggaacaaggacatggaatgtatgccccgccgggacctggagaccctgcagctggaacggctcaaggctctggtggattactgtgaccggaatgtggagttttaccacaaacggctggaagccgccggcgtgacggcggataaaatcaaggtcctgtcggatgtgcagtacataccttataccaccaaggccgacctgcgggatacctatccgttcggtatgttcagcgttccccgcaaggaactgatccgtgtgcacgcctcctccggcaccaccggcaaccccaccgttgtgggctatacccgggaggatttggacaactgggccgagcaggtggcccgcgtggtggtggccgccggcgcgtcggacgaatcgatggtgcagatctgcttcggctacggcatgttcaccggcgccctgggcctgcactacggcctggagcgcatcggcgccaccgtggtgcccacctcctccggcaacaccgagaagcagctgaaattcatgcgggatttcggcaccgataccatcgtcgccaccccgtcctactgcctgtatctggccgaggccgcccgggaggcgggggaggagttccccatggatcggtaccggctttccctgggcctgctgggcagcgagggctgcaccccggaaatgcgggatcagatcgaatcccggtggggcggcggcttcttctgcaccgataactatggcatgtccgagctcaacggtcccggcatgtccggcgaatgccgcgagcgggccggcctgcacatcaacgaggatcatttcctgtgcgaggtcatcgacgcggccagcggccaggtgctggaaaagggaagcaccggtgagctggtggtgaccaacctgaccaagcggggtctgcccatgctccggtaccgcaccaaggacatcacccgcatcgattacagcccctgcgcctgtggacgcaccaccgcccggatgcataagatcatcggccgcagcgacgatatgctgaaaatccgaggggtcaacgtcttcccttcccaggtggaaagcgccctcatcaacatcaagcacatcagcccccattatcagctggtggtgcgccgcaagggctatgccgataccctggaggtgcgcgtggagctcatcgacggatccctgctggagaaatacgccgagctggaagccctgcagaagaatatccacgatcgcatcaaagcgatcctcggcattgaaatcgccgtcagcctggtggagcccaagtccatcgagcgtttcaccggcaaggcccagcgggtggtggacctgcggggacagaaataagtttacccatatcattcgaggggacaaggctttggccttgtcccttttgtcaagttgatatgtgaatattattcacatatcggcccgcctgtcaaaaaggacgcccttcggcgcccttttcccatttgtattattttgactgaatcgacaaagtgtattcgcttggcgtcatgcctgtcgcctgcttgaaatagcgggagaagtaatgcaccgacgcgtaccccagcttgtccgcgatttgggtgatgttgccgttgccctcccgcagcagcaccttggcttgctcgattttcagccagcggtagtattccatcacgccccgccccgtcgccgccttgaagatggtttttagattggtggcgctctgggcggagaagcggcagactgctgagaaggtcaggttcccggccacgttctcctccatgtaggcgatcacccggcgcaccaggtcgttgtccgaccgttttttcaccgaggaggactccttgactgaatccgccggctccgcccctcggcgcaccagccggatgagcatttgctcgaggagcatgccgatcatctgctcgctgccgaaagcgctggagctcgcccgttccatcctcaccgtgcccgggtcgtcgagcggggtggtgaaggcgtcccgcgcctcgttgaccagccgcgccagcagctccctctcatcctcgcccgccttaaggattttcccctcgaaataggtcatggcgggggaggggcacacaaacgccaccaccaccaggttgggggccaccaccccgttggcgaacacattgtggaattcgttcggcttgtggaagatcatctcgccccgcttgaggcggtagcccacctcgtcggccatgacctccacctcgcccttgtccacgtaaagcagctcccagaaatcgtgccgctctccttcaaaaacataattcttggcgtattcgaagtagtgcacggtcacgatggactgcacgtcgatgaccttgcgcagttctgtggcgatatagctgctcatggaattcctccttttcggtaagtccggatgaaaccggccctgccttcatgggctgacgatataattcagctgccccacaacctgcccgtcccggacgaacaggcggggcacccgcttgctgatttggcagacaacttcgtagttgatggtgcccatgtgatcggccagctcctccaccgggaggaaggcttccccgtcccggccgaacacggtcgccaccatgctttcccgcacgtccagcccggtcacatccagcatgcattggtccatgcacacccggccgaccacccgcacccgccggccggccagcagcatgtcggcccggttggacagcacccgggggtatccgtccgcgtatccgatgggtaccgtggccacccgccgggcctccccggtggtgtaaatgcgcccatagctcaccggcgtgtccgccggcaaatccttgatcatggacacggtggttttcagctccatcaccggatcgagcggcagcatcccctccatccagggggcgggggagaggccgtacaggatgatgccggggcgcaccatgtcgagatgcatctccgggtaccgcagggtggccgcgctgttgcagcagtggcgcagcgcgaaggacacgccccgttcttccagccgccggacagcgtccataaacagggcgaactgccgccgggtgaagcccccgtcctcctcctcgtccgccgaggcaaagtgggtgaaaatcccttccgccgtcaaatggggcagacggcaggcggcggccatgtcgtccaggaccgcctcgtccccctcccggtggtagagaaagcccacccgggacatgccggtgtccaccttcaggtgcacccgcacccgcacccccgcggcctgggccgcggcgtccagctcctcggcgtaggggcgggagagcaccgtctgggtgacggcaaactcggccagccgccccgcctcctccggcggggtaaagctgaggatgagaatgtccccatcgatgcctgcccggcgcagctgcacggcctcctccaggttggagaccccgaaccaggccgcgcccgcctgccgcagggctttggcggcggcggcggcgccgtggccgtagccgtccgccttgaccaccgccatggcctggctgccgggggccagggaggcctgtattgcctgaaaattcccctgcagacggtccaggtgaatctccgcccaggtgcgtttcaagaattcggacatgaaaaaccagcagcctttcgcgtattttttcgctcaattgcgcatgcttgttgcgtatacgctatccattatacgttgtttttcgcaattaatcaaacgttttcgctcggattccgtctatgcccctccttcccaattctgcggggtgaaggggacggaatttcatgcttttatctatttcccttccgggggatttatggtaatataaagagtatacacggacaagggggcgcccctgcattgtatcgtatgaagtgaggagttaaactatgtcgaatgtgatccgggtatttgtggaaaagcgggagggcttcgacgtcgaggcccggcatatgctggcggatttgcgggataatctggggctgaccaagctgaccggcctgcggctgctggtccgctatgacatcgaaggcctttcggcggaggaattcatccgggcgcggggcgtcgtcttctccgagcccaacgccgacgatgtgtacgacgaggaattcaccgtggccgagggatggcgggtgttcgccatggaatacctccccggccaatacgaccagcgggcggattccgccgcccagtgcgtccagctgctcacccagggggagcggccccgggtgcttaccgcccgggtggtatgcctggagggggcgctgaccaacgaggaattcgctcgggtgcaggcttatctcgtcaacccggtggagtcccgcatcgcctccctggacaagcccgagaccctggatatcaccgccgacgtgcccgccgacgtggcgcgggtaaccggcttcaccgccatgtcgcaggaggaaatcgccgcgtactggcaggccatggggtttgccatgtcggcggcggatctcgctttctgccgggactatttccgggacgaggagaagcgggatcccagcctgactgagctgaaggtcatcgacacctactggtccgaccactgccgccacaccaccttcctgacccgtttggatcaggtggccgtggagccgggcggagccatttccgccgccatcgaggaggcgctggccgcgtactacgccgcgcgggaagaggtttacggcgagagactggctaagaaaaacgtctgcctgatggacatggccaccatggggatgcgcctgctcaaaaagcaggggaagattccggatctcgacgagtcggaggagatcaacgcctgctccatcgaggtgccggtggtcatcgacggccgggtggagaaatggctggtacagtttaaaaacgagacccacaaccacccgacggaaatcgagcccttcggcggcgcggccacctgcctgggcggggccatccgcgacccgctgtccgggcgggcctacgtttatcaggccatgcgggtgaccggcagcggcgacccgcgcatcggcctggcggacaccctggagggcaagctgcccactcggaagatcaccaccggcgcggcggcgggctattcctcctacggcaaccagatcggcctggccaccggccaggtggcggagctgtacgaccccggctatgtggccaagcggctggaaatcggcgccgtggtgggcgcttctcccaaggaaaacgtggtgcgggacgtgcccgtgccgggtgacgtcatcgtcctgctgggcgggcgcaccggccgggacggctgcggcggggccaccggctcctccaaagcccacacctccgaatccatcgacacctgcggcgcggaggtccagaagggcaacccgcccaccgagcggaagatccagcggctgttccgcaaaggcgcggtgtcccggatgatcaagcggtgcaacgacttcggcgcgggcggcgtatgcgtggccatcggcgagctggcccccggcctgcagatcgatctcgacaaggtacccaagaaatacgaggggctggacggcaccgagctggccatctccgaatcccaggagcggatggccgtggtgctggcccccgccgacgtggaggcgttcatcgccgccgccggggaggagaacctggaggccaccgccgtggccgtggtcaccgccgagccccgcctgcgcatgaactggcggcaggacacggtggtggacatcagccgcgcctttttggacaccaacggcgtgacccagacggcccgggcggccattgcggccccggatccggcggccgattaccgcaccgccattccggcggggctggcggtcatcccgctggccgacgccttccaggagaatctccagcggctggaggtggcctgccagaaggggctggccgagcggttcgacgcgagcatcggcgccgctaccgtgggcatgccgttcgccggccgatatcagctcacccccgaggagggcatggtggccaagctgccggtgctccatggggaaaccgacaccgccacggccatggcgttcggcggcatccccggcatctcccggtggagccccttccacggcgcggcttacgcggtggtgcagtccctggcccgcctggcggccatgggcgccgacccgctgtccgccaggctgaccttccaggaatatttcgagcggctgcgggacgtgccggagcggtggggtaagcccgccgccgcgcttctgggcgcgttcctggcccaaaaggagctgggggtgccctccatcggaggcaaggattccatgtccggcagcttcaatgagctggacgtgccccccaccctggtgagcttcgcgctgagcatgaccaaggcgtcccagaccggcaccgccgccttccagaaggcggggagcctggtggcgttcctgcccctgccggtgaatccaggaacccggctgcccgactggccccgggtgaaggtgctgctggacgaggtggccaagctggtgcagttcggcgtgatcaacgcggcctccgtggtgcgggagggcggcgcggccgccgccgtggcccggatgtgcttcggcaaccatatcggcttcgcgttcaaccgcaatgtggatcgcgccaccctgttcgcgccgctggccggctccctggtggtggagctcaaggagggcgacatgtgcctggaggggctggagtacagcctcatcggcaccaccatggaggaggaggccgtggtcatcgacggccaggagcttcccctggaggatctcatcgatatttggacggccccgctggagccggtgttcccgaacaaggcagatgaggagccggagatgaccccggccgtccccctgtatgtccagcgcagcggcctggcgccggctatcaaggccgcccggccccgggtgttcatccccgttttcccaggcaccaactgcgaatacgacacggcccgggccttcgagcgggcgggcgcgcagcccgacgtgctggtggtcaagaacctgagcccggcggccatcgaggagaccatcgcccgcatggaggccgccatccggcaggcccaaatcgtcatgctgcccggcggcttctcgggcggcgacgagccggacggctccggcaagttcatcgccaccaccttccgcaatccccgggtggcggacgcggtcaccgagctgctcgagcagcgggacggcctgatgctgggcatctgcaacggcttccaggcgctgatcaagctgggactggtgcccactggctccatccgggagctgcgcgacagcgaccccaccctgaccttcaacaccctgggccgccatgtcagccggatggtgtacacccgggtgacctcggtgaaatccccctggctgtcgggctgcgcggcgggcgacatccactgcgtcccggtatcccacggggaggggcggttcgtggcggacgaggccaccctcaagcagctggcggccaacgggcagatcgccacccagtatgtggatcccgagggacggccctcggcggacattctgtggaaccccaacggctcggtctgcgcggtggaaggcatcacctccccggacggccgggtattcggcaagatggcccacagcgagcgcagcggggacgacctgtacaagaacgttcccggcgagaaggatcaacggattttcatcagcggcgtccggtattttgcctgagccgcagggcgtatacaagcaaggcctccgcagcgattggctgcggaggccttgcggcgtttcaggtgtcagggagagcccttgtgtataccctatcgggggttgcgttggtatgccgggtttccttacggaaaccctaggatgaccccgcatacctacgtaatacccgatggggtataccatgaacttatgctggcagatagaaatttaaaattttatagacaccgcatggtgtactattttaaactggccgatcactgtgaaacctgccggtattactaccggcattacatccgctgcggcaaccgctacgagtcccttggtaagcgctgaatgaatcacgtccggcggctttttctgtaagtttcctgcaagattttgtccgcggttcttcccaagcgggcgcgggtatggtactataaaccatatacgaggcatagaaaaaaacggcgcgggcagtggaagcggctgtttttagaaaaaacggcgggcgcgccaacaatgggcgccgctcgagcattatacgaaaggggccgtggacgatgaaacggatagtggcgggccttctgacgctggcgatcctggtcggcgggctggcgggctgcgcgcgggagccggcgccggaggggacgctgaccgtcaccgtgctggacgtgggcaaggccgactgcatccttatccaggaatcgtcgggcggggccatgctcatcgacaccggaacccgggagagcgcctccgccattctggagtttttgcgcgcgcgagggatcgacaccctggagacgctgctgctcacccacatggacaaggatcacatcggcggggcggccgcgatcctgcaagcggtgaaggccgagcgggtggtgcagccgggagcgagcaaggacagcggagaatacacggcctatcaggcggcgctgcgggaaaagggcatcgagcccgaaatgctgtggaaggcggagcgggccgatttgggcggcgcggccgtcaccctgatcccggggcgggagctgagctataagcaatccaacgactactcggtattcaccgaaatcacatacggcgatcaccggttcctcttcaccggggacggcgagaagaagcggctgcaggaatatctggacgggcggccggatccctgcgatttcctgaaggtgccccaccacgggcgggcggaaaagaacagcgaggcgttttttgaggcggtggcgccgcgatacgcggtgatcacctgctccgaggaggaaccgccggaggacgaggtgcttgccctgctcaaagcggcgggggccaaaacctatctgaccagcggcgggacggtgaccgccgtcagcgacggcaggacactgaccgtcacccagtgaaggaggacgcggacatgacggaaaacagggcggcggccagccgcatcgggtatatggacggcctgcgggccgcggccatggtgggcgttattcttatccatgtgtgcgcgaaggcggccacggctttggcggcggacgggcaggcgctgggcgtttcctggcagctggccaacctgctggacgcgctgggccggttcgcggtgccggcgtatctgatggtgacgggggggctgctgctgggcagcgaccgggcgctgtcggtgcgggagacgctgcgccggcgggtggcgcgcatcgcggcgccgctggttttctggacggcggcgtatctggtgttacaggccgcgacagtgcccggctacgactggaagggggcggcggccaacctgttcaacaagccggcggaaattcatctatggtatctgtacgcgctgctggcgatttatctgctgctgccgctgctgcgcctgctggtgcggcaggccccccgccgccttctgtggtacgcgatagggctgtgggtggcgttcagcagcctgtggcgggcggcggccggcctgatgccggcgctgcagctgccggattacgccaacctggacattctgggcgggtatttggggtatgtgctgctggggtggctgctggccacgacgaagcgcgcgccttccaaagggctgtgcgcggcggggttcctggcggggctgttggtcacggccggtggcacctggtttatgacccggcgggccggggagctcaacggcgtgttttaccagtatttcatgcccaacgtggtgctgatggcggcctgcgccttcctgctgttcaaggggctgtgggcgggccgggaaagcggccgggtgatccggcggctgtccgcgttgtcctttggggtgtatctggtgcacgaggtgtttctgaggctgctcgagccagtatttgccccgctgcccgcggcggcgggcatgctgctgctctccctggcggtgctggcgctttcgctggcggcggcgtggctgctgtccctggtgccgggggtgcggttcatcacgctgggggagcggaaatagttcggcatttacttttttggcggcttgtggtatcctatagaagttatggcatgattttgtcgggaacagccggaaaggacgaccaaatccaatgaaaaagctatgtgcggggatattgagtatcctgttgattttcagcctgctgcctttggcggccctgggggatgagacgaccaccacaggctcctcctccgaatccagcgcgccggcggcggacagcaaggtgaccatcgtggtcagcgtggacaaaacggcggtggtggccacggtcaaggacaaggacggcaaggcgccgaagggactcagcctcaagctgacggtggacggcgtggaaaaggaaaccaaggaagttggcgaggaaacaacggttaccttcgactacgccgtcgcattgggggacatggaatttgtcgtgtccagcgacaggcaggtggtggacgggacggcctacgcggcggcggaggggagcaagacccgcacgccggaggagctgctcgggttcacttttgtggagtatgagcggacgtttgacggggacacgggacgtttttatgtccggtggaacgaggaggaagcgggcagctggaccatcaaccggattctggtggacggcgtgggctaccgggcggagagcctggggggcaacctgacggccgcgctcatcgacatccctcacggggcccacaagctgtcctatgtgttcgccgccggcgacaagacggtgacgctgccggtggagaagctcgtgcgcaccggcgaggtggacaccaacgtggatgtggcggtggtgaacaacaaaatcaccgccacggtcaccgatttttggggacagccggtggcggggatgcccgtcaccctgaccatggggaacaccaccctgatgaccgtgaacaccaacagcaagggcgtggccgccttcaacgtggcgccggacggcagcgcggtgacctgcgcggccggggggttcaccagcgccgacggggtgatttaccggccgtccaccggggcgctgggcacgtcccagagcaccacggcgggtaccaccgggaacggcaccaccggggataagccggccaccacggcccggcccatcaccaaaaagcccaccacgaccacggcgggccccacgaccacggccaagacctacgccaccatcacgggggcgggcaccacgggcgtggaaggggacgatatcgtgctcgacgccaccttcgacaccggcgtggtggatgcgttcaagctgaaaaaagacgattttctgggcaaagcccggttcctgctgcccaaggcgacctatcaggacatcgtaggggacagcaacgggattctcatgatgcaggtgcggtcgtccgccatccaggtgaccgatgcgcaaataagcgccgccattgccaacgtgtccaagttcagcctgtaccacgccgagaacgtcaagcgggtgacggtggatatttccctgctgttcaacagcggcggcaaggaagcgaccatgtccgccctgccgaacgccaactacaccgtgcagctgccggtgcccaaggacatgaaggacatcaagctcatcgcggtggcggccaccaacgaggcgggcatttccaccccggtagtggccaaggtggaaaacgggtatctgcggtttgacacccattatttggccaatttcaccattctgggcttcgccgaggcgaaggagcagtcggtcagtcgggtgcccaccctggtcatcgtggcgttcgtcattgccggcgtgctgcttgtgggcgcggggctgctgttctacttcttcgtgctgcgcgggcccaaggatgacgacgacggggagctgccgcctcccgacggcggagaggggccggacggcggccctggcggaaacgggccgtccagcggcgccggaggcgatacgatggaggacattttcagcggggccgcgatggataagctgcagccgccggtgccctacacgcccccgtcccagccggacatggaggatctctacagctccgacagccgccggcctcagccgcccgcacagcaagcgccggcgcagggcgtatctctagggtctttccagcagcggccgcaggcggggcagaacccgccgccgaagaatccgctggatatcgatttataaacgggcagaaaacgcccccgctgtcggaaaaccgacggcgggggcgtaggtttgtaaaagcgataccgctgcctgattcgctataaaaagccggacgcgattgcgcgtccggcttttttcaggatttcgttttggaataggcgacgccgccctgcgtcaggcgacggcggagaagccgggtgggcaggaaggaagccaaggggtcgttcttctgctccagatacaggtgagaggcgcagtccgcgcaggccacgaccatcataaagacaccgaccagtttgggggacagcagggggaaatccaccatgccatacatgataaaggccacgacaaatgcgataatcatcacgcccatggaggaggattcgcccttcatggccagatggacgccgccgcgcagcatcttgaagccgataatcatcataatagccagggcgatgacgccgccctccaccagaagctccagcaccaggttatgggtatgcggcgcgttcacgccgccggccatcagcatatcccagctgttctgtatgccgggcccgcggccgaaaatcggccgctcgagaatgccctcgatggaaactccccaaatctgccaccgctggctgatagagccgtcgttgctgccgatggagaaaaagcgttccataatggattccggcaccagcaccagcagggagaccgcgctcataacgatgagcagcagcttgcggtaattggcgatgcacagaacggcgacgatgcacagcagggccagatagctgccccgcgagaaggagaaggcgataccgcccagggccgccagcaggcagcagcggcagagaatccggatccggctgcgccggccgctgaaagcgtaataaatcaccaggggcagaaccatgataaaatattccgccgcgatgttgggattgttgaaggtggtggatacccgcatgccgaaatcgctcaggttcagcggcatggggaaccactgatatagcaccttgtcaatccaggcccaaaactgctgaggaacgcctccgaacaccaggttcaggccgtactggaagcaggagatgagaccgacgatgcccgccaccagagagatgctgaacaaggcggtgtccagccgatgcttgttgcacagcacggtggtcatggacacgtaaatcaagaacataatcacccacatagacagggtggagacgctgttaaaggggttggcggagtagaaaacccccagcgccatgtagagcataaacaccagcagcagcttgcccagcgtgccgactgccagagtgctgcgccgctgtttggcgtcgcgggcggccgcccacagggaggcgccggccagagggatgctgatatattctggaaaaatgggaataatagcaataaataaaatcgacagcagccagggctgccgcagatgattgcgtatatcggtgaccaaggctttcatggggtttcctccttccttggcttgtattttaaaagggatccaaaatattcctttttgggcggttttcgaactatactgaagtgtaacatattcggccaggggttgcaatgtttgttacaatcctgttattattttcgctcaaagccaccattgtggacaaatacaaaggggaacatttggaggaaatgacgggaaaagttacaggattgtctcgttgtcgaagaggggtgtcgaacggggacggaaaaagcggattgacttgcggaagcggcgtttctataataaaggaagaaactgcacaggcggggacagactggttccgcggcgcggagtcggggatttccagaaaattggcggaaggagcggagagttatgcgttttaatcggcatcgcgggctggcggccttcatggcgggatgcttgctgctggcgggctgcacgcgggcggttccgtcgcagagccgcagtgggctgctgctggacaccacggtgacgattaccgtatatcattcccagcccgaccctatattagacgcatgttttcgacaaattgcggattttgagcggctattcagccggacgctggagggcagcgacgtctggaacctgaatcacgcgcagggacagccggtgacggtgtccgaggagacggcgcggctgctccggctggcactggattatgcggacaagtcggatggggcgctggacgtgaccatcgcgccggtcagcagcctgtgggatttcaaggcggcggatccggccgtgccggcggcggaggagctgaaacgggccgcggcccatgtgaactggaaaaatctgcggcttgaagggaggacggcgcagctgctcgacaaggaaatggcggtcgacctgggggccgtggccaagggctacatcgccgatcggctggaggagagcctgcgcgggcagggggtggcgagtgccctcatcaatcttgggggcaacatcgtggccctgggggataaaaacggcaaggcctggcaggtggggattcagtcccccttcgacgaggaggcgctggccgccacgctggaggtgcgggacaaaacggtggtcacctccggcacctacgagcggagctttcgtaagaacggggtgctgtatcaccacattttggatcccaggacgggggagccagtgcgcaacgggttggcctctgtgaccattctggccgacggttccatgatagcggacgcgctgtccaccgcctgtttcgtgttgggggagacaaaagggatggaactgatcgcggcgacgccggaggcggaggcgctgtttatccgggaggacggtacggagctgcgatccgccggatttccccgataaacagatagaccggagtatccgcttgagaaaacggccgggtggaaaaattcccgcccggccgtttgtgcgtatttcggtttattgcagcagggttttgccatccatttccgccggctggggcagccccagaatttccagcatggtgggggcgatatctgccaggcggccgccctggcgcagggagcagtcccgtcccactacgcagaagggcacggggaacgtggtgtgggccgtgaagggagaaccgtccggctcatacattttgtcggcgttgccgtgatcggcggtgatgagggcggtgccgcccatggccagtgtggcctccaccgtccggcccacgcaggcgtccaccgcttccaccgcggccttggccgcgtcgaacacgccggtatggcccaccatgtcgcagttggcatagttgagaataatcacgtcataagcgccggagcggattttctccaccactgcgtcgcacaccttgttcgcgctcatttccggctgcatatcgtaggtggcgaccttcggggagtttataagcacccgatcctcgcccgggtattccttttccacgccgccgttgaagaagaaggtcacgtgggcgtatttctcagtctcggcgatgcgcagctgggtcaggcccttgtcgctgatatactcgccgaaggtgttggtcagggactgggggcggaaggccacctgcacgccgggcatggtggcgtcgtactgagtcatgcagacataggtcagggggaaccagccgtttttccgctcgaagccggcaaactccttgtccacgaaggtgcgggtgatttcccgggcgcgatcggggcggaaattgaagaaaatcagggaatcccccgccttgactttaccctccggcgcgcagaccaccggcacgacgaattcgtcggtcacgtcggcgtcataagaggcggccatagcggcgaccgggtcggggttctgcacgccctcgccgtacaccatggcggcgtaagccttttccactcgttcccaacggttgtcgcgatccatggcgtaataccggcccatgacggtggcgatccggcccacgccgatcgccttcattttggcctcgagctgctcgacaaattccttgccggaggtgggggggacatcccgtccatccatcaggcagtggacgaacaccttttccacaccagcctttttggccatggccagcaagccgtagaggtgctcgttatggctgtgcaccccgccgtcggacaggaggcccgccaggtgcagggcggcccccggttttttggcgttgtccatggcgtttttcagggcttcgttttcgaagaaatccccatcctgaatggatttggtgatgcgggtcagctcctgatacaccacccggccggcgccgatattggtgtggccgacctcgctgttgcccatctgcccgtcgggcaggcccacgtccatgccggacgcgccgatggcggtgcaggggttctccgcgaacagcttggtcaggttgggggtctgggcggccttgatggcgttgccgtaggtgtcggggttaatgccgaagccatccatgatgataagagtcaaaggttttttcataaccgtgttcctttcatgagtcggtgagtgaaatcaacgcttgccgacggacagcaggcccgccagcttggagaagggcatggtctggatccagatatgcccggggccggtcactttggtgttgaacagcccctcgccgcccagcatcatattcttgacgcccttgaccatttccacgtccagggacacggtgtcggtcatggcggccagatggccggtgtctatatataaggattgccccggcagcagatcatattccaccacgtggccgtcgatttccaaaaacgccatgccctggccggacaggcgctgcatgatgaagccctcgccgccgaagaagccggcgccgattttccgggtgaaatgggtgttcagctgcaccccgatttccgccgccagaaaagcggatttctgaacgatgatgctgtacgaggggttgatattcagcgggatgatgcggcccgggaaggaggaggcaaaggcgatcatcccctcgctgccgcggcaggtgtaatagttcatgaacatggattcgccgctgaaggcccggccgaaggcttttcccaggccgccctccatggaggtggacatttctatattgggggtcatccagctcatggcgcccttttcggtgagcattcgctctccgtcctgcagggtgcagatcgccactggcaaattgtcgccttcaatcgcataacgcaccgagacaccctccttcgtcgataaaaagggggacgggcctgcacccatccccctcggtgtggattatttcgccacggagacgatggccgcaaagtccgcgggcttcagggaagcgccgccgatgaggccgccgtccacgtcgggctgcgcgagcagctcggccgcgttgcccgcgttcatggaaccgccgtactggatgaccagatcgtcggcgatttcccagctgtacagctgggcgaccgtgtcgcggataagggcgcagacctcgttcgcctgggccgcggtagcggtacggccggtgccgatggcccagacgggctcatacgcgatgatgacgcgggccagctcctcggcggaaacgccgcccagggcgattttggtctgcatggccaccacctcgccggtgacgccctgctcccgctgctccaggtattcgcccacgcagagaatgacggtcaggccggcatccagggcggcgcgcacccgcttctgcacggtgacgtcggtgtcgccgaaatacgtgcggcgctcgctgtggccgaggatcacgtagcccacttccatggccttgagcatctcagcggaaacctcgccggtgaaggcaccggatttctcccagtggcagttctgcgcggcgacgccgatagccgtgcccttggtggcctccagggcggcgggcaaatcgacgaagggcacgcccacgacgacgtcgcaggaagcgccggcgaccaggggcttcaaatcgttgatgagcgcggtggcctcggcgggggtcttgttcattttccagttgcccgcaatgacatatttacgcatagtggaccatccttttcatttactgtctgcccgtcttatttatcgttgaggcaggcgatgccgggcagctccaggccttccaggaattccagggaagcgccgccgccggtggaaatatgggtcatcttatcggcgaagcccagctgctccacggccgccgcggaatcgccgccgccgatgatggagatggcctggctgtcggcgatggccttggccaccgcgatggtgccgcccgcgaagggcgccatttcgaacacgcccatcgggccgttccagatgacggtgccggcgtccttcaccgcgtcggcaaacagcgcctgggtcttgggaccgatgtccaggcccatccagccgtcgtcgatatccccttcgaacaccttggtgttggcgcctacgtcgaacgcgtcggccgcgatgttgtccacgggcaggaggaatttcacgcccttggcctcggccttggccaggatttccttggccagttccactttgtcagcctcgaacttggagtcgccgattttattgcccatggccgctttaaaggtgtaggccatggcgccgccgatgatcagggtgtccaccttgtcgatgaggttagtgatgacgccgattttatcggacaccttcgcgccgccgaggatagccacgaagggacgcttcggatcggccagggcgccgcccatgaccttgatttccttctgaatgagatagccgcagacggcgggcagataatcggccacgccggcggtggaagcgtgggcccggtgggcggtgccgaacgcgtcgttgacataaatgtccgccagggaggcgagggctttggcaaaatcgggatcgtttttggtttcctctttaaagaagcggacgttctcgatgaccaggatttcgcccggccgcagggcggcggccagggaatgggcctcgtcgccgatgatatcggtggtgaacttaacctctttgcccatcagctcggacagccgtttggccaccggggcgagagtgcatttctttttggattcctcatccttcggccggcccaggtgggagcagaggatgacggccgcgccgtgatcggccagataccggatggtgggaatggattcacggatacgcttgtcgtcggtgatgacgccgtcggccagcggcacgttgaagtcgcagcgcaccagcacttttttgccgctgacgtcgatgtcttcaatggtctttttattgaggtagttcatgcatgacatcctttcctgtcgttccatctcattttgttaaaatgtaaacgagctttccaatcccttattttaaaggattccggagggttttgcaatacctgagccgaaaaagtttacatttcctgccggtcagaaattgttcaaatggcttgaaatgcgaaaggtgggggaggggacgcaaatggcgggtgccgtttgcgtaaaattcgggcttgcatgcggccggggattgtgctattctgaaagcaaatttgggcatcagggaggtatttgaaattatgaaggtattgtttcagggcgacagcattaccgacgcgggccgggattacgcggatccccatcatctgggcgacgggtatccgaaatacgcggccgaggcgatccgggaaaggttcccggacgagacgttcgaattcatcaacctgggcatcagcggcaaccgcaccaccgatttgctggagcggtggcagaaggactgcatcgcggtgcagcccgacgtgctctcgattctcatcggcatcaacgacacctggcggcggtacgactccaacctccccatgacggtggaggagtacgaggccaactaccgccggctggtgcaggatgtgaaggaaaataccaaggcgaagctgctgctgctggagccgttcctgctgcacgcggatccggccaaggagtgcttccgggaggacttggatccgaagatcctggcggcccgccgggtggcgcgggattatgccgacatgttcctgccgctggacggcctgctggccgccgcgtcggtgatcgaggagccgtcccactggtcgggggacggggtgcacccgaacgaggcgggatcgcggctgattggccggtattatgccgaggccttcgccgccatgctgggaaaataaacaagacgagggcggcacagcggcgggctgtgccgccttttggtttggagcgcggcaaatgaccgaagaaggcgcggccagcacgggcgtattttgtgaaaatttgggctattttcatccgccggcgcgcatgctatactagcaaaagcggcgaggaggtgtgcgcactatggtaaaagatttgacgacgggcagcccggcgaggttgattatcgggttttccctgcccctgctggcaggaaatctgtttcagcagttttacagcatggccgacaccatcgtggtggggcgcagcatcggggtggacgccctggcggcggtgggctccacgggggccatttcctttttggttttggggtttgttatcggcctgaccggcggcttttcggtggtcgtggcccagaaattcggcgcgggggacgagcgggaggtgcgccgggccgtcgccatgtcggtctatctcagcgtgctgctcaccatcgtgctgacggcggtgagcgtgctgtgcacccggccgctgctgaattttatgcagacgccagccaatatttacgacgacgcctatgcgtatatcgtggtgattttcgcggggactggggccatcatcttctacaacctgctgtccggcgtcctgcgggccctgggggacagccgaacgccgctgtatttcctgattctgtcctccgtcatcaatgtggcgctggatctggtgttcatcctggtgtttggcatgggggtggcgggggcggcctatgccacggtggcggcgcaggtgctttccggcctgctgtgtctgctgtatatggcgaaaaagttccctattctccggtttcataaaagcgactgggcctggaacggccggctggtggttcatcatctgcggctgggcctgcctatggcgtttcagttttccgtgaccgccatcggggtcatgattctgcagggggccatcaacggcttcggctcctccgtggtggcgggatacacggccgcctccaaggttgagcagctgaccacccagcccatgatgaccttcggcatcaccatggccacctacgggggccagaacctgggggccggccggctcgatcgcatccggcagggcacccgccggtgtgtggagatttccacggtggtgaatctggcctgtgctgccctggtggcgttccttggcaaatacctggtgcggctgttcctgtccagcgacaacgccgaagagttggcggcggccaccgacgcggctatccaatatatgaacaccatcgcggtgttttttgtggtgctgggcctgctgttcattttccgcaacgtgctgcagggggtgggcagcacgctcgtgcctctgctggccgggtttatcgagctcgtcatgcgcacggcggtggtgttcaccctgccccgttacatcggatacaccggggtctgcctggccaaccccgtggcctggatcggcgcgaccatcccgcttgtcatcgcgtatctgttcgtcatgcggcgcatggagcggcgccagcgggcggaggcgacgatgtcggaacatctataatataggtaaaagacaaaaagcccgcgtcgttttttcgacgcgggcctccgcttagttagaaaggaacggccccatccggtccatgagacaaaatttttccatcgcgcagatgtatcagccttccagcgcgttcggccaccaagctgtcatgggtgacgatgacgacggtaatgcctgctcgattcaagccttcgaacacagtgagaatttcatctgtagtttgaacatccagggcgccggtcggctcgtcggccagcagataccggggagagttgacgatggcccgagcaatggcgacgcgctgccgctgccctccggataactgggatgccttatggcggctgaactcctgaatttgcagctgcctcaggacgtcttccgttttgctttttgcctgtttacccgatatccccgcaaaatgaagggggatcatgatgttatcttgtacggtaaaatcgtcaataagaccgtagtcttgcaggacaatccccatggttttattgcggaaggccgccaaacttccctcgctgatcttggagagatgtacatcgtccacctgcacgtctccggaggtgaagccgtcaatcccgcataggacgtgcagcaacgtggattttccagccccggattttcccataaccgccaccatttctccgtcctgaatagtaaggctgacgtccttcagcgcgaggcactcattgggcttgcccttgttataatattttgtcagatgctgtatccgtatcatgcggactcctccgttcagcgctccttatcgcgcagaatttgcatgggagagcgagctttaagggcaacaaaggccggaatcaacgccaaagccacgaccagaagaagcatggccacggtggccagtatattatagccggtgagcagaatctgcatggagaacagcagatcctttatcaccatatacggccagaaaatcagtgcggcagcggccaccacggcaaacatacacaacagatatgctagaattatccatgcgcagtttcgccagcgacagccgcagatatagtagacggaaaacatgggcagatatcgcagggtattcagcacggtcatgctgataatgccaaccagagaaacagcagaaaaacagataaccaccgacaggagggaagaactgtccgatctggtggtctctagcccctcctgatacagctgtgaaaaggttttgacggaaccggtcttttccagctgcgtgatattgtactgcatgtccgcctcggaaatatccggctcaaaaaaaatcatttggcaactcagggaagcaaaaatataaggagcaatcgattggatggctgattcccgtgtaagaaacagcggggattgtttgaatcggtcgttatacacagtaaataggtctaaacagcttataccgctgccactgctggaaaaatccaaatataaatttcctgtatgacttttacctttaatatccaccatgcgatattctggagtattggtccactggcttccccgaaccagcatgcggctggaagttaccttatttttgaaaagattactgagaatgattaccggtatggttttaccatcctcttgcgctttaaccgtttgccagagttgcggtttaaaaaaggaaggcagtttgtctataagacaatcggcatatacgattgtgtcaatagggctgtcaacattatccggctgaaaggctagcatatgaatactgccaaggcaattcaccttttttagtgtgctgaaatcagcttggcttgacaaattgttatgaggcatatcgttatcttgatccactggctcatattcaaaaatatcggcaggcatatagtatataccttgataatctatcaaatccgcaaacatggtcaccgattgcatttgcatggaatatcttccaatcgtcaaattcaataacagtatgctaataaaaatctgcaaagccaatataccgtttaaaatgcggttttttttaaaaatgcggtatccatatatccaaaatttcattccagcaccatcctagctaataagatccactggcctttgcgcattgaaacgcagtaaaattggagtaaatatcagggttacaaaaacaagatataaaagaaacacagcggcataatctataaaaaacagagtataagaaatggtgatgtgcagcgtcggcagccatggctcaaggagaaaatgatacaacagactcgtcagcagaaacaggacacaggttatgatgaaaatttctgcataatacatccaaaaacctttccgcttggagcagccgcagaggcgatatacgccataggcttttctccgcttcgtcaacagatagcgatagagaaaggagacattcagcaaggccaaaaggataatgaacagagaagaaaaggacgcgtaaagatttttggataccgcgcgcatgtcgggctcggaaggaagagatacatgcgcgccggggaacgcttcggttaactggctttccattgcgcgaatttccgattggttcagcatgtgtttaaacaatatttggacgctgtcaatggctttgtcattgtttagcgagtagaacggcacttctgaaaagggacggtcggaaaacgccagaatgcggtagtctttcccgccgatcggcaggtgctgagcctcgtgatactcgtcataaagagaggcggcggcgatgaccaaaggagtaccggccttaaaatcctgttgcgagaaataccggccgccgtattgaaaaggtgtacgggtgtaagaagccaggatcaattgcccttgttcggtgaacatggtgaaaatcatgtccatgtcgtctctcttctgacttaaggcggacaaggagcgctgcacgctttcctttgtttggccggtcaaatcgatggttgctacttgataagttccttgcgcgtcgtacccttgtgcattcatggaagcaaaaacactgtatatgtataatgcaatggtaagtgatgccgccatgcctaaaataaatagacaaaatacaactttatttttaataaatccatgtagatttttaataattaaatttatcattatcatttccgcccgtttctgtgtactaaacagattcgccgcccgccaattatatttttacaaatgggatttacacaagttgatcccaaacgtaagtcaaattatagttatctgtatcggtagcacaattgtgataccataccgccccgattgctgaccacaatttcccaggtgattcgacatatgcgcttgcagagccaaaattttccttagcattcatattattaccggttccgtttctagcaatgacatgaacggctttggtattatttttagcagatgcactagcatgagcgatatcggctttagtaataccacctttaaggaccccgatgctaccagttcctcttaagcggttagagcccacggcatattcaatgttaaaattatgactccaagtcttattgcttagatacggggcgtatgaatatttctgcgtggtttgtaatgagtgttcataagtaaccgccgaaacagagaaactgcatgtaacgactatagacacagctaagagaataccaacaaattttttagccttcacttttctgcctccttcactttattaattgacgagcggcgaatacaggcgaatattaatgatatattttggaatttaaaccagataatagattttactatatattatcattaaaaattatatttgtaaatactttttgtttaattgttgtaataaaagaggagaaagcccgcacggttttgccgatgcgggctttaaactatggctcttgccggacaagatagctgttgccctcgggatcctgaaaggtgaacatggtgccgtagggcatttgctgcaggctgcccaccgccacgtcgtcggccttcatctgctcataggtacgttccgcgttgtcggtactgagaatgacggacggatggccgacgcagacggtggcattctgctgctgcatcagcgccttgtcgtaaaggacgaagctggtcggagacgcgtccgacggcgccacctccagccagcggaccggccccatgcggtgatccgcccgtttgacgaaatggcactgctcggtccagaagcgcagcgcagcctccggatcgtgcacatacagggtgattttacgaatagcatccaacataacaagataatcccctttcctgcggatagtgtttccgcaggaaaggggattatcctttgacagctattcggccgcttcctttttcgatttttcctttttggtttccttcggctcctcctgcttaaggcagctgaggatacgggccgcggcggtgcggcgggcgttggcctccaccgccagctccatggccatacgatagaggctttcctccgactgatcgggcatctcccggatgcgttccaccacgccgccgagggcccgcagctccatagaggaaaaatccggatacagggtttccacgcggttttccgcatcgagtccgtgcatagtttcctggatttccggcaaagataataccgatttgagcatgcagatcatggtcagcatggccaggtgatcccgggagtattttttctgggaggggcggggcagcacgccgcctttgacgtagttgttgatcatactggaggtcagcagccgttcttcccccacctggaacagctcgagctgcttgcccatcagggtgatgacctgatccatatacagatccagctccggcagccgctcccagggcgtgggctcgaaatcgtgaacggcggccacccagtcgttgagtttttgaatcgattcgtccattgtcgttctgcctttctcaaagggttaaaggccggggaaatcccccgcggggccgcttaccggcctatacagcttgcgccgcatacgaccggaatatgactcaagtataacatatttgtaaattccttgcaagacggcaaaataccacttgacaaaatgacaaaaatgaaataaactagttttataaactagataatataatgttaataaattgttaacgcgattttcgacaggaaggttgtggagcggtatgaagctcgttcagtccatcggcgtatggggagacagtgtgatgaagggcgtcgtgtatgacgagaataaatcgaaatacacgctgctcagcgaaaatggggcggacaaagcgtcccgtaagctggggctgcggctgttcaaccgctcccgcatgggatgcacggtgaccaaagggctgcagctgctcaagaaggatctgcagcggcccgaggcggcctgcgacgcggcgcttatcgagttcgggggcaacgactgcgattacgactgggcccaggtggcggcccatccggagcaggaccatcagccgaaaacgcccctgcccctgtttatcgcccagttgcgggacatgatcgatctggtcaggcagaaggggatgcagccggtgatgatgacgctgccgcccctgcacgcccagcggtatttcgatttcttcacccgaaacggcctgtcgggggacagcatcctgcgctggctgggggatgtgcagcatatctatcgctggcatgagcggtacaacgccgctgtcatgcgggtggcgcaggaatgcggctgcccgctggccgacgtgcgggacgcgtttttggccgagcgggattacggcgatctgctgtgcgccgacggcatccatcccaacgccaagggccacgccctgatggaaagcgtgctggaagggttcggctattccttccggcgggacggaatcttggcggtataagaaggttcttcctcttttttatcggtatagttaacacgccttttacagacacttctgtagaaggcgtgttttttacgttttttaaagcaaacctaaatttcggttaacatccgcctaacatagcggcggtaagatgacgacgtactaaaggaatgacaaacaacggaggagaacgatgatgaaaaagattcttggcgcggtggctgcggccgccctgatcaccacggtgttcgccggatgcagtaccggtgaggtcggcggcaccacctcgtccaaagccgacggctcttcggaaaccaagctgaccggcaccctgaccatggcgggctccacctccatgaccgatgtctgcaccgccctgaacgaagcgtttatgaagaagaattccggtgtgaaggtggtcctcaacggcggcggctccggcgcggccatcacggcgctgggcgacggctccgcccaggtgggcaatctgtcccgggccgtcaaggacagcgagaacgcggacggcaaatacgaggccatcaccatcgccctggacggcatcgccgtggtggtgggcaaggacaacgcggttgccgacctgaccaccgagcagctggcgaaaatcttcaagaaggagatcaccaactggaaggacgtgggcggcaaggatgcggccatcagcgtcatcggccgggaatccggctccggcacccgggacgggttcgaggacatcgtcaaggtcaaggacgcctgccagtatgacgtcactctcaacagcaccggcgcggtggtctccaaggtcatgtccgacgcgaacgccatcggctatgtgtcctactccgcggtcagcgatgaaatcaaagccctgaaggtcggcggcgtggaaatcaacgacgacaatatcgcggacaaatcctatgcactccagcggcccttcgtccatgcgtatctgaaaaacaccgacaatgagctggtgcaggcgtatctgcagttcctgcagaccgacgaggcccagaacatcatgaagaaggataagctgattccgcaggaattctggaaataaaaacgcacggcgataacagcgccgacagcaagtctcgccgcggggagggatccctgcggcgggacttgcggcggatggaaaggcatggtcaaacgtatggaagcgacaattccaaaacctgcggtccggcaggcgatgagcaatgaggacgcccgacgccgccggctgctgcagcgccgggtgtgcgctgtcgtgctggcgggcgtctcggcgctgctgatcgcgctgttcttcctgccctatgtgacctttgaactcagcaaggtgacctaccagttcacctcgctgcagctggtcaccagcttcatgaccgtgaaaggcacggcggtctccatgtccctgatcaccaaggcggcggctgtgctgcctctgctgctggcggcggcagggggcgttctgatatggctgcgcaagccggtggcggcggcggtctgctacatcctcgtcgccctgtgcgccctgacggccatgatgtcgattaacgccatgtccagccagttcgtggatatcggggtgggcagcattcatatcggctttcacttccccctggccgtccagctgggggcggggatcctggccgccatgctggccatgtggacaaaaggcggggaaaagctggccgaatcggtgtttctggtgttcgcctgcatgtcggtggggtcggtggccatcatcaccatctacatgatcaccgtgggcgcgccggccatcggggaaatcgggctggggaatttcctgttcggcaccgaatggagccccggatccggcaaatacggcatctggcacatgatcctggcctccttcgccgggatgttcggcgcgattgttatcggggtgcccatcggcctgctgaccgccgtgttcctggccgagctggcgccccgccggctggccaatctggtgcgtccggccattgagctgctggccggcattccgtcggtcatctacggctttttcggtatgatggtgctggtgcctttcctgcgccgcgtttttcccggcacggtgggggacagcctgctggccatgattctcatcctggcggtgatggtgcttcccaccatcatcagcgtgtcggaaaccgccctgcgggccgtgccggtcgcgtataaagaggcgtccctggccctcggcaacacccatatcggcaccattttcaaggtgatggtgccggcggcgaaatcgggtatcctggccggggtgatcctcggggtgggccgtgccatcggcgaggccatggcggtggtcatggtctgcggaaacatggcgaatttccccaagcttttgggcaccgtgcgccctctgaccaccggcatcgtgctggagatgggctattcctccggcctgcaccggcaggcgcttttcagcatcggtctggtgctgtttgtctttattatgatcgtcaacatttcctttaccatagtttccaggcggggggtgaaaatcgatggcaaagagtgagacgggcgggacgctgtccctgtaccgcaaaacacgccggccgggcgacaaggcgctggccttctgcatctatctggcggcggcgctgacggtctgtatcctggtgggcattatcggatacattctggtcaagggcgtgcctcacatctcctggtccttcctgtctacctccttttcggcgctggacgaggggcgaaacgggattctgcccatgatcatcaacaccctgtatatcgtggtgatcaccctgctcatcgtcacccccatcggcatcgcctccgccatctatctgacccagtacgcccggcagggcaagctggtgaaaaccatccgcttcaccacggaggtgctctccggcgtgccctccatcgtgttc

SEQ ID NO: 419 - DNA, 3508 bp, Unknown
  16S sequences of unknown bacteria
ctatacctttagtggtcatttttatcttctcctacttttttgtttctgctattatgttcgttcatagccctgtctatgcctttctgcacaaaacagcagcaggcatcggcgcaggtgttaagcaccggagcaagctcttccgcttcttttttgcccagcgagcctatgacatagtctttgagatctccttttcgtttatctcctattccaactcttatccgagggaactcatcggagcccagctgatatattatcgacttcataccgttgtgggtccctgcgctgccttttttgcgtatgcgcaaagtccccgcctcaatatctatatcatcatatataacgaggagattttcaacaggcaccttgtagtatctcataatttctctgattgactcaccgctcaggttcatataggtctgcggctttaccagcataaccttgtgtccgtctatggtaccggtgccgtacagagccttgtgcttgagtttcttaacgtcaatacctgtcttgtcagccagaatgtctattaccataaagcccatattgtgccttgtggtttcatattctctgccggggtttccaagacctgctataacgaactctattccgttgtcgttttgtttttttctgttccagaacatattagtcaaaaagtttactgattgagttgtttgtgaatactcttgtcatcgcttccgcaaacagcggcgcaactgacagatgagtcattttttctattttcttttcttcaggaataggaactgtgtttaataaaacgagttcgcttatagctgaattttcaattctttcgattgcaggtcccgataataccgcatgagttgcgcaggcaaatacgtcctttgcgcctaagtccttgagtgcatttgcagcatttgtaattgttcccgctgtatctatcatatcgtcgatgagtatgcagtttttgccttcgatgttaccgattatgttcataatctcgctcttgttaggctccggtcttctcttgtcaactattgcaataggtacattgagaggctctgccatatttcttgctcttgtaaccgagccgtggtcaggtgataccactacgatatcatcaaggtctttttctttgaagtattttacaagtattggaagtccaaccaggtggtctaccggaatatcaaagtatccctgtatctgcgctgcgtgaagatccatagtcagaactctgtctgctcccgctgcaataataaggtctgcaacaagctttgctgtgataggatctcttgcctttgcttttctgtcctgtcttgcatatccgtaatacgggataaccgcgttaattctgcctgctgacgctctcttcattgcatctatcattataaggagctccattaggttgtcgtttacagggtcgcaggttgactgtacgatatagcagtcaacgcctcttactgtttcccacaggttaacggatatttcaccgtcactgaattttgttactgttgctctgcctaaaggtttgcccattattgaggcgatttcctctgccagctctaaatgtgagtttcctgcaaaaactttgtactctgagaatgcacctgatttcatttcttctgttacctcatctttcgttttgtagttagcaatattatttatttttcttaagcagtccgctgcgtgaagcccagccttctttgatttcttctctggctcttgcaatcagaagcgagtccgccggaacttttctggttaccgtgcttcctgctgcaatgtatgcgcccttttccactgtaacaggggataccagattggtattgcagccgataaaagctccgtcctccacaacagacctgtgcttattagtaccgtcataatttacaaaaacaacaccgcagcctaagtttacatccctgcccacatcgctgtcacctatgtatgtaaggtgagcggccttggtgccgtcccccattgacgagttcttaacctcaacaaaatcccccactttgcatttactgcctatattgctgtcaggccttatgtatgcaaaaggtccgaccttggtatcatttcctatgctactctcaagtacaaccgagttctgcacttcagttctgtcgcctatgttggaatccttaattctggttgagggtcctatgcggcagtctttgcctatgcttacattgccctcgagaataacgtcagggtatatgaaagtgccttcgcctatgcgtgtgccctcttcaatgtatgcccttctaatatccataaagatgacgccctgatttgcatatccgatgtttctttcgatacgctctttttcgagcttctcataatccttgtaattcatattaaaacttcctgtccagtttgagtatcatttcgcccgccttgtatatgtcccctgcgcccattgtcataataaggtctcctgccgaggagttgttgtagacaaagcttgcgatgtcctctaatttatcaaagtaatatacctctttgtcgggatactgttttctgatttcctgcaccagtcccttggaacttatattatacacattctgttctctggccgcataaatctccgcaagcacaaccttgtccgcattctcaaaggaggctgcaaactggtcaaacagcgcaagagttctggtatatgtgtgcggctggaacaggcaccacaggctgttgtgcggaattttaaccgccgccgcaagagttgcctttatctctgtagggtggtgcgcatagtcgtctattatcttcctgccgtctgcagtctgtcccttgatatcaaatctgcgctgcgtaccgctgaaattttcaagggttgaaacaatgtcctcaacatcaacgcccagcatatgacagcatgcaaaggaagcgagagaattgagtatgttatgttctcccggaattgcaagctgtattgatgccagcgctctgccctcgtggtttactgtaaatttcggcagtccgctgttgaattctatgtctgtcacataatatgtgcagttttctgaaaatccgaaagttataacgttgtcaagatccttgaccacgctgtttacaaacggattggcattgtaggctataatggtgccgtcctcaggcacaagctttgaaaatctgtcaaaggatttgacgatatggtctatatccttgaagtagtcaagatggtctgagtctatgtttaaaataatctcgattttaggacagaggctcaaaaagctgtctctgtactcgcaggcctctgttacaaaatactgccctgagccgacctctacattgccgcctatctctgcgagattaccgcctacaagtattgtaggcgccttgtttgcgtgttttaaaatcaaagaaaccatagaggttgtcgttgtcttgccgtgagttcccgatacagcaatgctgtaatcgtattcgctcatcagtctgccgagcatctgcgcccttgtaactgcgggtatgccaagctctctggctctggctatttcgggattgtcatccgaaactgccgccgtataaa

SEQ ID NO: 420 - DNA, 2955 bp, Unknown
  16S sequences of unknown bacteria
ggggcgccggccccagcgcctccagacgcagccggccgggcgtgatcacctcaagggcaaagaatgtcgctgcaagcggcgtctgaaacagaccgccgaagcccgcggccatgccggtcagcgtcagcatccgcgacgcgtcaggcaggcggatccagcgcgagcaatactgcgccatcaccgcattgatctgcacggcgacgccctcacgcccgacgctgccgccgaacagatgcgaaagccaggtggatacgctcagcagaggaatgagccgcagctcgctttgctgctcatctccctgcgccagatcgaacaccagcgccatgccccgcttcgcccgctggccatagcggcggtaaagcgtcacgatgagcagaccggccaagccgagaaagggcgccagcagccagagatgcgccgtaggcagctgcgtgcacagctgcagcccgctggcaaacagaaaatccagcgcgccggcaatgacgccgatccctatgccgatgagcgtccataacacggttctcccatcctctgcacaccatttgcgcatgttcccatctccccttaaaaagccgatgtcctccctgtcagagacatcggctgctccttgtcattcgcatgtcagacccggtatacgagcttctgacactccacattggatatttccagatcttcctccgcttcaaaaccgcaggaacgataacatgccctggccgcttccccgcgcggatcattttccgcaaaggtgatcactgagatctcatcctccggctcaaagcatccggctaccgtatagatcagccgtgtggcgatcccctcacgccggcagtcaggatgaacggccagcatcgtcagcgccttcttttcgcggctgaatcccaccatgccttccagcatgtcgtcatcctggctgacaaatgcctctcctctttcgatcatttcctgcaatgcggtgcgaaaggcatcttcccgataccccggaaaatcattttttaccagtttcatcaagtgtatacacgagtccgcatcctccggtttagcatgtcggatcatccgatcactctccttcgtctttcttttgctaacatgttcattctaacgaaaaccgctctttcttgcaagtcattcccactgttttcctgatcacagcgtcagaaaacaataagcggcagagcgcacgaacaagatgatcagcagcatgaacgccgtattcgagcgcacgaagcgcggccagggcagaaaagaaaaggagagctctccgccaggcagaagcgcgtaaagatgcttcagcggcgcgcgaaacagcatgtacagcccatagccgcacgcgccgcccagcgtattgctgatgagatcggtgatatcgcagcagttcagcttagtgatcgaaaacagctgcaccagctcgatgcacagcgaacagcacagacacagcagcaccgtgcaggcaaagccctttttatagatgaaaggaaccaggatgcccaagggcaccatcatgagcacattgaggaggaattcacgcagcgcgccggcatgatgaaggatgagatccgagaacggcatcaggttgatgttccacacatccatcgacagcgtcagaaacggtatcggaagatagatcggcatgatcgtaaaatacagcacgcccgcgccataaacgcaaagcacgcttttcagcacagcttcacggcgctgcgtccagcgcggaagcagatataccagatagatcagcgccagcatcagcatatctattccaatccactccatgagcatcccatccttttcgttgttctattattataacacgaattccgcctttgttttcacccttacaaaagtgttacgaaacctaccgcaaagcggcgttggacatccgatctttcacgttgttttcaccgaatttacatcaatttacaattttttcattgacctgcatggtttctacggtaaacttaaagcagaaaggagacgaccggaagcagattccggtctcataacgagatcatgaacaaatatgaagcgatcctgaacgaaacaaaaaaagcggtcatcggcaaagatgaacagcttgaaaagatactgacggccatcctggccaaaggacacatcctgctggaggacatccccggcgtaggcaagaccacgatggcgcgcgccttcgcggccgccatgtcgctgcagaccaagcgcatgcagttcaccgtcgatgtgctgcccagcgatgtcatcggcttcatggcgctggagcgtcacagcggagagccgaagctgcatcccggcgccgttttctgcaacatcttcctcgccgatgagatcaaccgcacctccagccggacacaggcagctttgcttgaggtcatggaggaaaaccgcatcaccgtagacggcgtcacttatcccgcgatggaccccttcatcgtgatcgccacccagaatccggccggttccgccggcacccagctgcttccggacagtcagctggagcgattcatgatccgtctgcacagcggatatccggatacggaaagtgagatccgcatcctgaagagcaaagaaccaggcagcgagcaagtacaggctgtcgccgacgccaaagacatcatcgccatgcaggaagcgtgccagcacgtctatctgcacgacgacctgtatcgctatatcgtcgagctcgtccaggcgacccgcacgcattcctccatcgcttccggtgcgagcccgcgcgctgggatcgccctggccgccgcggcccgtgcgcgcgcatggacaaaaggacgcgactatgccatccctgaggatatcctctatctgttccacgagatcatggggcaccgcatccggctgaagggagagaacggccatgacatggagcggacgaacgccgttctcgacgacatcctgcgcaaggtcgcgcagccgctgctatgatgcatccgctcaggacgggccgtctgt

SEQ ID NO: 421 - DNA, 27813 bp, Unknown
  16S sequences of unknown bacteria
tcagtcacagccggggccggggagtcagaactgtcgtctgaatcactgtcaacactgtcatcgccgccatggtccggctgggcgttggaatagagcaccgcatagtccgagaatcgcttcgcaaagatggtgagcaccgtccggtcctcattgaggacgaaatactcgccccactggttctcggcggcggggatttcctcgatcccgccgtcatgctcccgcagcacccggtactcccggcagttctgcagtccgccgtccagagggatcacgatctccatgagcagattgctctcggagatgggttcggctccgcccagcgaagcgccgctggcttcaaaccgggatttctccagggtgagcgccagggtgagcccctcccggaagctgccggcgttctgtaccgcctcttccagggcgctgcccggtgccggactggaatcccgtacggtcatgcagatctccaccttgccgccgctttccaccagggtgcggtcggcttcggtgtagacctggtcgggctgctggtcaaagagccggtccagattgcccaccaccacatccggtgcgccgtccaggactttcagcaccgaattggtcttgccccggggcagccggatggtgcactgggccgtttcagagccggtgagcaggattttttcggtctgggtgatctcgccataggaggccaccaggttgtaggctccgggcggaagctgccggaacgcaaagctgccgtccgcatcggtgaggacttcatccagcttctgattgccccgcgtcagggtgatcaggacctgtcccgcaggctgggggtcggattcatcgtcccagaccaccgagccgccgatctcgccggaggcttcggcccagacagcggtgaaggtcaccgcggatgccggcatggtaaagctggcgccgggctgatagatcctgccgccggattcccagccgataaactggtatccggtgcgttccagagtgccggagccaggcaggaacagcaggttcccggcaaggctgtccggcagggagggcggggttccggtgacctcctcagcgccgggcaggaaggtgatgggatagactgccggtgcggcagtctgatagatctccaggattcccaccggctcgggggagccatcggcgctgccggtgtggcggtagttggggtcggtgatctccgccaggatggtatagcgtcccggctcggtgggggcgtcagttgccggaccgtctgtgctctgatagctgagggtgaaccggtcaaattcctgtcccagggcctgggcggtgacccgggcggtatggggctgtccgtcataggggacgctgttttccgacgactggaagagaaccgccgccgggcggatcacaaaggtgaccgtaccgtttccaaggagatagttgcggcttctctcgcccgaaagccgggcagtgacgccgggataactgccggcgtcggtctgttcggtagtctgggtcaggacggtgaccttgccctgatccgccgggacaacgcccaccagtccggcaatttccggggactggggaagcccgttgtagacggtatccagccccttccaggtggcggtgatccgccgctgtgccacagtgaacggcccggactgtacagtgacagcctcatagtttccggtggcggcgaaggtcacagctgcctgatagcttccggcttcagaggggaggtcgggtgagtcataggcggtgccgtcagagagggtgccggtgtagcggaaggtgagcgatccggtgccgttggtatccgaaaccaccaccggctgggagggggtgtccccgtaggtccagcccgctatggtcacggaaccgcttcccgctgccctggcaatgtccaccgtgacatagtccggctgcgccagggtgtagttgacggcgtccgctccggtcagggcatagccgctcaccgttaccggcagagcggttccggcgtccggcacggcaatggtgccccggacccgggtgctgtccagcgccgcatcgtccggaaccccgtcccggatgacgatggcggattcgtccaggctgccgccggtcagggttacggcagtgctgtccgggtcatagacccggttctgggcagtgacgcccgcaatggtcagctcccggggagccaccgccacagaaacggtgtgctccaccggggcgtaattggggtcgtccggggtgaataccaccgtacagcctgtgttttccaccgtgggaatgacctcgggggttttccaggcataggtgcccttcccctgctggtcgccgccggtgaggacgctttcccgcagggtttcgccataggtgagcgcccctgcttcgggccaggtcatggtgtcggcctcgggataggccgtgccggtgatctccagcgtaccggccttctgttcccgcagactgtcgtccatgccgtcaaatcggaggttgtcattttccagcgtgagtataatgtcatagctgccggtgttcaccggggtggcaggcgctccgtcctgctcatagcggacggtgtagtcgctctcccggatggtcagccccgggacagcggtgtccaccgtcacctgtgcctgcttctccccggcgtcatattcatgccgggtatcgctcacggtgcaggtcaccggggctttggcgatgacagcggtgacagtgccgtccgcccgggccgaaagcccgtagctgtccacggctgtgacggtgcaggtgcagggatattccccggcactggcggcagggaaggtatggacggaggtgtccccaaggagctgcccgtccgcgtcgtaccactggtaggagaaggtgacgccgtccgcggcatgggcgacgctggcggtgagggtcagatctccgccgttgtagacaaagggcgctgtttcactgccggagtaggcggcagataccgaaaccgagggcgccgacagggtccagccggcggtgagggtgaaatctccggtgaccggctgggcaaagtcccagacagtgccgtccttctgccagccggtgaaggtatagccggtgcggtggggatcggcggtccgggtgagggtgccgcccgagagcaccagacggtggggaagcgggtcaatgccgtccgaccggaagctgacccggtggagggtcacggtgcgcacggggctttcgctttcggcgccggtgaccgccttgaaggagtaggtccccgtttcggtgagggtgagggtatccgaatccagctgctgatacccgccgccgtcctgagcgtaccagagggtgagccccgaagcccccgccgttccggcggagatggtcaggacggcctgcccctgctggttttcaagcccctcggcctgggtgacagtggggatagccggaacagtgccgtcggcatggatctccccggagaagccccgggtgacattgcccgcctggtcggtgacctcatagtagaggtagcggtcgccgctgctggcggtggagacggtcaccgattccgcggcggcatgttcggtgaggccgtcagtgggataggaggcgttgtcgctggtgaagcgggtccggacgctgccgatgccgctgtccttgtccgagagggtgagggtgatctccgccatcggctgccagccggaaggcacttcggagagctgtacttccggcggggcggtgtcgatgcccgacacggtgaagctctgccgggtctggttgccggcctgatcggtgaggatcaggatatagctgccgttttccgggacggcaaaggtgttgccggtgacggggatttcgtcctcgcttcccagcttcttatagtatttcgaagccacatcgctgccgccgtagccggtcacttccccggctgtattgtagagcggggtgaggtcatcggtgaggccctggagggtgacggtcttttcgccgttgatccagccggagggcaccgaaatgccggtgaccaccgggccctgccggtcgatccagtttaccagcaccgagctttcggcagagcgtccccggttatccagcaccgtgatggtgtagagaccgttctggttcaccgcaaagctgccggagaggtcgctggtctgggtctctgccgccgtgggcaggccgtagagggtatagggggtatctccggttgagccggtgagcctccactccagggtgacatcgccgctggtccaggcagtgggcgctccggagagggtcagggtcaggctgccgtccggggcggcctggacggtgtaggcgccggaatcccaggtgagggtattgcctgcccggtcggacgccttcaggtggaggtagacggtttcggcatcgggattctggctctggtaatcaaagaggtaccgtccgccgctctcggcggcagtctgccagccgccggagggcgccgaggccgagccggtgaagcggtactgcaccgactggacacccgagaggacatcgctgatcacggcgctgaataccaggcctgccgccggaggtgtggcctggttgggctcgcgcacttcctccagaatgggggcggcagtgtcaatgccggtgatctccaccgcctgggtgagggtctcctctccatgggtaagggtgaaggagtaccagccgttctctgtgaccgtccggctgccggtgacaggctgttcctgtccgtccgggccggtcatggtgacagcggcgtccgccggggtataggcaaggacaatggtgcgctcccttgcccagccggtattgtccgccgaggcggtgagggtgggcagcaccgtgtctgccgggaaggcgaaggaggtatacgcatgggcggcggcaccggtgccgtcatactccgccaggatatgcaggtaccaggtttcgccgccggcctgccgggtggagagggtttcgccgctccggaactcctgccagccgttcaccgggagggtttcgctccgggtccagacaaacttctgcacggtggcattctgtaccctgacagcggcgctggcggtgccgtcggtcacgcccttgttctcgatggagatgaccggtactctggtgtccaccgaggtatcaatggaaccgccctccgaggaggtgccggcgccggaaacatcgcacatatccttgatgaagtccgtgccttcaatggaatcaacccggaagtcagaggctgcgttttccggtacggtgccggtgaagtagagcacattggtgtttgcgccgccggcgtactggaagctgccccagctggtgcgcagactgacttgatccagactgctgttgatgccgtccacgatctcatcaaagatcagtgagacggtcaccttgtcgccgggcttataggtggtctctgccatgggggcaatgtccaggagctggggctccacggcgtcatagacctggatatgatgctttacctccttggttgcccaatggtcgctgccatcgccgcaggcgctgaagcccacggtgacctgttcggtgtccagcgggaggaaaagagcgtcccccgactgaccgctgcggtagtgatagtcggtcatggtgctgttgatggaaaagccgctggcggggaagctgtaatcataccagtcggtcacttttttgttttttccatgctcgaacagagcgacatagtacatgccggtctggtcgatggaggagatgccgctgttgtagagcagcttgccgctgtcaggatagatcccgagatccagcgtgctgccgggcaggatctggatggcctggtagccggactcctcttccttggcctggaaggtgacatagtaccgcaggctctgggcggtatgggtccagtagtccgctccgtcacgggctaccgaggctgtctcccgggcggatgtgtcgttgccgacgccgttgtccgaccagccccacccgtctgtgtccttatcgccccgaccccgttccggctgagtgccctttttcgtgtattcctcaaaccacgcggagtcagctttcatgccggtgggcagggtgcgcgcggcaaagcgtgtattgcccagcgcggcgccgccctccacccggaagatctccacctggtaggtgcggtcggcattcgtgtatgcggtagcgggctcatcggcgctgtatgcggcgttggcgcccatttcgttgatggtgatgacggcgcttgcctgcccctcctgaagggtgacagtgccggactggtgctcaaagtgggtgccgcccacggcagagccgttcaccgtgcggtacgagaccgtctgtaccccgtcggtgccgtcccgggagatggtgaaggtgttgtcgccgttattcttgatggtgacggtgccgtagtttttggcgccgatggagaaggtgatctgttggctgtaataggtggtgccgtcggcgatgagataggcccgggcatagtaggaaaccccgtccgcgatctcagcccgggcggtgatgttctcccccttgcccgccggggcagaggtatgggaagcgccattgttgacggtgagggtggggttctgcatgacgccccatacaaagccggtttcggtcacggtgaggccgccgtccgaaatgaggacagcgctgaggtcaaaggtattgctctccccctggcgcgcagccgaaggagttcccagctgcaatggctggacggcggagagcagcgtcacggttctgggttccgaggtgttcccggcgtggtcggtggcggtgagggcggcagagctgctgtccgctgccagttcgcactggattgcggcaacaccggcaaaggcctcatctccgcctggggagacggtgtcggaggcggaggccagggccagtacctgtgcccggatctcctcctgggaggctcctccagggactttcagcgtatcggaggaaacggataccaccggcggttcccggtcgatgttggaaacgctggcctgtatgggaatggtgatggtcttttccacgccgtccagggtataggcaacggtgatctccgccggttgatccgcaacattttcggtgagcgccacttccgcccggtcggtgccggaagccggggtatcggtcagcccgctgatggtgaggcttttggcggtcatgccctcgagcatggtggcttcagctgtgaaagtgacttcctgaacggccttgttggtgggggtgacgccgtactggatcaggggatactgttccgccgcggcgtccgggccggcatagtaccaggaagcctcgtcccgggcgaggatctgttcggtgacggggtccttgagcaggcccactacccggtaggtgccgcttccggtgccggtgggcagggtgagcagcgcctggtcggtgagggacccgctgccgcagggactgccgaaggctgctgccagtgagttgcccttctggtcaagcagggtgtattcagtcttgtagtcctggtcgccctgggcctggatctgcaggtaaaccggcaggcttacatccggttcatcgtccggcccccgggtgatgatgggggtgcccagttccagcgaaaaagactccagggtatccggtttttcaccgccgtccagcagcagctggaaccagtcgatcttcaccacccagccctcgctgacggtgatctccacatagttgctgccgctttggatcaggtccaccggcacttccagcacagtggtgttccaggaggcattggtacccgagagctgcccgatgggagttccattccaggtgacaatgtcggttttgccgccctcctcgtccacatcgtaggccttgatggcaaggtaggcgttttcctggggaagtttttcagcgggcacctccagacgcacttcgatggggtgctggctgtatttcgggccgagaatacggtccatgtcgtcatccggtttgccgcggtgggcgttgtcctcattgtcctcccccagcaggatggtgctgccgctgagcccccgggtgagcagcatggcgctccgcagcgaggaatagccctcgtccaccagcgtctccagactgagcagctccgggtcggggtcgctggcagctgccgggtcggattccatctcctccggagaatccagttctgcctcaccctcttccccggggacagtctccccatccgggagcggctctgtaccggggtcagtctccccgtccggagcaggggcttccacaggcgggttctcctgggaggacagaccgccgcaggattcatcatggacatgggtgcattcggtcacggcggtatagcagctttcggaatgggtgtgttccccggattcctccagaggacaggtcagttccagacggatgcagtcctcgccgcagatgtgggtgcagccgctgtccggggcgtcagacgggagttccccggtctgttccggtacagccccgccggacagttccgcatgactgccggactgggcatacacactgggacagcaggaagaccctgcgatcaccgccgcaagcaaaacagacaggattcgatggcgcaacttgttcataaaagcctcctcgcagataaaaaaggcagcagtcctctgcttaaactgagaggatcagctgcacttgacggcttgttagccttatgctattttaagtttagcttcagggtgaaaattttgtatggtttgtgcaaaattgatctgaatttgcggcatatttgacggtatggaaggaggcagccggcccgatgaaaatagcagtctgtgatgaccgcccggaacatctcaaaaaaatccaggaacttctggaaaaatatcagcagacccgtccgggactggagagccaggcagagtattttctcagcggagcagagcttctggaccaggcggaggagcggggcggatatgacctctatcttctggatattctcatgccgggggagaatgggatctcggtggggaagcggctgcgtcagatgggaaagcagggagaactgatcttcctcaccagttccaacgactatgccgctgacagttatgaggtccgggcctttttctatctgctcaagccggtggaggaggaaaagctgttccgggtgctggatcaggcggtggaaaagctgacccagcagcagaaaaagaccatgctgctggagacccgggagggaacccgatgtattccgctgggccggattctctatgcggagcgggccggacgggtgatgcgctgtcactgcaccgatggggttctggattcccagaccctgcggatgcccttccgggaagccgcggcgccgctgctggcagacccgcggttttatctgtgcggcgccagttttgtgctgaacttccggcatgtcaccggtatcaaggggcaggaggcgctgctggacaatggtgaggccctgaccctgccccggacagcggcagtggagttcaaacgggcctggggagactattggctgaaggagaatgccagatggatcatgtgatgttcctgttgttccgggcctatttcatcaccctgatgacagtgggaatgatggcgagtctgaccgagttccgtttcgggcgccggaagctgctgggaattatggcagtgtacagtgcctgggtggtgggttccagtctggcgctgctgtatttcgggggagaactgctgctgctccggctgtttttggttaccatttcagtgccggcaacggctcttacctactgggcagccaatgataccccgacccaggcggttttcaactatatgacccagatcctgctgtcggtgctggcggcatcggtgatccgtcatatcaccagcgtactgggtctgtcggcgctgatgaatatcctgctgatgggaatattctatggcacagccatctatctggaatggcgcttcctgcgcaaaccgttccgggtgctgatcaaggcaattcctgcccattggggaatcctgaccctgatcccctgtgtattctgcgcctatcttatctttgtggcgtcctggccgggcagctatctggacaacccggtgcagatgatctatgcctatgccgcggtagttccgctggtggttgtgtatattgcggtgttccggagccttctgggacagtaccgcatccagatggaacggcagaatgcggcgctgctgacggtgcagatctcagctctccgggagaagctgcatgagatggaagaggtggaggagagaatccgggtgcagcggcatgatctgcgctatcagctccagaccgctgccgaactgctgtcccggggagaccgggaatcggcgctgaatttcctggatacagcccggaagcggctggacgagcgcagggagatccactggtgccggtcgccggtgctggatgctgtattttcctcctgttttgcgcaggcacagggtcagggggttctggtggaggcaaagatctccctgccggaacagctgccggtggacgaaggagagcttgccattgtgatcgccaatgccctggagaatgccctccatgccaatctggctctgccccgggagaaccgcaggatctcctgccggatgatcggctatcccgacctcatgctggagattgtcaacccgttctgcacggcagtgcggtttgatgaggagggcttccctgtctccccgaaggaggggcatggactgggaacccagtccatccggtacttctgccggaagtatggagccgtgtgccattgggagacaaaagacgagcagtttgtgttccacctgattctctgagccaaaaacagtgataaaaagggctccgcagggattttctgcggggccttttttgtgatggaagggatctcctgcacggacagggtaaagcaatcggtgagcatcagcgtcgggattttccataaatcctgccgctgcgtgagacagtttccggacggctttgcggcctgcgggctgtggtggttcaccctggcccggaatgatccgggggtgcctgtctgcattcccagcctcctgccgttgcagtcccccgggaaactgctataataggggtagagaagcgctgcctgcgccatttgggaaggagaggatcttatgtggaaaaatcgtctgctctgtctgggactggtgctttgcctgctgcttgcgggctgctccgcgcagcggggagagcctgagtcgtcccaatcttctgaactcagctctcaggcttctgagcccggctcccagtcttctgaatccggttcccagacctccgaaccggcggaagagaaaccggctctgcccatccaggacagcaccggctggtcggagggcatggctcagatcatagaaactgcggcagagtatttcatcgagcagcgggacggagtttcggacggcgagctgaccgaagcggatgtgacccggctgtggtacctggtcaataccatctatgatgccgatgatgtggcctttgcagatgagatggcagcaccgcccgaaggtgttcccgccggtattctgtccaagttcgtggattttgatgaagccacccggtatcttttcaccagccatggcctggagcagctgctctcggccgagatggcaggagagccctatatctatcaggcggagaatggagaggtctatcaccgcgggccgtataggaccggttattcctatcagaatgccatgactggctatcgggttgtcagcagcagtccggacagcgcccaggtggaggtatcctggagaatcgcagccccactggactgggaaggggagtgccccgaagcctttaccaccctggttctgaagcgggaggacaaccgctggaaggtggacagctataacttcccggaggcgagctatcctgaggagttcaccatcaccgaggagatccgggtaaagctcatagacggaacgcaggaaacaaccctttcagatgccgccgaaaaggaacagattgttgcccgtctgagggaactgaccctgggaaccgtcgtccaggaggcgccggcccaggaccgcattgccatagaggcagtggacaatggcgcagtctatcacatgtcggtggcgccggacggtcgtgtatgggataccctctacgccgatggggagtgggttctctaccaggccgatccctccttctatcaggagcttcagagccttctggcgtaaaatccgtaaaaaccagccgggatttccccggctggttttttgctgcgcagagctgtccgccccggaggagcaaagcccctgttcccagacgcttccacacggaagttagcccgggcaaaaagaaaaaggcacccgtgcggatgccttttgtctgaagtattttctgtgagtttacaggcagcggctgtgcgtctcggtttcgccgggagcggctctcgggctgtttcaggccagttccagatagagcgccgccagatccagggtggcgtgcagggcatccagatgggtgcgctccatgccatgggaggcgtgtacgcccgggccgatgagagcagcccggcagtccataccggcgtgccaggcagcaccgacatccgagccatagtgggggtaaatgtccaccgaatagtccacctgatgttcctttgccagctttaccagccggctgaccatatcatagtcataggggccgccattgtccttggcacagatggaaacctgatattcggtgcagcccagatcttcgccgatgcagcccatatccactgccagcagctcgtccacaacaggcagggtggcgccgccgtgtcccacctcctcatggacagtaaaggtgagataggtttcgtaccggggcagggttctggtttcacgcatctgccacagcagggtcagcagacaggcagcactggccttgtcgtccaggaaccgggacttgacaaagccgctcccggtgacaaccgtcttgggatcatagcagacatagtcgccggcggcaatgcccagagccaggacgtcctccttgttgtgtaccttctcatcgatgcgcactgccatattcttttcgtcccggggacgggtggcggcgtcgtcctgtacatgaaccgacggcgacaggctgagcacagtaccggtatataccttgccttcccgggtgtagatgcggcagtattcaccgtccagggtgggcagcagcgggccgccgaccttggtgaccatcagcatgccgtccgcggtgaccgaacgcaccatcaggcccagggtatccacatgggcgcagagccctaccttgtgtccgctctcccgaccgggcactgtgatgaccagattgcccttgttggtgcgatgggcgtcaaatcccagttcccgggcgatctcctctgccacagtcacgacccgttcggtaaagccggtgggactgtcctgtcccagcagcttctgcagtgtatccaccagaaagacctgccgggcctctccctgcatcttttcctctgtcatatttagccctctctttgtgataaaatatccggttccatcttacaaaaaaagtcgcttgttggcaagaggcggttcgggagaagcatgcccggaccagacagaggggagatctcacaggatcagacgcagccggaaccagccatctgtcaggtcgaactgacagaccgctccgtttttatggcaaaacgcggagatggactgtactcccagaccatgcccctttctctgagcgatggggaggccgttgctgtcaaagactacatcgtcagtacatggattggaaagctccagcataacgccgggagtccccaccatcctgcaccggatcttccgctgcttcgtgggcagcaggagattggcatggatggcattttccagggcgtttgccaggacaatcgcaagctctccttcgtccaccgggagggtgtcgggcagggaaatatccgcctccaccggaatatcctgattctgcgcctggtcaaaataggaggaaaacacagcattcagaacaggcggacggcaccatcggatcagtttgtattcatccagccgtctctgggtggcatccaggaagtccagggcggatttttcttccccccgggctaccatctccatcacagcctggatgcgatggcgcaggtcatggcgttcggcgcggatgatgtcctctgcggcttttaccgcttccatccggctctggagcgcggacagctgcaatgcggcaagctgtgcgttgttccgggcttccgcctccttgcggatgcgggagaagaaaaacagcagaatggcatagaatcccaccatcagcagggagatcgcaggcttgagaatggtgctggtgagctctgaaccgacatagccggggatcaggtagatcacgatcgtatagtaaccaaccattaccagacacatcagccaccagccgtgctgcagttccatcagaatctggaagaacaggggacgcagtacccggatcaggagcagcagtactccgatggtgagaaccgcacaggacaggatcaataccaggaggttccgaccggagaagtagaaggcgagcgcagagccatgcagaatcacagtacagaacagaatggcagagagcagctggaagatcagccgccatccccggaagcggctgagtaccagaatgagcagcagtgatggcacatgggcgagcaggggatagagccagagagtggctttcaggccggctgtccggtagacaaccgccacagcaatcatggcagcgaacatggtgctgtaaactgccagaacagtccggcggcgggagtaccggctgtccagaaacagcaggaccatgttcattcccagaacggtcatatattccatcatgccaaattcaatcatttctgtcccttcccctgctggcagtaagccggatttccggaaattcccggcctgttgcttttagaataccagaatgcagaggtctgtacaatggaaaacttccgcacctgaacgggcggcctttggattgtgagctgtggtctgcggcatgggaaggcgtgccggccattctttccggctcccctgtatggagcctggatttgggtcaggaatcgggaaaaccgaagtccattttccctctgaaaacaggccatccgagagcaggaaaattccggaagccgcatagactggacatcaagacggtctcgggtatgctgggccactattctgctggatttaccctggacacctacgcccatgtgaccaccatagcccaacggcaggcagccgatgtgatggggaatgtcctctcgggcgctttctgaaccgctccggacctttccgcatctgggtcagaatatgggtcagaagcgattccggacaaaaagaaaaaaccgatgaaaccacggtttcatcggttttttagtggttgcggaggctggacttgaaccaacgaccttcgggttatgagcccgacgagctaccatctgctccactccgcgtcaatctctattgctatactataatagcatatctattgtaccctgtcaaggggaactgaaaaattcctttcaaatccaaagtactatgtagcgccggggagagaattctttccccggaacagccttccggcgcgggaatgggcatgacagacgctcatgccttgtcccgggaacggcagagcagtgccaccagcagcgccgctgtgatggcagtggtaatgccgcccgcagaggcagtgagcccgccggtgaggattccgatggcgccctgttccgccatggcgtcccggaccccctttgccagcagggcgccgaagccggtgagcggcaccgatgccccggctccggcaaagtccagcagcggctgatagatcccgatgccgcccagcaccactcccagcaccacaaaggataccaggatacgggcaggggtcaagggggtgtagtcgatgagcagctggcccacagcgcagatcagtccgcccacaaaaaaggcacggagcagtgcttcgatcagttccatggcagatcctccttccgggaagtcagacatacggcatgggcaatggagggaatggattccccctgctgggtgctggtggggctgagcaaagccccggtggctgcaaacagcacccgcttgacccgtccttcccgcagggagggcaggatatagctgcacagcaccgaagcgcagcagccgcagcccgacccgccggcgtggacatcctgccggtcccggtcatagatgagcaggccgcagtcggtgtgccgggagcgcagatccacgccctcccggattgccagctcatagagcaggtcgctgcccacctggcccaggtcgccggtgaggatcaggtcatagtcctcgggggtggtaccggtgtcggacaggaagcccagaatggtcgccgcggctgccggtgccatggcagcgcccatgttggcggcgtccttgatgcccttgtcctcaatggtgccgatggctgccgcctgaatccacggcccggcctggtcgggcgtctgggccgcagccccggctaccaccacagccccgccgccggtgaccgtccactggctggtgggggtgcgctgtccgccgtattccagcgggaaccggtactgccgttctgccgtacagaaatgggacgccgtggatacccccaggtaccgcagtcccgattccgccaggaaggcggagagcagcagtccttctgccatattggagcaggcgccgtagatgcccagataggggattcccagctcccggaccccaaaggtggcgccgatgcactggttgagcaggtccccggccagcagacagtcaaggtccgcataggagagcccggcttttttcaccgccagttccacgatgtcatggtgcagacggctttcagcccgttcccagctcttctgaccaaaggtgctgtccgggtcaatggtgtcaaagaattctcccagcgggccttcgccttcccgtttggagccgatggcggcaaagctccggattgccgccggatgctggaacagataggtctgttttccgcgtttgagtgccaaaccgttttcctcctctctaagcctgaccgaacaggaaccggatcagtccatacagcaccgaagcgctgattccatagaccagtaccggtccggcaatggcaaacatcttggcgccggtgccgaggatcaggccttcgcttttgaattccagggccggtgaaaccatggcattggcaaagccggtgatgggtaccagggtaccggcgccggcatggcgggcaatctggtcgtagatgcccagtccggtgcacagggccgagaggacaaccagcgtcatgctgcaggcccccgaagccagatccgccgggagacccagccgggtatagccttctatgaggccctgacccagggcacagatcccgccgccgatgaggaaggctttgggtacattgatccagggtttggaattctgggaatatcgtttggtgagcgcgtcgtactccgattcagtgagcgacatgcctccaccgcctttcataataaaatcacgctctgcgctgcctttatcctgtgcggattgatgggtgtttatgcgctccggaaaaccataggctgagaagtttttccagaaaacggacaatcattacagatcgttcacaaaacagcggtttttttaaccggggggagtatgctataataagctcagtcaaaaaagatgatcccggtctggaacggacagaccgttttctatggaggttttgcctgatgcaggataaacacaattccaacgggttctatgatctgtatcacaaccctttcacagggaacagtgaaccccgcggatatacctatgtggcaggatatggattttctccgccgccccgtgccgattatgagcgccggatgatccgcacctattccagcggcattgccatgatgctgctgtgtttcctgctgctctcagggccggtctatcagctgatcctgaccctggaaaccatgctgttcgggcagttcatgacctatgatggctataccgctgccgctgaaatcgccaatatgggcgcctatgtgctggccctgctgctgccggctgtactctactgccgccgcatccgcattcccacctacaatgccttccccctgagccagccccgggatacccgcattgccctggcagccattcccatcaccctgatgactgtggtggtgggtgcctataccgcctctgccatgagcgtcttctttgcggccttcggactctatcccaccagcccggtatcggctgtgcccaccggtgtggtgccctttgtcctctacttcctcagctcggctgtgctgcctgccatcgtggaggaactggtgttccgcggcgctatcatgcagtcgctgcgccggttcggcgataccttcgccctctttgtctcctcgctgctcttcggcctggtgcacggcaatctggtccaggctcccatggcctttgtcaccggccttgccatcggctattttgtcctgcgcaccggttccctgcgcgccggtatggcgatccactttgtcaataacgctctggcagtggtgctctccgccatcagcgccagcttttccatcaacggtcagcagaccatcaccagcattgtctatgtggtatacctgctgagcggtttcatcgccatgggctggctgctcacccggtacagcaatatgttccagctgcacgcttccaataccgtcatgtccatacgcgggaagctcacagcgttcttctccaccggtctgatgctcgctctgctggccctgctggcctttactaccagcaaatacttccttgtgatctgacggaggccttcccatgaccgcacatgaaacctatatgcgcacggctctggaagccgcccgggaagctgcccggctgggagagatcccggtgggggcctgtattgtccgggacggggagatcctctcggtggggtacaatacccgggaatcggagcgggaccctctgggccatgcggagatcaatgccatccgccaggcctgtcagcggctggggagctggcggctggacggctgtgtgctgtatgtgacgctggagccctgtcccatgtgtgccggagcgatcctcaatgcccggatcagccgggtggtatatggggcagcggaccccaaggccgggtgtatgggatcggtgtgcgatctcactgccatgcccttccccaccgtgccctattataagagcggggtgctggaagccgagtgccgggcagaactggaccggtttttccggggactgcggcagcgggaagcggcagcggaccagatgtgagccttcccgacaaattctccacttttccccggattttccgcaagttgaatctttacaaaccggtcggaatatgttaaaatatggaatgtcggatgtttttgctgtatcaccctttccattggaaagcggactttcattcgatgatcgacgacaaaaaggcggggcgcaggaattgcgctccgcctttttccatgttacaatgccagtatatccataagtccgaaaaaggagccgagccaatatgtcatttgaactggtaaaaaattatctcaccgagcggggttatggggaccgcgcccgggaattcaccgtatccagcgccactgtggaactggcagctgctgccctggggtgtgagggcgcccgtattgccaagaccctgtccttcaagacaccggagggggtggtgctcattgtggcagccggcgatgccaaggtggataaccacaagtacaaggagaagttccataccaaggccaggatgctcacccccgaggaggccgtggagctggtgggccatgcggtgggcggtgtctgcccgttctgtgtcaaggaaggggtcaaggtgtatctggacccgtcgctgcggcggttcgatattgtctatccggcctgcggcagccccaacagcgcagtcaaactcactccggaggaactggaactgctctcgggcggcgaatggtgtgatctctgcaagctccccgagcctgcgcaggatgctcaaaaagctcaatgctgccatggattatattgaagcgcatctggaggaggatttccgtctggaggaggtggcagcaggggtggggatttcggatctcagcttccggcagctgttctatgccctcacaggaatgaccctgcaggaatatgtgaagaaccgccggctttccgaggccagcggggccttgctccggggctgttcggtgaccgacacagcctatcggtacggataccagtcggtggatggattcacccgggcattccggcggtggagcggactgctgccgtccgaagcggcccgcacccggcagggacggacattccagcggctgaattttattgtgacagtacagggaggagataccatggaatatcggatcgtggaaaagccggcattccggtttgcgggagtgagccggcgggtacccatgcagtttgagggggtcaatgaggcgattgtgcggctggcggagagcatcacccccgggcagcgggaggagctgcaccgcctgcgggatactgccccggaagagatcgtgaatgtctcctgggattcggacagcggattccgggaggagcggggagagctcacccacatgatcggggtgctcaccagccagaccgacatcggcgccggactggacagcaaggagatgccggcatcgctctgggcggtgttcccctgtgagggagccttcccggcggtgatgcaggacaccatggctaggatctattcccagtggctggtgacagcggattatgagctggcggattcgctgagtttttcctttacccgcatggatgcggcagtccccggacaggcatacagtgagatctgggtgccggtgcgggaaaagcggtgctgaccgccggagtcacgcaaaaaaccgacagaccccggagggtctgccggttttttatttccccgggaatgggggatttatgccttgtgatttccaaggtagcggaaggtgccgtcctccagcagacgcacagtgagctgatacctgcagccttccaggggctcgccggtgaagtagctgtactcctcatagtgcagggtgagccggtcgccggcctcctcccagccggtgacccgcagatagtaggggccgccgccccgtccgccctcatagtaaagggtgccggaagccgggtcgtagatgtcctggtacttgtcgatgagctgttcctcggtgacgccgtcaaagtaccggctcagctggaccgccatctcgtccaccggccagtcggtgccgtagacatcaaaggggctggtgttctggtggtcgtagcggtagagatcctcaaacacccacagcggtcgggggatctccatcagggagtcccactcgatcgatcccagggcggtagaggtgagcaccggttccagataccgttcatagagctggaggcgctggtcggcgttctcccagagcagacggtcggggatcaccgggtagccgcccggctcactgaagacttcgtccgttatcgccagatagccgtaatcgctgagttccagcgcctgcacctcataccggctgggttccataaaggcgaagctgctgtcctccgagtagtcggagaagtaccagctggagccgccatcggtccagaaccgggtgtacgagcaccggatcgtttccggatcggcgtagtccggggtgaaggtatagagggtcagttccccggtgccgccgttctccagcgccttgcagaagatgtccacagcggtgcgcccggtggcaatccgccccgcatagttgatgaccgctgtggggtctgctgccgcagtgcggtaggtaccggtggaggtcagcgcttcgggcagcaggtcgggatagaggatctccgcctcccccgacgggagcaggctgtcacgccgggcagtcacagtttcccggagagcctgggcctgctccactgcctcgggggagccagcatagagaagataggtctcctcgtcctccagcgccagcatggactgatcgctgttgatgagggagcccacacccagggtacgcccatccggggcctgaagagtcacaaagaaactggggtcatggggaggcagggtgtacgggtcgatcgcttcccattccgaaccgctcagcagactgaacagttccttctgctcctcatcggtgagtgttaccgggctggcgccgtccatggggccgtatttatcaaagagcaggacggtgaagtccgctgcgtcccagccattgggaagcaaggtagtggtcagggtgtccccggagctggaggattccggctccgagggggtattgtccggggtacaggcggcaaggctcacacagcagagccccgccagaaaaagcgtcagaagcattcgccgcagttgcatgacagttgccttctttctctgaaattccgtttattctgccggctggcaggagacaagatgcagcacgccgtccgcatcataccgggcagtgaccgtccatcggggcagggtgtccagcagagccagtacccggctgtcgctgtccaggtcctcatagaggggaatccactcctgctggtattcctcggtggtgccgctcacgccgcccatattcatcagaagatagctcacctcggcggtccagccgtcctccgtttgggtgatggagtggggatagggcagcacttcgcttccaacccccatgtggggcggggtgtagaccccttcggtttcgtgccagatccagtgaccggcgtcctcatggacaatggggacttcctcgccccagatggcccgggccgtggcctccacccactccccggggataaattcactgtcctgtaccgcatcactcagcgggcgcaggaagtcatcgtcctcgggatagaggggccagcgctccggttcgttccggcaggcgtaggtgtcgggggtggcctggattgccgctctcagaaccattccggggtcgagttccgagggggcggcataggcgccctgatcccccgccagccagagcagggtatagaactccggagtggtttccatggcctgttccccggcagccagcggagaattggaactggtcttaaatccgggccagggcagcagcgcccggagccgggcaaagtcctccttggtgaggggctggttgtagaggggctcgggttcatagcttccccagccgtcgtcctccagggtcacgccgcccagcgagaagcccgccccatccagggtgaatcccaccgaatagaggccgttttcccggagggtgcaggccagggaattgagcagggcggtgaccgcttccccatcggtaagagcctgggcagcggggctgtccggagtgagggcgagatccaccaccgcaaagcccttctccacccggattccattgagggcgatgccctctccctggggatagagggcgtccagtgccgcctgtgccagctgaccggcggtttcattcccggcagcgggatagcgggtgagggtgtagccctggcgggcgctgtcatagacgcagacccgcagcatttccccttccagcccatcggggaggtagagcgcctcggtgagggggacatcttccccgagcggctgggtgccgaggggcgaatccgaatcggtgtgaccgagcagccccacagccagcgggtcaaaggtttcggacaccggggaagaactctccggcgtggaattctcctccgtgcgctccgaggacagggagcagccggaaaggagcagagccgctgccaggaacaaggcagtgaaccgtgtaaaatgacgcatggtgattcctcctattccacaacttgtacggtatggtcatgatcgggccgggcgtcgatatagcagcgcatggcagtttcgcttacgccggtgccatcgggataatagacaaagtagagcagcccctgggtgtaggaaaagtccgccaggtagagatcatccggggagacgggatacaggccggagccgaattccgagaggacttccccggtgctgtcaaagacgcagaaccgccattcttcgggggtgcagtaggcgatggcatactgtccgcccccttcccgcaggggagccagactgtagaagatcgcctcagcgtcctccgaaagcccggccccggcttcaatcacagcaagggggtcagcggagttttcagcatagaggcagacccgttcctcacagagtaccgccaggacattattttccagccagaagagctggggcgaggtgccaaggccgctcagttcggtgagggtgtgggtttcgctgtcccagagcatcacccagttttcgcccgaggcgaaccggggggtgatcagctgatcttctccggtgctgcccgagacgccgttttcggcccgggcatagaccgcaaaggcaaagggcgggggttcggtgagccccgacaggggcagacagccgaagtccgagatgagaataccctgtccggttgtggggttccagaagttgtagtggctggtggtaccttctgccagtaccgcctgccagcccgagagatcctctcccagccggaggtcggcttcccgtccggtataggcggtacgggtcaggctcacccggggcacatagtccccggacgaactggtgacggtatagctcacctgacagctgaggatcatgcggtcgttttcgccgtccccgctgatctccaggatcacgaaatagctgggaacccaccggtcccggaacaccatctgttccgggtcaaattcattgggggcaagcacccagtcccggctctcatacagcaccgaccagctctccagctcataatactgctgggccatcatccgggtgcagaggggattttcctcgaagctgtccagctgatccagggagggcttttccccggcgggctgatccgactggatcaccagctcatcatagatgtccccgggtatggtgggataggtgccgttgctgtccggtaccatcgggggaagctgggccatgagcgccgcccgttccggcgggatttccgcctgggacggggcagcctccggttctgcctgggaggaatcgggctccgactgggaggcatccggtttctccggggcggagcccagttccgggagaggcaggctgcatgcgcccagtcccacagccagtgccgccaccacaccggtgaccagcacagcgggccagggggagcgccgctcctggtaggagaggatcgcctgcaggcggtcccggagcagtttgccgccctggctcaggggcagggccggggagaccgatcccgctgccgcccggagcagcacttcgccgtaaagacagcggtcgccggggcggagcagccggagtacagcctcatcacaggccagctcacaggcgtggtccatctcccgttccagccgccgtgccagggggttccaccagtgcagacaggccgccgccccagccagccaccggcagaggaagtcccgccgccggtagtggatcagctcatggagcagggtgcagaacagttcctccctgccggtttcccggtcgggcaggacaatgcaggggtgctgtacccccagcagcatgggggtgggcagtccggggagacagagcagctccacctcatggcgtacccccgcccggcgggaggcacggcgcagacagcccagcagagccgggtcgtccaccggcctggcctcccggcgcaccgcccgcacaaagctgcggtaggtaagcccccggcgtatgagcagcaccagggcagtccccagccagagcgccagtaccgccggcgcagccgcctgggccagctgccccgcatcggggagagtcagtccgcccggagtgtcagcccccggataatccgtggttccggcaggggcgtccccgtccgggcttccagtgggagagctgccggcggacgggctctccccggtattttcctccggcagagggtcagttccggggagggcagcttcgctgtcagcggcctgttccgccccgtcgggcagcaccggggcggcgctgtcctcctccgggagagaaccgacctggctcaccgctgccggcggcgcaaagagctggttcatcaggctggcttcgggggcaaagggcaccagcaggcgcagcactgccgccagccagatatagtactgccaccggcggctggtacgggtccgcagccggggcagcaggagcagcagaagcaggatcagcacactgcctgacagggccagcgagagcagcgtgcgcagcagggcagtcacagtttctcctttccctggtcccacagggtgtgcagttcgtcatagtcctcgggggagagcagctgctgttccagcagggtcagcaccaggccccgggcctcgccctggtagagcttatccagcagcgaccgggtctgggccgcctggtattccgcctcggtcacggctgcggtgtagcggttgcgccgcccgagcttttcggcagtcaccagccccttttcccccagccgggccagcagggtgatgacggtgttcttctgccagccccgggcgacgatgtccggcgcctccatcagttcagcgtagagggccctgccgccctgccgccagagcagcttcatcagcaccaattccgcatcagagatctgtgggatcatggtcattcctcctttaggactacaaattgtaggctaattatacaatagcagaaccgaccggggctgtcaacggcaaaaaaagaagcgccctgtccggccataacagacggacagggcactgtggaaagggggggaggaagcattgggtgagggggcagggaggtcagcctgccaggggcgggatcagcggcagaatccggcagacagcggcggtgttccggcggatctcctcgggacagagcccctcccggcggctccagtgctgatccaggcggctgtcccgggcaaagacaaagaggcttccccggcagaaacagaggatatgccggcggcagtccacctcccggaagaagcgcagcaccggtttggctgccccatgggtgaggattgtccggcagagttccggacggtcggtacgcagcagaagcggggtattgcccacccagctttcggcacgctccagggtgccgggggagcgatggctgcccagagccgaggcggtgaggggactgccggtctgttccggggcaggggtgcgcaggcagcggatctgggcatagctcacctgccgccaggggctgtccgccgggagggggtactcatacaccacccagtcccgcacactgccgccgggacagttctcggtgaggtcatgggccagcacagcgccccggggcgagggccagctcagggtgccgccgtattcccccagcccgccggagaagatcccatcggaaggctcccgcaggcggcgctggatctcccggctgcccagcaggcaatagccgcagccgggatagaactgctgcaccagcagcggacgcatccggagcaggcagctgtccaccctgccgcggcaccggagctggcggcggcagagcagggcttccagtccggcgcagaccagggcgatgcccagggtaccggcggcggactggaagccgggcaggagggcggcacagcagcccagtacggccagcccgaggcttaccccgcccagacagagccgggagcggtatttttcccgggcatagtagtcccgggcagcggaatcggcggagggggtgagggcagactgcatggcaggggaggctcctttctccggcggacagccgggcttgttctgattctatgatagccatggcggatagccggtcagtggggtgaactgtttgtaaacttccggcggaaccgggggagtttaacccggatttcacaccattgcggggtgattttcatagatatgaagtagagtgaaaccaggagcaggggagtgcctggatgggactgcccgcttccatcaccgaaacagaggagagctgtccatgatccctgctgtgccgggaccccagaatcacgccctgaaccggctgccgtccatagc

SEQ ID NO: 422 - DNA, 19491 bp, Unknown
  16S sequences of unknown bacteria
gtttaccatcttcgggatcgttatcgtctttccgggagtggccgaaacccttgcaagcgcctttctgttaagaattttattaagcaaagacgactttcccacatttgaccttcccgaaaaaacaacctcgggaaaggtcgattcgggaagctgccttgccagtcccgcagacatttcaaaaacagcgttgttaaaattcatcatttttcctcctcacgcaaaattggcggctcgctcgtcgctcttttcgtttccggaaaaatgttttcttttttcggtttcggtcttttttatatatccgtcgtcggcaaaggctatgggtgtaacaggttcaatgcgttcgacggcgacaaagtcaagactttctctcaccttcgggtcgatttcgtcaagatcgggaaggttttccttgggaattataacggtcttcatgccgtatttatacgctgccatggtcttttccttaagacctccgatgggcatgacccgtcccgtcagggaaatttcccccgtcatggcgacattacccttaacaggagtgtcggaaagcgccgaaagcagcgcgatcgtcatggttattcccgccgaggggccgtccttcggaacggcgccctgaggagcatgaatatgtatatccgactccttgtaaaacttttcgggaatattgaaaatctcgcttttggagcgtataaagctgaccgcagcggtggccgattccttcataacattgcccagagagcctgtcagaattacctttccgccgcccttgagcacggccgcctcgatttgaagcatttctccgcccacagatgtccaagcaagaccgttcacgacgccgacctgatttttcgcggcgtaattttccggcttatatttatagtttccgagaaaatcctttatgttcgacgcttttatcgaaacgctttgaactccgtcacccacgatttttgccgccgcttttcggcagagagaagcaatatttctctcgagatttctgacccccgcctcgcgggtgtagttgtcgataaggcaatatatcgcgtcatttgaaattttgcaggtcttagatgtcagaccgtgtcgggcaagctgctttttaagcaggtgctttttggcgatgttgaatttttcctctctcgtatatcccgcaaggcttattacctccatgcggtcgagaagcggcgccggaatggtatcggtggagtttgcggtgacgataaagaaaacgtccgaaagatcgaagggaatttcaataaaatgatcgtgaaattccacgttttgctcagggtccagcgcctcaagaagggctgcggaggggtctcccctgaaatcggaaccgagcttgtcgatctcgtccataagaataagcgggttttggctttttgcctgtttaacggcctcgataatgcggcctggcatcgagccgatataggtctttctgtgtcctctgatgtcggactcgtccttcactccaccgagagaaatccgtgcataattccgtcccatgcaggaggcaatcgagcgggcaattgacgtttttccgacgccgggaggacccacaaggcaaataatctgtccctttatatccggggcaagagcccttgcggcaagcacctcaattatgcgctccttgaccttttcaaggccgaaatggtccctgtcaagctgttttttggcggcatttatgtcgtgcttctccttggtttttattccgaaaggaagctcaagacaggtgtcgagatagccgcgcacaacggtcgcctcatgggagcccgaaggcattttaagcaggcggttgacctctttgaaaagccgttccttaaccgagtcgggagccttaagggcggcaattttcttgcggtattcctcggcctcctcctcgggattttcatcctcgccgagctcctcggaaataaccttcatctgttctctcaaaaagtagtcgcgctggttttcgtccatgctttcatggaccttgcgctcaatttcatgttcaagctttaaaagctcggtttcggccttgagctgagcaatgacgtattcgagacgctttaaggggttggtttcctcaagcaccttttgctttgtttcgtatgtaaagggcacatttgcggctatatactcggaaatagcccaaaaatcctcgtttgaggcaacatgaagaataacatcgggggaaatttttctgttttcggcggcatagttttcaaaatcgtccttaagggttctgagcagggcggatttgagcatggcgcttccccggccgattttgtcgttcagaatatctgtttccacaagataaatagggtcggaagaaaccacattggttctctttgccttaaaaagaccctcggcgaccacgcgaagtccgtcgcccggcagacggattatctgctttatgcgtgtaacgcagccgacctcgtatattccttcgggcgatgggtcctcgtcctcaagctccttttgagccgcaagaaacacaagccggtctctcgacatcgcctcgtttatggcggcaagagatttgggtcttcccacgtcgaaatgaagctgtaccgaaggaaaaatgaccaaaccgcgcagggcgatcatgggcatttcggaatataatttatcggacattatatatcctccgtaagtaaaaagttttataatttcaaaaatcggcaactgtcacaaaggcaattgccgataaattcaggcgttatcgccttgattttcatttgtccccgacgaaagctcaaccggcttgcggtcgggatttctgaagataagcgcctttgcctttccctcgacaaaatcacgggtgaccgtcaccttttcgacataagggtcggaaggcacctcaaacataagcgaaccgagcaatccctccataatggaacgaagtcctctggccccggttttgcgctgagaggtcttttcggcaatggcgacaagagcgtcgggctcgaattcaagcttcactccgtccatctcaaaaagacgcttatactgtctcacgacagagtttttgggctcggtcattacctttaccaaatcatccttgccgagtcccttaagcgatgtgacaacgggcagacgtcccacgagctcgggaataagtccgaaacggacaagatcctgatgagtaacatgggtgagctgagcctcttccgaagagttttcctcggtttttatctcgttttcaaagcccagcgaaccgccgccgcggcgcttggcaataaccttatcaaggccgtcaaaagcaccggcgcatataaagagaatgttggtggtgtcaatttggataaattcctgctgagggtgctttctgccgcccccgggaggaacgtttgaaacggtaccttcaagaattttaagcagagcctgctgcactccttcgccgctgacatcgcgggttatggacggattttccgactttcttgcgattttgtcaatttcgtccacataaataattccgtgctctgcggctttgacgtcaaaatccgcagcctgaataaggcgcagcagaatattttccacatcctcgcccacataaccggcctcggtcagcgtggtggcgtcggtgatggcaaagggaacatcgagaatttttgcaagagtctgagcaagaagggtttttcccacaccggtgggtcccagcaaaagaatgttgcttttctgaagctcaacatcgttttcgctttcaaacatggtgcgcttataatggttataaaccgcaaccgaaagagaacgcttggcctcatcctggccgataacgtattcgtcgagcttttgctttatctcggcgggctttaaaagcttgagcttatgctcgtcaccggacacatgcgcctttttctgacgaaccgcaggtcctgcctgctcctcaacagtatgattgcaaagccggacgcattcgtcgcagatgtatgtcccgccgcggccgaacataatcttaaccatgtcctgactttttccgcaaaaggagcagcggacattttttcctttggtatcattaggcatattcaggtgttctccgttttatcttttagtaatgaccttgtcgacaagaccgtattccatggcctcggttgcggtcatgaaattgtcgcgctcggtatccttctcgattatttcaagaggcttgccggtgttttccgaaagaattcggttaaggttttctctcgtgcgtttaatgtggtcggcggcaatgagaatttcggtcgcctgccccttggctccgccgagaggctgatgaatcatgatctcggaattcggaagcgcaaatctcttgcccttttgaccggacgaaagaaggaaagcgcccatgcttgcagccatacccatacatatggtcgaaacgtcggatttgatgtactgcatggtgtcgtatatggcgagaccggccgtaaccgagccgccgggagaattgatgtagaggtttatgtccttttcggcatcttttccctcaagatataaaagctgggcaataacaaggctggcggtcgcgtcgttaacctcgtcggacaaaacgattatacggtcgtcaagcaagcgggaaaaaatatcataggaacgttctcccttgcttgtctgttcgacaacataaggtaccaagctcatttaaatcacctcgtagttagtgttggattattttggttaattattcggctttttcctcttttttggctgcggttttctttgcggcgggctttttggcagcagtctttttggctacaggcttcttttctccgtcctcggtcttctttgcagcggtctttttcgcagttgtcttttttgctgcgggtttcttttcctccgtcttttcaccgtcgtcggctttctttgcggcggccttcttggcaggagcttttttggctttttcttccttcttctccacattttcgataactgcggaggacttaatgacatcaatagccttgttggcggttatgtcggactcaagacccttctgaggaatggcggccttaacctgagcaacgtcgatcttatacatatcggcaatcttcttgtattcctcttcaagctcctcttccgaagcggtgagattttcagccttggcaacagcctcgagagcaaggcgggtcttaacctgtttttcggccgactcacggaaggtctttctgaagccctcctcgtccataccggtatactgcatatacattttaatgtccatgccctgatactggagacggcggctgaaatcctcgacattttcgtcgatgcgattttcgatcatgcagtcgggaacctcgacggtcatgccttcgacaacctgctcaagaagtttgttctcgaccatggagtcctcacggctgttcttggcatcgagaattttgctttcaatgtcctttttaagctcgtcgagggtgtcaaactcgctgacatccttggcaaactcatcgtcaacctcgggatattccttgaccttgatttcgtgaagcttaaccttgaaaacggcttccttgccggcaagctcctcggcctgatactcctcggggaaggtaacgtttacgtcaaattcatcgtcgaccttgtgtccgacgatctgatcctcaaaaccgggaataaaggtgcccgaaccgagggtcaactcataattttcgccctttccgccttcaaaagcctttccgccctcgaagccttcaaaatcaataacggtgatgtctccgtccttggcctctctgtcggtaacggtcacgatgcgggcatttttctccttgagggcgtcgatttcacgctcgatctcgtcggcagtaaccgaaacgacctcgcgctcaaccttaagacccttataatcaccgagcttaacctcgggctttacggtaaccttgattttaaaatcggcaccgttttcatcaagcgaaaccagttcgaaatccaccttctggtcggcaagctcaagacccgactcgtcaatggcgtcgtccacggccttgggataaagagcttcaagagcgtcctgatagaacatatcggctccgaacattttaagcaccatggccttgggggcatgaccctttctgaaaccggggacggttatttttgcaaggcctcttttggtagccttgtcgacagcgtcggtatattcctgaccgtcgataacaatctccagctcatagcgattggtctccacattgtttgttgatttgagtttcatttttatttcctccgtctgatggatttctttcatcaagataatataacacatctttgaaagaatttccatagtgttttttaatttcttcagaaaaaacaattaaatttttatgaacgggactctttttagccttttttaaccaaaacaggggtaaaatcgttggaatcggccgccacaagtctgtaggaaattccgtcatccgaagagcggaacgcccgatgagcgcccgacccgtgaatgtggccgtaaaagcaccgtttaacattatattttttcaaaacatctattattacatcgcatcttttgtcggcaaaaatcggtggatagtgaagaaagacgaccggttcaagaccgctgtcgacagcgcaaagcagcgaccgctcaagccttcccgcctctctgagcagaattttttcgtctccgctcccctcttcaaaaaaccatccccgcgttccgcaaagggaaattccgcatctttcaaaagagttgttgtgaagaatttttacggtcgaaagactgtgctcctcaagaaagcggccgattttactggcggtgtcccaccaaaggtcgtgatttcccttaacaatcagcttttcaccgggaagagaatcgataaaagaaaaatccgcaaaaaggtcctttatcttcatggcccacgaaacatcgcccgcaataacgacggtatcctccggttccacgacggctctccaatttttttcaagacgggaaacataattttcccaccccttaaaaacctccatgcttttgtcgggctcgcccaaagccaaatgggtgtctgcgattgtaaaaactgacattttaggattttcctgttttctgaaaaattttatgataaatcggttaaaaaggctaacaataaatttgcgaaggcttcttcgcaaaaacagaaaggtggtcaaaccatgagcgacaagacaaacagctgtgacaaaaagatttgctgcaacgtacaaaactgtgtttatcacagcggagaaacaacctgtaccgccgcaacggtagatgtgggtcctcacactgcctgctgctgtcaggacacctcctgcgcaacctttaaagcaagggactaaatcgggttaatttatcccgagcatcccgagaacgaccttttccatttcggtcttttcacagcaatcggtaaagcggggtttcctgtccttaagagacgcaagaggcgagggaacctcgcttcccgttttttccgaaagcttttcaataagggtgaattcgtcgtcgtccgaaacctcgcccgtaaccgcctcgtaaactcctctcgagaacttaaaggggctcgcggtggaggcaataacggttagtgtgtcgtctcccgtttcctttacatactgctcatagacatttatggcaacggccgtgtgcggatcggcaagataatcgtcattttcaaagcactcgtgaatggtgtcctttgtcatgccgtcgtcggcgcagcccgcatagaacaagtcctcaatctgctccttgattttaccgtcaaccgtatattttccgtcctttgaaaggccttccataagctctctcaccttttcgtcgtcctctcccgaaaggtggaaaagcagacgctcaaggttgctggaaataagaatatccatagagggcgaaagagtggtataaaacttgcggttgcggtcatattcaccggttttgataaagtcggtgagtatgttgtttttattggaagcacagataagcttctttatcggcacacccatattcttggcataatatgcggcaagtatgtttccgaaatttcccgtgggaaccacaacgttaaattcgtcatcctttgcaagatcgccgttgtgaagaagggtggcataggaatatacatagtatactatctgcggaacaagacgaccccagttgatggaatttgcgctcgagaatgacatattgtgttctttgagcgtttcggcaattttacggtcggtgaaaatagccttgacgccgctttgagcatcgtcgaaattcccctttatggcgcagacaccgacattttcgccctgctgagttatcatctggagtttctgcatggggctgaccccgtcctcgggatagaatgtgagaattttcacgcccggcacatcggcaaagccctcgagagccgcctttccggtgtctcccgacgtcgccacgagtataaccttagtctcgccctttgcggttttttccgatgcctttgtaagcaggaagggcaaaatttgcagcgcaagatccttgaaagcacaggtcggaccgtgccaaagctcaagcataaagacattctgtctcagttcggcaagaggagcaggctcgtcataatcgaaagttccgatgtaagctccctcggcgcactcgtaaagctcgtcctcggtgtaatcggtgagatattttttcagcacataaacggccgcgtcgatataatccatttctcccaaagctgcaaaatcctcagccgaaagaacgggtatgctttccggcacaaaaagaccgccgtcttccgaaataccgcgggcgatagcctctgccgatttggcgctcagagcgctgttcctcgtgcttttgtagttcataaaaattcctccgttgctcaaaatgaaaatggggtgtcttccccgtcgaatgccgctttgatatgagttacctcggcgtttaagtgggtctttccgggaggtaaaatcacctcgagcacgtcaaagcgcatttgattttttattttatatcttttcataaacaaaagggccgttgcaataagcttttgccgttttgaataggtgacatactcggacggtcggccgtggcggcaatcctttctggttttaacctcgcaaaaagcaatgacattgccctttgaagccaccaagtcgatttcgccggtttttgcgcggaaattcgcgcatacaatgctgtaaccgttgtcccgcaggtatcttgcggcggcgatttctcccatttgtccgatctgacgcgccgtgtaaatcattatttcagcacctttttaagaaaggtcagacgatgaatgggacatggaccgtatttattcacaagctctcggtggagagcggtgggatagcccttgtgctttgcaaacatatattcgggataaatttcatcggcctttttcatgaccctgtctcggcttacctttgcaagtatcgacgcggctgcaatggacgccgaaatgccgtctcccttgacaattgtttcgcagggcaccgaaagacctttcggcactctgttcccgtccacgagagcaaaatccgcgggaattttcagcccgtttacagcccttgtcattgcgagaaaggtggcgttcaaaatgtttatttcgtcaatttcggcatggtcggcataagcgaccgaataggccgaagcattgctgattattacgtcgaaaagagactctcttttcttttccgaaagctttttggaatcgttaagcccctcaatttcaagaccgacgggcaatatgactgcggcggcaaacaccggtcccgcaagtgggcctctccccgcctcgtcgattccgcagatgcttttaaagccctgttccaaggcctttttttcatattcgtatccgaccatcagacatcctccgggaattcaagggtgatgcgtccgagctttcctccgcggaattcgtcgagcaccattacggaagctctttcggtgtcgatttctccgccggaaatgagcattccgcgttttctgcccaccgcctcgagaatttcatatccctgcatatcggggcaaagcgttatcttatagcgctgctcaaggtttgccgcatggtgcctgttcataagctcaagcaggcgcaccgcaagcagctcggtatcggtaacaacgtccttgacggcgccggtaaaagcgagacgctctcccaccgccttgtcgtcaaatttcggccaaagtacgcctgcggtatccataagctctattcccttgccgatggaaaaccattgatttccccttgtaacgccggggcggtcggcaactttggccttgttgttctttgccatgcggttaatgaaggaggattttcccacattgggaattcccacaaccataagacggagcgttcttcccgtcatgcccttatccttgaatttctgcagccgatcccccataacggcatttaccttatcggtaaatccgccgagaccctttcccgttttacagtcgacgggcagcgcctcggttccgcgctccttaaaaaattcaatccattttttatttgcttccgcatcggcaatatcggccttgttcatgagcacaatgcgcggcttatctttgactatttcatcaaggtcgggatttcggcttgaaatcggaattctcgcgtcgataatctcggcgacgccgtctataagcggcagactctcggccatgagacggcgggttttggccatatggccgggaaaccactgaatggaaacgggttcgctcatgatattacacccgcctcgttcgtcgggaaaaggcggaaaacagcctttccgagaatatatcttgtgtcaatggcgccaacctcggcggttcggctgtccttggaaaccgagcggtgatcccccatgacaaaaacatggccttcgggaactgtgtaggggttttccatgggtatacggcccggaatggtcttatcctttatgtagggctcgtcaagcagctgttcgtcaacataaacgtcgcccgtatcaaaatcaaaacgaatggtctgaccctcggtggcgatgacccttttgattattggctcggccacctgcccgtcaccttctataaggtcggaacgggaaatgaccacaacatcccccgctttcggcttgtaaaaaagattgtatataatgaccttgtcgcccgattggagggtgtcctgcatggaagtgcccttgacccccaccatacggaaaacaaatgtaaaaagcaaaaccacacacagcaccgatattgccaccgagtcgatccactcgacaagctcacgtccctgtttctttttcttaacttccgtcttttccgccataaaaaagaccgtccttttcataaaagtggtcggccgggaaggccgcaaaacgaagaaaacctgcgaaatgcataacggcatcatcgcaggttttttgacaaagcaatcatctccgcataaagccgcagagacaaaacagcgcccttcaaaagacgcaaagaaggcaagcttatcttacctgctctttaacctttgccgccttaccgacgcgatcacgcagatagtagagcttgctgcggcgaacacggccgttgcggacggtctcgaccttggcaacattgggggaatgaaccgggaaaacacgctccacacctacgccgtaggaaacacggcggacggtgaaggtctcggcaattccggagccgttctttgcaatgacggttccctcgaaaatctgaattctctctctgtctccctctttgatgttgacgtgaaccttaacggtgtttccgacaacaacctcgggggcctcggtcttaagctgtccctctgtcagttttttaagtgcgtccatttataaattcctcctgttatttccgagcgttcttaccgttcccgaagaatggcattggaccgttctttttaatgtttgcacactaaatctcgccgcaggacttatcggcggaaaaatgaatgctttgttattttatcacagcgcaccttttttttcaagtggtttttttacctttttaattttttttagtttgacacggaggtctttcccgtatataatggtgaaaaaggaggggtgaaattatgaagataagtgaaaagcttaagctataccgcgttaaaaacaatttcactcagactcagattgccgcagctctcggaatcgaccgttcgacatattcttattacgagctcgggaaaaccgttccgagcgtgggtatgctttccaaaatcgcaaaaattttcaataccgatgtttttgaccttctcgagggagagcaaacggtcgaacacatgaacacaagcggctcctcctattccgccgcgggcgaaaagaatttcagctcggccaccctttcgggagccgaaaaggagcttgtcattttgttcagacagcttgacgaaagcagcaaaaacgagcttataaaaagggccgaaacgctcaaggaaaagcagtatgaaaacatggaataaagggataaaaatgggatataaaatcgaacccgcacagctttcggacgtctttgtatttccgaaagcggtggttgaaaaacatttaaaactcgccggagcatctcaactcaaggttttgctctggcttttttgccgaaacggcagctgcgacgatttgaccgaaatatcaaaagacacggggctctcccccgccgacgtgcgcgacgcaatgcagtattggatagtaaataaaatcgtttgcgacaccgaaaaagcggcggacgaaaccaaaaccgaagaaaccaaggttccctcgaccgtcaaggaaaaggccgtgaaaaagccgattcgcaccgaaagcaaaaaaatttcccgctatgaaatcgccaaaagagccgacgaatcggccgaaatcgcctttcttttgaaggaggcgcagtcaaagctttcaaggaccctttcctccgctgaaatgaccaccctcgtttggctgcacgacacccaggggctttcctgcgaaataataataatgataatcgaatatgcctgcgccgtgggaaaaggaaacataagatacatagagtccaccgcgctatcttggataagcgagggtatcgacaccgtttcggcggccgaaaagcatattgtcgagctcgaaaggagccgccaggaatggagaaaaatcgcctcggccttcggaatcgaccgtcctgttccttcaaagaacgagcagacctatgccaccagatggcttcgtgaatggaaattcagcatgaaaatgataaagcttgcttacgacgcaagcgtcgaccataccggaaaaatgagtcttgcatacatgaacaaggtgctcggctcgtggaatcaaaagggcataaaacggccggaggacatttccgagaaatcatcttcggaaaaaggtaaaaagtcggccgagcccgcaaagtcctatgatatggacgacatcaaaaaacttcttacaacctaaggagacaatttatgaaccgatccgaaaacataaacgacgcggcaaaaaacgacccctggttccgaaggcaaaaagccgagcaaatcgctgccgaccgcagagccgagctttgcaaaaaatcggagaaattcgcacggctcgagcagaaatacaatgagctgtcaaaggctttggtaaaggccgccatttcgggaaatgcggccgagcggacagctctttcgggcgagctgtcgcacaccgcaaaggaggaggaaaaaatccttgaggcctcgggaatcgacaccgattttctaaagccgcaatatcggtgcaaagaatgcggagatcagggagtgctttcaaacgggcaggcctgcgactgcctaaaaaagctcaagtcggatttgcgatatgccggcttttgcaaagagcttcctcttgacgggttttcccttgacaccttttctctcgactactattcgggagaggaaaggacaaaaatgggcgatattttgcttgcctgcagggatttttcgaagaaatttccaaactcgggaaacttgattttcagcggaagaacggggctcggaaaaacacatttgtctctctcgattgtgagggaggttgccgaaaaggggtattcggccatgtataattcggctcagaattttttcaatctcattgaaaacgacagcttcggcaacggaaatctcggcatcagagaggaacttatttcctgtgatttatgcgtgcttgacgatctcggcgccgaattttccaccgaatttacaagatctgctctttataacattataaacagcagaataatcgccaaaagacccacgattataagcacaaaccttgacgcggaaaagctcgagcaaaaatacggtgaacggattttttcgcgggtaattggctgtttcgattggaagaatttttgcggaaaagatataagaatacagaaaaaattcgaaaacagaaaggactaaacccatgcaggtaaaaacaagatttcaaagaattttgagctttatgctttgcgccgccgtgatttttgcggccgctccctttgccttttcggtaaattcaaacgccgacgcggtggcatacagccagtatgacagccgttggggaagctgggtatacggcgaaggtacaattgcgggaacgggctgcggcatactctccaccgtcaatgccttcaactatctcaacgaaatagcggacgtgggcgccgcaattgacgaaattgccacatgggcgcacgacatcaacggatataacggaacatgggacccttcgggcggttcagaccgaaccgtcatttatccgcggcttgaggcaaaattcggcgcaaaatacaacataaccgtccccgcctcgaacgtctgggccaacatctattccaccgggcttcgcaatcatctccgcgaatacggaaacgtcgccatagcccacgtcgcctacggtcattttattgtccttgccgaatatgaccaaacaacaaacaaatttttggtgctcgactcggctccgactgtcagcggaaacaccggaaacggcgttgcgtggcttgctcccgagcagcttaacacttcgggtaaccgccgaatgaatgtggattggtactgtctcatttcttcgacgaaatcggttgaaccgaccgaaaaggacggcgagctgtatcttaccgagggaaattccgtcatgggaacatggggtgaattttccaccgaaaccgctcttaaaaccctcgacggcaaaagcggcataagcctttcaaatcccgagcattgcactggaaacagcgcaaatgtcggctctatggccattctcaaatactccaataacattcttgcaaacaccgaaaaatataacgctctttcggccgaggtctggtgctctgaggattattcctccctttccgaccgggccgatgacattttccaaataaatcttgtgaccgaatcaaagggacaggacggatataacattaacatcccggcaagcagtctgaaaaaaggctggaacacgctgacctttgacaaaagcggcatttccgccgccgtcgaaagttccgactggacggcaatccgacgcatgagatttacatggttcaacaattcctccggctctcccgtggaattcgccgtcggggctgtcaagcttttcaaagctcccgttcttgcgaaggaggaagaagagtcgctgctgatttcaagctgcaacgaccttgcgggcatttcggcggacggatgtgacatttcgctttcaaaatgcggcgaaaaaggcagcttcggcgattatacgataaattggagcaaccgctcctccgacaaaaacgagcaaatactgtctcttgatttggacgaaagctttaacgcccgacgattcaataaattcacctttgtcattaaaagctcggcaaatctcaacaccgtcggacacaagaccgacaccgtcgacatcattctgaccgaaaagggcaaggaaacgggctatcgctataccgtcaagggttattattttaacggaagctttcagacgctgaatttcgaccttgcgagtttcgcccaaaaagacaactcggtcgacctatcgaaaataaattcgataaagcttgtatacaccaacaaaacaggcggagaaaacgttgacttttccataagcaagcttgcgcttaccgacaaaaaggccgccgtttacggtgacgccgacggagacggacaggtaaccgtcaccgacgccctgctcgtacttcaaaaaagtgtgaaaaaaatcgagttttcgcaagatgcagaagccctttgcgatgttaacggcgacggagaaatcaccgttaccgactcgctgctcatattgcaaaaagccgttaaaaaaatcgataaattcgatgtggaataatgaattaaaatatctctcttaaaaagggagatattttttcgtttttcaagaaaactattgaaaaaatgcggtatttcggttatgcttaaaacagtaattcataggagtgtgcatttatgaaactcagaccgcctgcatttccgcttatcacggttgacccctatttttcggtatggtcacacagcgatgagctttacgcatccgacacagttcattggaccgacgatcccaaccccataagaggtaccgtcacggttgacggagaaaccttccgctttatgggacagtcggcagacgccgaaatcaaacaaatttacagcgatctttcggctcttgtgaccgattatgttttcgaaaacgaaaagattgtgcttcacctgagcttctattccacccttttccccgacgacctttaccgcctttcccgtccgatttcttatcttaaaataaactacgaatcaaacgacggcaaagagcacaaggtttcggtcaatatttcggccaccgaggagctttgcataaacaaagcgggcgagacccccgtgcttgcacagtcggtcgaactgggcgacggctcttttgccgaaaaaatcggcagcgtttatcaaaaaatgctcggccgaagcggcgacgtgctcagaatcgaatggggatatttctatctctgcggaccgaacggttcggaatataaaagctttgaagatgacggaaagaccgtcatttcggcaagctttccccttgaagagggcgtttgttccgacctgcttttcgcctatgacgatattaagtgccttaactatttcggtacaaacgtcgacgcttattggaaaaccaaaggactttccatggagcaggctcttgttgaagccaaaaacgaaagcggcgaaatgcttgaaaagtgccgcaaaatttccgaagaactttttgacgacgccgaaaacgcaggcggcgagaaatatgccgagctgcttgagctttcctaccgtcagcttattgcggctcataagcttgccgttgacaccgaaggacagattatattcatctctaaagagtgcctgtcaaacggctgcgccgccaccgtcgacgtcacctatccttcggctcccttctttatgctttacagccccgagcttttaaagggtatgctccgcccgatttttaaatatgccgaatcggacgattggaaatatgattttgcaccccatgacatcggcacctatccccttctcacaggtcaggcatacggcgcatgggaaggaagcaatcccgacgaatttctctcgttccagatgccggtcgaggaatgcggaaacatgctcataatgctggcctgtctctgccttttggagcagaacaccgattttgccgacctttattccgacacgaccgacaagtgggttgaatatcttataaaatacggtaacgatcccgaaaatcagctctgcaccgacgattttgccggtcaccttgcccacaactgcaacctgtctctcaaggccattgtgggtatcgcgggatatgcaaagattcttcagatgagaggcgaggaagagcgcgcctatacccttatgaaaaccgccaaggaaatgtccgacagctttgtgaaaagagcggcaaacgacgacggcagtttccgccttgcatatgaccgtcccgacaccttcagcatgaagtataacatggtttgggataagctgtggggcaccaagcttttcgccccctgtgtttcctatgccgaggtgtgctccaacatgagacatatcaacgcctacggctgccctctcgacaaccgcgccacatacacaaaatcagactggacggtttggacggccacccttgcgcctcacaaggacgagtttgaaaagttcattgcccccatgtgggaggcgttcaacgtttcccaaagccgcgttcccatgaccgactggtatgacaccaccaccgctctcatggtgggcttccgccaccgttctgttcagggaggcctgtttataaagctcttggagggaagattttaaatgaccccttctgtaaagcttgactgcctttactcggataccgaggctgcaaaggagcgctttaaaaggcttaaatcggaatttgaaggtcatttcggcaaatctcccgagctgcttttttcggctcccggccgaaccgaaatcggcggaaatcacacagaccacgaaaacggtctcgtgctttgcggcagcgtcgatctcgacatgacggcatacgtttcgcaaaacggcggaaaaaccgttcggctttattccgagcagtttgagccggtcattatcgaccttggcgacctttcaaaaaagaaatcggaaatcggccgttccgaaagccttgtaaggggcgtggcccattgccttaaggagcgcgggtttgacattttcggtttcgacggcatgatgacgtcaaacattcccgcgggaatggggctttcctcctccgccgcctttgaaattctcatcggcaacatcttcaatgttcttttctgcggcggcgctctttcgcctgttgagcttgcaaaaataggacaatttgccgaaaaagaatattttggcaaaccctgcggccttatggatcagataggctgttcggtgggcggatgcgtttttgtcgactttgaaaatccgaacgagcccaagcttgaaagcttcgctcccgactttgactcggccggaatagtcccctgcattataaaaacccatgcgggacacggcgatctgaccgatgaatatgcggcgatcaccgaggagctttgcgaaatttccgcctacttttcctccgacagactccgcggcgtttccaaagaggatttttacaagtcaatttcggtcttaagaaaaaaattcggcgaccgcgccgttcttcgggcgatgcatatttttgacgaaaacaagcgcgtcaaggaggagttcgacgcaataaagcgcaaggattttgaaagctttttgagtcttgcaaacagctccggactttcatctcaaacccttcttcaaaacgtccattccgaaaagaaccccaaaaatcaggcggcgacattcacaatagcgctgtgcaagagacttctcggccaaagcggtgccgtgcgaatacacggaggcggcttcggcgggacggttcaggcgtttgtgccgcattcggattttgaccttttccgcagcgaaatcgaccgcgttctcggcgagaattcctgcagaaaaatttccgtaagatctgtcggcggctgcaccgtggtgcttttaaagtatcaagcaaatcaacggctataggcatatc

SEQ ID NO: 423 - DNA, 7886 bp, Unknown
  16S sequences of unknown bacteria
agcggctatttatattataattgcgttataaattacaaattatagtaaatttgcaaaagtatgcttttgcaagaaattgttccgttattttaattgttatcagaagggtcataaaatgaaaagtagttttattgagggaaaagttattttttattttctttcttatcaacagttaaaatacggatgaaaggatgaggttttatgaaagcaatgaaaagcaagtggctggcgctgtttttgactgtcattatgacatttactctgttgccaagtgttgtatttgcagcgggtgaagataccggggttgcaaaaattggtgaccaaacatataacagcgttgctgaagcaattacagcagccggttcgaatgctacaaccatcgaattgactcaaaatgtatctgaggatgttaccattcctcaaggcgcaaatattacattgtatattccggaaggtatcactttaaccaacaaagccgggcatacgattaccaataacggcactctcaccgttaccggcgcaggtacagttgataatgtgacccatgcaaaaggagctcttgtaaactatggtactgcaattttagaaggagctacctttacccgtagtgcagaagcaagcacaagtgctacatcttccggcggaaacagctggtatgttattgacaaccatggtactatgactattacaggaactgcgaatgttgtaaacaatggatatttttcttctttaatccgtaatataggtacagcagatgcagcttccagtttaaccgttagcggcaatgcaaccctaagacaggacaactttattgcattaaaaaatgacgaatatggcaatgttgctgttacaggtggtacaattacctccaatgaacaaacaatacaaaactggtcacaggcagctatcagtggaggtactttaaacggacaggtaattacttggtcctatgaaggttttgcaagtgcaaccgaaatttccggaaatgctgttgtaaacggtgatgttgttgcagtaaactatgacggtggaacatccattccttcggtaactattaaaggtggtactataacaggtgaaatttcaaaagctacctacaataatggactgcaaccggcagcacctgatgcagcttcttcctctattgttgtttcgggcggtactttctccaatgccgtagattcaaacttttttgcagataatttctatctaaaccaaaatccggatggctcctattctgtacatgagcataacatggttatgaaatacgatgctgataatcattggtatgaatgttctgtatgcggagaaaaagcagatgtatctgcccatacttttggtgagtggaatgtaacgaaagaagctactgctacagaagcaggcagcagagagaaagtttgttctgtatgcggctatcaagttgtagaggaaatctctgcaacaggtgatgcttcgtccactccaactaaagaagaaatgacaaacggaacaacaactactgatgtgaactctgctaatcctcaaacaggcgacaacagctatgtatttctaggaatcgcattgttgtgtctatccggtgcaggtcttgcaggaacagtcattttcagaaaaaaatatagcaaataatttatctttaacgctctgaggttccaaacctcagagcgttttttattctgtaagttgtatatgaaaacagtactaacaatacgatattcaaaagaaatcaaattataaatcttgaaatttgatttcacttcatctaaaaattcaggaacaaaatttataattacggtgttaatgtaaaaatggctcaaacaggctgtttgttcaaaaaatgaatcaatcataactatggtttgcagttttgtgattcagaagttggatgattaattatatcacttatcaaatcaatgataaaattaggaatttcgatacatatatcccaataagatttattttaaacaatattcttgaccgtagataaggactgtgatagcatgaggatattggaactaaacggtaaaggaagaggtacatgaaggtagcaattttgacttctcaggagagagtggaaaaatttacagattggtcattggtgcctaaagatacagaattgatttatataggacaaacatatacagatgatgaagtcatacagaaagcaaaagatgcagatgctattttagtggatgcagtgaatgttgtaagcggaaatatcatcagaaatttaccaaacttaaagttggttcagtctgaaggggttgcttataatctgattgatacagaggcggcaaaggaacaaggaatatatgtttgcaataatgcttcagccaatgctggctctgttgcagagcataccattatgttaatgcttgcttgtacacgtcggttgatagaaggcgacactttggttcgcagaggcaaacagatacaagccaaaggctcatttattttagctggtattcctgaactggaacattgtcatgtagggttattgggatttggcgccattgcaaagcaaacagcaaagagattgaaagggtttggctgccgcgtcagttattacagtcgtcatcaagtatcggaagaaatagaacaagaatatcaagtttcctatttgcctttacaggaactttaccgttcttgtgatattctcagtattcatgttcctgtaacagcagaaactaaaaatatggtggataaacgtgtgtttgaatgtatgaaatctacttccattgtaattaatactgctcgtggagaaattgtgaatcaacaagatttatacaatgcaattgtcagcagacaaattgcaggagcaggtatggataccttatgtcctgaacctgtcccgtttgaccatcctttattgcaattaccggagcatttacagtataaagtaaccttgtctcctcacattggcggaacaacatatggcgtttttcagcatatgtatcgtaccatttggtctaacatttcagctgtatgtcacgggcaaacaccaaaccatattgttgtttaactttttatctaaataacagataaaacataggagatatcaatgtactactattatgaacatacgcagcactgcgccccttttcatgttataaatgagtttgtccatacaattcctgctgtcattagcattccacatagcggaacatatttaacgcagcaaatgaagcaaaatttaaaaccggatatagtacttcccaacacagattggtatttaccggttttatattcttttttgcagcagttaggatatactgtgattgtaaaccataccagtagatatgtggcggatgtaaacagaagtttggaagatgccaaaggaacatcttataaaaccaatgtgtgttatacacataccactcaagggtatgctatgtatcaagcggaacccgatgtatgtgaattgaaacacagaatcgcttattattatcagccttatcacaatggaattcaaaagttaatttcagagaaactaaattattataatcaaatctattttattgatttacatagttttggattagattacggcgctgatatgattctgggaaatgattttgggaaaacatgttcagcctcattgatgtcttttatagaacataaattgatggagcgggggtattctgtgaaacaaaataatccattttcaggcggatacctcacaaaatactatggtacacaaataaaaagttgccaatccatacaaatagagctttggtatcaaacatatatcaatcatagagtatttggaaatgaagaatttccaaaagtaaattccgtattatttcaaaaaaataaggacaagttgaaagaaatctttattcttttaaaagattttttattacattgaatcatgcagaacacaaataagggctttgcgcatttgcgcaaagcccttatttgtgtgatagaaaaatgaaacgataaattttcctcacagaatcaccttacggcaataatatagtaacaggagaaattccattttaagaaaaaggagctttacaatggagaaaaagaatattcccctcaatgagttaaaagtggggcaacgtggtaccgttagccaattgttgtccgatacaagtatgagaagacgattacaagatattggtttgattgaaggtacaaaagtagaatgtatacaaaaaagtccttcaggtgacccaattgcgtttttaattcgaggtgcagttatcgctttaagaacagaagattcatcttctgtattgatgagcttatcataaatgtaataaatgaggtgagaaacatgggttggaagaggaggagaaagtcaaaacgtaaacaatcggcagaacaagatattgataaagaaagtgggaaaattgttgcattggcaggcaaccccaatgtaggaaagagtacagtatttaatgctttaacaggattaaatcagcatacaggaaactggacgggaaaaacggtagacagtgcgtacggcatctgtaattatcatgatgaaaattacattatggtagatttgccaggtacgtactccttaatggctcattcggcagaagaagaggttgctagaaattttatttgttttaagcatcctgatgcgaccattgttgtatgtgatgccacgtgtttggaacgtaatttaaatcttgtattacaaacaattgaattgacaaagcgcgttgtagtttgtgtgaatctattagatgaagcaaagaaaaaacaaatttgtgtggatttggataaactttcaaaagaacttggtgtacctgtaataggaacaactgccagaagtaaaaaaggccttgatgatttacttgccacagtggaagcattggcacgagatcccgaacccaatgccttaaaaataaaatatattcctcccattgaagaggctatctctatggtagagcctcacttagcagaaaaattaggagaagaatggaattgcagatggattgccatacgtctgttggaaggcaatacttctatgatagatgatttaaaccgttatataggatatgatgttcagcaagataatgtgcttgccgatgcattggcggaagcaaagaactatttgaatcgttgtgacatcacggaagataacataaaagataaaattgttgcctgccttgttattacagcggaaggtatttgtgccaatgttgtgtcttataataaagcaaattgtcatagcagagaccgtaaaatagataaatatctgaccaatcgtttcacaggtattcctatcatgattgcgctgctagcgcttattttttggattaccatatcaggagcaaactatccgtctcaaatgttatcggaaggtctgttttgggtgcaggaccggctgacagatttctttatgtggatgcatgcacctgaatggcttcacggagctttggtgttgggagtttatcgcgtattggcttgggttgtatccgttatgctgccgcccatggcaattttctttcctttgtttacgttactggaggatttcgggtatcttcccagggtggcgtttaatttagaccactattttaaaaaggccaatacttgcggaaagcaagcgcttactatgtgtatgggatttggctgcaatgcggcaggtgtggtaggttgcagaatcatagattctccaagagaacgtatgattgcaatgctcaccaataattttgttccttgcaacggacgttttcccactatgatttccattatctccatgttttttgttggaagcattgcaacaggatttacaggttctttgctgtcaacgcttatgttgacaggggtcattatattaggtgtcatgctcacatttgctatgagtaaattgttatccaaaacggtattaaaaggtgtaccttcttcctttacattggaattacctccatacagaaggccacagattggaaaagtaattgtaaggtctttgttggatagaaccatttttgttttgggaagagcagtgatagtcgctgctcctgcaggattcattatttggattttagcaaatgtcacagcaggagatgccacattattgtcacactgtgctgcttttttagacccatttggaaaattatttggcttggatggaaccattttatttgcttttattttgggatttccggcgaacgaaattgtcgtaccgattatgattatgacttatatggcaacagggacattaaccgaaatagacgatttaatggcactgaaagaattattggtggcaaataactggacgtgggtaacggcattgtgtgtcattgtattttctttggtacattggccttgttccacgacctgtctttctattaaaaaagaaacaaaaagttggaaatggactgcaataggatttttgcttccaaccgtaaccggctttgggttatgttttgttattgcaacatttgcaagaatatttggatggcttgtataagaaaagacctgcatgaaagcaggttttttcttatattttttgaaactaaagaaccacttttatcttcacccatacgattgtgattcatccgaaaaatcaaattatcatttgtaatatagaccgtaactataaaaaagcagactgttctttttcagaacaagcctgcttttttatagttatactgaggtaccgacaattgaaaaataaataataacggcaatacccagtaagatacgataaacaccaaatattttaaagtcgtgctttttgatgtatttcattaagaatttaattgccaaaacagatacaagaaaagcggtcaatacacctgcaattaaaatcgcaatttccaatcctgtataggaaaaaccgaattttactaactttagagcacttgcgcccagcattaccggtattgctaaaaagaaggtaaattcagctgcaacaaagcgagaagcccccaacagcaaagcagtaataatagtaacaccggaacgtgaagtaccaggaatgagtgccaatagttggaatacaccaattaaaaatgccattgtataaggcaattgagacaattctctgatttttggtttgcgtttacggttaaatatttctacgataataaatagtacgccatatacaatcaatgtgatggcaatggtccaagcattgaagaatagttcgttaattttatcatcaaaaatcaatccgatgactgctgccggcaggcaagcaataattacttttaaccataacgaccatgtctgttttcgttctacaagtgttttctttcgtgaaaacggattcagtttgtggaagtaaagtaccagaacagccaatattgcccccagttgaatcacaaccatgaacatatctaaaaattcttttgatacatccaatttgataaattcatccaccagaatcatgtgtccggtactgctgattggaagccattccgtaatgccttccacaatacctaaaaagattgcctttaggatttcgataaagaacatgctgaaattctcctttaaccaatcaaatcaccatatgtaacagtttatatcactattatccgcttgtagtagtataacatataacaatgcaaaaaagtatgaagttatgaaaagtttataaattttgtattaatgtggtgaagtcccaaactgttgtctattatctttggaaaaaatgccataatttttatagttggtttaacattaatttaacgtttgttgtgtaatttattatttttatcaatcatatgaacagcgttccataataagaaaaagatttttacggttccatacagcatgaaacatgtgttagagattcaaaaaagacctgaaaaatacaggtcttttttatgttttttattacagatacttatctttttgctacaaaaggtagactttaagtagactttttatttcgagcatgataaaataacaaaaggcttaaa

SEQ ID NO: 424 - DNA, 22730 bp, Unknown
  16S sequences of unknown bacteria
tgggtagtgtttgatttatgtatacgtaatgatgaaaatcctgaagaaattggtcttaccagaattataatcgcatctaatcaggtcaaagaaaaagaggattttagttggttatattatcgtgatccaccaggattttacactatccagtaaaataaatgctgcttgaatatatattgttaacgattttaataatggccagaaaaaatatatatggagaaagactggtatgcatcctaaacggtaaacttgctacaattaaatacatgtaattcgtatcaacaaagtcgcacctttttacagggtgcggcttttttcatccccaacattatgcaacagccaacggacttactaaaagtattgacaaggatatttgtcaatgctatagtgataatgacaagaaaagttgtcaaaggagcaatgaatatgccattattaaatcagttaaaagaacatcgttccaggatgggaatcaatcagacagaacttggaaagcttgcaggggtatcgagacagaccatcagtctgattgagagaggagattattcaccgtcagtggcactggcattgaagctggcgaaggtctgcggggttcaggtagaagacatatttcagtatgaggaggatgagtcatgaaacaggagaaaaaggagaaaaaggtcaacagttatcttagaggtattaaagtgattgctctagcctgtgtaattggcggcgtgattggtggagtgaccggggcgattcgctttgtgttactgtcacgaggagttgccgtgagcggagactgggtattacagtggatccgaagtttgctggttccaatcctgggtattatttttgcagtgaccgtgatattggaggaactctgtttccataaactgaaaggaatctgtgaaaaacaggtaacagcagaggatgcggaatgtgatcagctggaatatgaggaagaaagaacaggagcatttggtacaaatctgaatgtactgtcgcaggtcgtaagcattttcttcctgacgttcggatattccatgaaatatattgaggcagatgatcatgcctactcatttcttgtcgcatgtgtcatatttgttgtttcttatatttatatttatttttggcagatccggtatgtcaagctgctccagaaaacacacccggagaagaaaggggatccttcttctacaaaattccaggaacagtggctggaaagctgcgatgaggcagaaaaagaggtgatctaccagagtgcttataaggcatatgtgacaattaaccgaacaatcccgttgattctgatcgttgtgatggttgcaaatctctattttgacaccggaatgatggcagtggtggttctggcgttagtgtggatgctggcacagtttacttacaccggtaactgcgtgaagatgaagaagaacagtttattgtttcagaaaaatagggtgtaatgaaaaagcaggacaggagggcgtgcagggaatatttgcatcagtcctccacgatgtctcggttaaactgtagaatcattacatgttaccggtaacttacacactttattcatctgatttctactttgaatcccagttcattacatattctttttcgccagtgaattcatctatctggtcacattgaatagtaaacccttctctttggtagaaagatattgccctgacattcttctgatatacgtttaactgtaatctgacttttttatccttcatataatccagcaaaattttacctatgccatgtgactgcatttcatcagaaacaaaaataccttctatgtattcatcgtttattcctataaatccttgaattattttatcatcttcatacacataaacttctgcctgcggcaacatttctttcacaacttcataattatttgtccagtattgttcggggataaaataatgtgttttcagattggtttttaaccatatgtcagcgactctatttatatctactttttgcaattttctaatcattccaagttattctccattatattgctatactcacaaatcccgattgattaatacccccaattgattatatcccaactctttttatctgccgttttcactaaatgccattgccagttggtatatgtatcattaggattgaatccatcatctccacctttttcgtctgtatcaaaggttgataatactacaataagttcttggttattctctttgtgatatttctcaatttcttctgcaaatctgttttcaacatcctcgtcatagcgaagttcagtaagtgtgcaaccttcgaaatcttttgcaaattttttctctatgacatcaaatgcttcattgatggaattttcatcatagagtgcagagtaaccaacaacacgattaacatttgagatatttcctctgtttccagtcaatacaaggactgctgccacacctaaaattacgcatacagcacatatcgcaatgatgtttttcttcttcatacaatcacactcctttttcaaattccgatttctaaattaagtatactcgatagatatcacttgagtaaagagtaaaaaatatatcggttcttttctggtaaaaagttctgccagcaagttactgcttctgaatttcgaattcatctaccacttcccagctttcagcttcataggtcttcactttcaggctgttgtcggtgatctggatatcggtcacctgcggctttttcagttttttggccacagctgcttcgttttgcgcagtggggttatggaaaagacttccgctggaggaactcaaggtcagatacatggttccttccgggtttacggccgggctttcatattccttataacttccatccgcctggataaagttgctgcgcatataactgtggtcatgaccgcacattacaaggtcgatgtcatatttagaagtaaagcttaaatagtaggggcggattctcttcgcattttccagataatcctgataggaattgtaaggtgagtagtgggaacagacaattctccatttcacatctggattggcagcacaggtatcagcgataaactgctcatgttctccccattttgtttcatcgatcacatccaggatcataaagagagtattgccgcggacaaaccagtaatccccatcaccgtcatcatcacaggttccaagggtggatagattaggcagtgtaaaatgctcagagtactgatgtccaccctgctcatgattgcccttgactggagccagttccatactgtagagcacgccctgatcgaggagtgctgcatatgcttcctgagcatcataattgttgacctggtcaccaagggagaccagcagactggaatctgggaaatgatatttgatcttgttcagtaccttatgccagatatttttctgagaatccagctggtctaatggcttgccaagctgtggatcaccaatggcggtgaatcgtaatgtgtcagaatcttccggtgcatgaaaggtataggaaggagagaggttgtccccttctcctactcgatacagataatccgttccgggagtcagatccgtgactttggcgcggttgatatagtagccatccacttcctcagaggcagaagaggaagcatcaaagacggatgcatttgcaaagtccgtatcgtcagcagaggtccagaagacctggccggctgtctcggaaggggagaaccaggtcagattggcttctgagaccagagatcccgctgtgactgacagatagcggatggaactgctggtgatcagggtacttttatagtctggagcagtggcccaggtttcatagccttccagtgggtttccgttttcatccacagaaatatcagtaaccaccggtgtttcaaccagttcatcatttccacaggcggtaacgatgaacatcagcatcagaataccggctgccagaattctttttttcatagatttgaaagctccttatatttttgattcttatttatatacgatagtattcctacattaacaccaacgctgtaaaaagtaaaggttcttcccgcggcaaaaaataaacatttccgggaagattgtatcttggcaaatatttgtatttatggctataataaagagaaactgccttgcttgttgcgtatccttcttaaaactgctataatagataaaatcagtgtcggaattttctgacgaaatctattaagtggatacagacaggagagacagagtgacaaaaaaactggtactgttgttcagtgtagtattgttcattggctccctcttttttttcgcatatccggaaaagaaggaggaacagccggcagagacattgactgcaggtgccctggcgggacaggtgaaagaagcttccagactgcataagcggctggcgaagacgctggaagcggaccaggtgaagctgtgctttgaaggagaagaactggcctgcgaccgggaacagatgatattttatcttccggtagacatggatctggaagaatgggaagcaggtacattttctaatgtggatgacagtatcgagatccttcctatgaaagactatacactgcttgacaagcaggagactgtagcacagggattgcagattccatttctggcatggaaccgggagggtggaacctgcaggaaagtgtatgtggtatttacaggtcttcctgtagtgaagatggagacgacagcggatcttgatatcgatacagtatttgcaggggcagtgtctttttatgaagcctgtggacaggaagactgggtattgacgtccgtctttgaagcccatgagagaggacagactacccgggcttatccgaagaaaggatatcgggttaatctggtggatgtgacttccacaggcatcagtcgtaaaaacaagcagtcagtgcttggcatgcgaaagtcggattcctggatcttttatgcaatctacagtgacggcacgaaagtccgggataaatttaatacagaactctgggccgggatcggcgcggaggacacaccctatgatgcttattttggcacaaagatgaaatatgtggagctggtggtcaatggagagtaccgggggctctatggcatctttgaaccggtggacaagacgcagctggcgatcacggatgaggaatatctatataagcgaacctacggacgggcactttcccaggagttgtttgattccgccggaccagatgattatctgacagttctcggtatggagatcaaaggaaaaaagggaaatggaacatcgctggactggaagcaattgcggcagtttatagccataacagaagaggaagatgaagagtttgcacaggatgcacagcagctgctggatcttgataatgtggcagacatctggatctatctgcagttcctttatggagaggataatatttataaaaatatgttctttgcttttaaaaaggacaccgatgggtatcagggatacaagctgtatctggtgccgtgggatacggatctgacctggggaaatgtctacgtggacagtaaggaagagctgtatgtgaaatgggcgccggaaaatgcagatcgatatctggagtggccgcttttggatcgtctgattgaacttgatgtgggtggaatccgggaaaggatcaaagatcgttggacagaattaagaagtggaattctgtcagaagaatccatgcatgagattcttacagaatgtatccatcaggtacaggattccggtgcatttacgagggatgcggcaagatggccggacagccgtcacgatgccgattatgatggaatgaagcagtttatgaaggaaagaactgagtttctggataaaatgatacaacaatgaaacaataaaagaagagaattggagttgacaagatggagtcaaaagtatttgatccctcccttatggaaaaccggttccggcatgaatttaaatatttaagtacgctgggacaactaaagaccatacaggtgcgtctgacaggcctgatccctttggatccccatgtgggaccggatggtatctacaatatccgaagcctgtattttgatgactatgaggatcgctatctgaaggaaaatgaagccggtgtggatccaagagaaaagtttcgtatccggatctacaatcacagcgacagtcggatctcgctggaactgaagcgaaaggttcgggagaagacacagaagttgtcctgcccgatcacaaaagagcagtgtgagatgctgatgcgcggggagattcctgacattggtaaggatgcgccgccggtactccagaagctctgtcttctgatgaggacaagacttctgcgaccgaaagtcatcgttgaatatgacagagtgccttatatttacccacagggtaatgtgcggatcacgctggatgagaatatccgatcatcgtcaagggtcgagctgtttctggaagatcagattccgaccagaccgatcctgccggcgggacagcatattctggaagtaaagtatgatgaatatctgccggatttcatctacagagccgtgcagcttcagggacttcacagaaccgcattctcaaaatattatttatgcagacgttatcatttgtaaagaaaaaggagattacataagatgggatttaaagacgtatttaagaaatcatttttagaaggatttaccagcatggacattaccactggtaagattgctgcaaccttgatcgtaaccgcacttcttgcattatacatttttgcaatctatcgtctggttacaagaaaagtgttctattccaagaattttaacatttctttggcagtcatgtcgctgattacagcagcaatcattctggcaatgcagtctaatctggtgatttcccttggtatggtaggtgccctgtccatcgttcgtttccgtacagcaatcaaggatcctatggatctggcgttcctgttctggtctatcagtattggaatcatctgtggtgcaggtctgtatgagatcgcattggttacttctgtaggagttaccgtattcattctggtgctggatatgcttccggtaggaaaagcaccgatgatgcttgtagtaaacagctctgagatgaatggcgaaaaagcggttctggatgtggtaggaaaatatgcccgttattacaaagtaaaatccagaaacctgtccaaaggacgtctggatctggtgatcgagcttaaagtaaaagaagaaagtgcccttgtatctgaagtggcagcactggatggtatgctcagtgcatctatgatctcccacgatggggaagtgacattctgatatgggaaatgatcgactggcagcacacgcaggcctggctcagcgtggttatcaatatgtaaaagcatatggaatgggtaagctgtaccgaaaagccagagagcattttggaagaaatgcactggagcggggatatcaggaatggatgatcctcaatcgtccctctgaaagcgagaaggaactgcagagagaacatcattttgtccaggaaccactgatcagtattgtagtgccaatttatcgtacaccggaagtatttctccgggaaatgatcgaatcggtactgaaccagacttatggaaagctggaactttgtctggcagatggaagtggagaggatgatacggcagggacggtgatctgcgagtatgtggagaaggatccgagagtccgttatcagaagcttggcagcaatcttgggattgcaggcaataccaatgcagcagtgaacatggcagaaggggagtatgtggcacttcttgatcatgatgatctgctggaagagcacgcattgtttgaaattgtcaaatggcttcagaaccatccggagactgatatggtctacaccgatgaggataaggtaacctttgattcaaagacatattttaaacctcatttcaaaccggatttcaacagggagctgttaagaagcaataattatatctgtcatttgctgacagtgaagaaagatcttctgatggaggccggattatataaggaagagttcgatggtgcacaggattatgatctgatcctgcgttgcagtgaaaaggcgaaacaaatcggacacattccgcaggtactctatcactggagaagtcatacagcatcgaccgcagctaatcctggaagcaaatcatatgcttatgaagctggtcgaaaagctgtggaagcgcatctgaaacgaatgggcgaggatgcagtcgtagaacccatggacaatccgggattttaccgggtgaattatcgggtacagggtaatgcaaaagtcagcattgtgctgatgaatgtaacatccttgaaggatcttcgccggatcgtacgggcggtcagccgccatcgctcttatggaaactttgagattctggtactctggaatggtccggagaaaaataaaggaattctgaattttataaaagaacatagacaaatacccataaaagtagtatattgtactagtacgcgtaataattttgtaacattttccagattggctgagaagatggacagcgattatctgttgtttctggacggacagatagagaaggtttccagaggctttttggaaacatttctgggaaatgcacagcggccttatgtgggagctgtgggtggccgggtctatgataacagcggcagactggtggccggggctaagatcctggatctgaatggccttgcaggagacgcttttgaaggattaaggttcggatacacaggatattttcataaagcggttttgcagcaaaacttccatgcagtatctggaaaagcaatgatggtcagaagaacatcctttcttcaggccggaggattttcagaggaagtagaagaccgatataaggatgtggatctgtgtctaaaactggaacagcttggattaaacaatgtctatgatccaggtgtgatcctgctctgccagggcagaaccctacagaagaaaaaagcgcagcggacagcaacggttttccgtaaaaagtggaaagcgctgctggaacaaccggatggatattataacgcgaatctgtcgcttgaaagcagcgattatcgaatccgggaatatccttagggagaagtttacgcatgtcagacgtaacgattgtgattccgaattataacgggattgcatttctgaaaacctgtctggactctgtacttgcacagacaggggttcagatggatgtgatcattatagataatggttccgtggatggaagtcaggagtttatctcttccaactatccacaatgtgaactggtctgcctggatcagaactacgggttctgtcgggcagtcaacgaaggtatcaacagggcaaaaagcccgtatgtcatattgttgaacaatgatacagaagtccggcctttgttcgctgccagtctggtagcatctatgaaggaggacaagagccgattttcctgcagtgcacgcatgttgatgtacacgaagagagatcttctggatgatgcaggtgatttttactgtgcatttggctggggaattgccagaggaaaagggcgtcccaaacaagaatatgggaccgctgaccagattttctccgcttgcggaggagcagccatctatcagactgagatggtgcgtttgatcggtggttttgatgaagcccattttgcctatctggaagatatggatctgtgctggagagcaaggatccatggatggaagagctggtacgaaccggatgcagaggtgtttcatgtaggaagtgccaccagcggttccagatataatcggtttaaggtgcttcattcagcaggaaataacctgtatatgatctacaagaatatgccgctggcacagatgcttttgaatctgccgtttttgctggtgggatttctgataaaatatctgttttttgtgaaaaagggacttggaaaagattaccgggaggggcttgcaagaggttttgagctgtgcaggaagtacaaggaccggaaagttcgttttctatggaagaatttgcccgcttatgtggcaattcaagttgaactttggaaaaatatacttctttttctgccgggcagaaggggaaaatgaggggaaaaggatgaggactcttgattaaagacaatcaacggtatttcaaccgtcttcatgttgtgattgatgcagtggtgatctgtatcgcatatgtattggcctggatctacaagtttctgatcctgaaggatcaaaggggactgacactggcacagtattgtgtggcacttattggtattataccgctgtacctgatgctgtatctggcatgcaatctctacacatccaaaagagtgcagggaagaaggctggaaggcggcaacattgtaaaagccaataccatcggcattttgatcgtcatggcagcatttttcccgctgcgagatgtaatcgagccgattaaatattattcccgctggatgctggcatatttttatgtgattaacattgtgctggagattattgcgagaaatctgatccgctggtgtctgagaaagatccggcgcaaaggattcaaccttcgtcatctgatctttgtaggatacagtggagctgcagaagcatttattgatcggattcttgcaaatcctcaatgggggtataaaatcagtggaatcctggatgataataaagagccgggatatacctataaaggcattgcagtgcttggatccacggatgagctggaaaaaatcctggaaaataatcgtctggatgagattgcactgacgctggcacttcgggaatattataaactgaagcggatcgtagcgatctgcgagaaatccggtgtgcatacaaagtttgtaccggactataatgatattataccgacaagaccttatacagaagacctcttaggtctgccggtagtcaatattcgtcatgtaccgctgaccaacagctttaatatgatctgcaagcgggctatggatattgttggggcaatcgttgccattattattttttcaccggttatgctggttacggctgttttggtaaagacaacatccaaagggccgttgatatacaaacaggagcgagttggactccataaccagacttttcagatgtataagttccgctctatggaagtacagtctgcaaagagcgaaaagcgtgcatggactgtcagagatgatccccgcgtgacaaaggtgggaagggtcatccgcaagacaagcattgatgagcttccgcagctgttcaatattctcaaaggtgatatgagccttgtgggaccaagaccggagcgccccttcttcgtggaaaaattccgggaagagattcctcgctacatggtaaaacatcaggttcggccgggcctgactggatgggcgcaggtaaatgggtaccgaggggatacatcaattaaaaaacgtattgaatacgacctgtattacattgaaaactggaccatggggctggatatcaagatcctgttcctgaccttctttaagggctttgtaaataagaatgcttattaacaggcgtagaaaggatgacttatggcaaaagaaacgatgaaaaaaccgacctccagaaaaagtgctgcacatcacagttctgcttccggaacaccttctaccagaagaaaaggcggtaaaaagagaagtacaaagaagaaaaagaaaagaggaatgatcattgcagttgaggttcttctgattcttgtggtgttgattggattctatgttgtaagcaaattggatcagcttcagcatccggatatgggtgagggagacaccgctgtgaatgagggcatcgaagaagataccgtagcaaccatgtcaggttatacgacggtcgcactgtttggtctggatacccgtgagtccggtcagcttggtaaaggaaaccgaagcgatacgattattattgcaagtatcaataatgatactggagaagttcgtctggcatctgtattccgtgatacttatctggatatgaccactggaaagttcaataaagcgaactccgcatattctacaggtggtccggagcaggcaatcaagatgctgaataagaatctggatctgaccattgaaaaatacatcagtgtggactttgcagcaatgacagatgcagttgacctgctgggtggcatagatattgatgttgatgagacagagatcgatcatctgaataactatatggtagagacttctaaggtaacgggtgtagcgtctaaaccgctgacacatacaggtcttcagactctggacggtgtacaggcgacttcctactgccgtattcgttacacagcaggagatgatttcaagcgtaccgagcgtcagagagaagtgatccaggagcttgtccgtaaggcaaagaccatggagatcagtaagatcaacgatatcatcaatgctgtgttcccgaagattgcgaccaactattccaacaaagagcttctggagatggctccgcagatgatcggatatgatattgcagatacagctggattcccgtttgacagagagacaggtacgatcagtggaagaggttcctgcgttattcctgtgaatctggcagagaatgtacgtcagcttcatgagttcctctatgagaattatgattatacaccttccagcgaggtgcagaagatctctgagcagatcactgcagatactggatattaaggattagacagactacaaagcgagggagtgttatcttacctcgctttctctgtataaaactatttttaagtggagtaagtatggaagtagatgtactgattccggtgtatcgaccggatgggaagcttacagagctcctgaaacgattaaaaatgcagaattatccgatccatcgtgtcattcttatgaatacggaagagaaacattttccaacagaactgactggtatctgggatcgggttgaagtatatcatctggcaaaagaagaatttgatcatggcgggaccagagaccggggagtccgcatgtcgacagcagatctggtgctctgcatgacacaggatgccatgccggcggatgagacattaatagaagaactggtgaagccttttgatgatccggaagtctgggcagcctatgcaagacagcttccgaacgaggattgcagagaggtggaaaaatacaccagaagctttaactatccggagcagagcatggtgaagacaaaagaagatctggacagacttgggatcaagacatttttctgctctaatgtgtgcgcagcctggcgaagggaaaaatatctggagcttggtggctttgtgaaacacacgatctttaatgaggatatgatcctggctgggacaatgatcaaacaaggtggaaagattgcgtattgcgcgaaagcaaaggtgattcattcccataactactctgcatttcaacaatttcaccggaattttgatctggcagtgtctcagactatgtatccggaggtgtttggaggcattcgttcggagtccgaaggaatcaaactggtgaaaaaaagtctttcttattgtataaagatagggaaaccgtggctgatgatccaggtggtgacccagagtgcaggaaagctgttgggatataaaatgggacagcgatacagaagtctgcctatgtggctgatcttaagatgcacgatgagtccatcattctggcgagggggaaaagcatgaacaaagcagtaaaatgtctggttgttgtgggctgtgcagtgatgctgtgcggatgtggcaacagcgaaaacagaatagaacagcagcaatcccttcgcacacagggaattgcgcaggcgcagagtggagattatgatagtgcagttcagtcttttgatcaggcgctgaagctttctgatatgcaagtaggcagtctggaactggatattgcggcttataaagcagcagcagagtaccatcaggggaatctggatcaggcgattgatacctgcagtgcgattctggatgtgaagaaatctgcagagatttatctgacccgtggactgctctatcgggacgctgagaatcaggaggcagctaatgcagattttactgaggcattgaatcggacttctaaaaaggatctgatcatgaagggacgcctctattattatatgaaggattacaccaatgcgaagagctgcctggaggaggcggtgaaaaatggtgatcaggaaggcgtatactggcaggcagagctttactgggacagcggcaatcaggattatgcggtgagtctgtatcagaactatttaagtggcgagtctccatcgcatcaggatgcgtatgaacgtgtggcatcctatcagatctctcaggaaaattacgatgatgcgctggcaactctggagcagggaattgccatgggagatcagggcagtcttcgcagtcttctgtccagtgagatagctgtctatgagcgaaaatctgattttcctacggcaaaagcaaagatggaaagctatctggaaagttatcccgatgatgcagatgcagccagagagtatgagtttttgaaaagcagataaaatattttatatggaatggaaccgtcggctcagagatgaaccggcggtttttatgtacttgaaattgttcacaaaaactccacaaaaaaattttaaatatgcttgacaaaagatatgggtagtgatatcttaagttacaggaaatgttagcactccaattaaacgagtgctaacaagcagagaaaggagttgagaccatggaactggatgagagaaagaaaaaaatcttacatgcgatcattcagaactacatggagactggagaaccggtaggatcaagaaccatatcgaagtattcggatctgaagctttcctctgctactatccgcaatgagatgtcggatctggaggagatgggttatatcattcaaccccatacttccgcaggaagaattccttctgataaaggataccggctgtatgtggataacctgatgcaggaaaagaatcaggaagttgcagatctcaaggaactgatgttccagcggacagaccggctggaaaaggtgctgaagcaggtggtcaaagtactggcaaacaataccaattacgcgaccatgatctccacaccacagtatcatcagaataaactgaaatttattcagttgtccaaagtagatgatcatcagatcctggcagtgatcgttgcagagggaaatgtgatcagaaacaaactgatccccatctgtgaagaactcaatgatgagacgatcctgaagctgaatatcctgctgaatactatgttgaatggaaaaaccatcgaggagatcaatcttcagatgatttccagtatgaaagagcaggcgggcatccatagtaatatcatcggagatgtggtggatgcagtggccgaggcaatccattctgatgaaggaatggagatctacaccggaggagccaccaatattttccgttatccggaattgagcgagaacggaaaagcaagtgagattattcagactctggaagaaaaacagaatctggtggatctggtcaatgagacactcagcaatgaggaaaaaggcattcaggtgtatataggaagtgaatcaccagtacagagcatgaagaactgcagtgtggtaactgccacatatgaactggggaatggacttcagggaacggtaggtatcatcggtcccaaacgaatggattatgagaacgttatgggaacgctgaagactcttatggatcagctggacaatgtttttcataaatagaaaggcggaacaactgtggaagaaagcaagacaatggaacaggaaccggtaactcaggaggaagaaatcgtggtagagaataccaaggcagaagatgtttctgagacggcagatcaggaagaagcacaggcagaacctgagacagcagaagaggatgccggaactgataaaaaaggtttcttcggtaagaagaaggagaaaaaagataaaaaggatgagcagatcgcagagttgactgacaaactgaagcgtcagctggcagagttcgagaacttccggaaccgtactgacaaagagaaatctcagatgtatgcagtcggggcaaaggatgtgatcgaaaagatccttccggtgatcgataatttcgagagaggtttgaagagtattccggaagatcagaaaggtggtccggtggcaagcggcatggagatgatctacaagcagctgatcaccgtactttcagatctgggtgtgacccccatcgaagcggtgggccaggaatttgatccgaatcttcataatgcagtgatgcatgcagaagatgaggggctgggcgagaacattgtcgcagaagaattccagaaaggttataaatataaagataccgtgcttcggcacagtatggtaaaagttgcaaactaacgtgtaagcaatgaacagtgtgtgacgaaatgaaacgaagtggaaatgagctgacgcactgtgtactacaatatggattagaacaatttcaggaggaaaaagaaatgagcaagattattggtattgacttaggaacaacgaactcttgtgtagcagttatggaaggtggaaaacccaccgttgttgcaaatacagaaggagcaagaaccacaccgtctatcgtggcattcacaaagaccggtgagcgtctggttggtgagccggcaaaacgtcaggcagttaccaacgctgagaagactatttcctctattaagagacatatgggaactgattacagagtaaacattgacggaaagaactattctccgcaggagatctccgcaatgatccttcagaaactgaaagcagatgctgagaactatctgggcgagaaagtaaccgaagcagttatcactgtaccggcatacttcaacgatgcacagagacaggcaaccaaggatgctggtaagatcgcaggtctggatgtaaaacgtatcatcaacgagccgactgcagcagcacttgcatatggtcttgataatgagaaagaacagaagatcatggtatatgaccttggtggtggtacatttgatgtatctatcatcgagatcggtgatggtgttatcgaagttctggcaaccgctggtgacaaccatctgggcggcgatgacttcgaccagaaagtaactgactggatgatctccgagttcaagaaacagaacggtgtagatcttggaaatgacaagatggcactgcagagactgaaagaggcagctgagaaagctaagaaagagctttccgcttccactacaaccaatatcaaccttccgttcatcagcatgaatgcagatggtccgcttcactttgatatgaacctgaccagagcaaaattcgatgaactgacccacgatctggtagagcgtactgctaacccggtacaggcagcacttcgtgatgcaggtatcagcccgtctgagcttggcaaagttctgctggtaggtggttctacacgtatcccggcagtacaggataaagtaaaacagctgaccggacatgagccgagcaaaactctgaacccggatgagtgtgtagcaatcggtgcttccattcagggtggtaagctggcaggagatgctggtgcaggtgatatccttcttctggatgttactccgctgtctctgtccatcgagaccatgggaggtatcgcaacccgtctgatcgagagaaatacaaccatcccgaccaagaagagccagatcttctctactgcagcagataaccagaccgctgttgatatcaacgttgtacagggtgagagacagtttgcaagagataataaatcccttggacagttccgtctggatggaatcccgccagcaagacgtggagttccgcagatcgaggttacctttgatattgatgccaatggtatcgtaaatgtatccgctaaggatcttggaaccggaaaagagcagcacatcaccatcactgctggatccaatatgtctgattctgatatcgagaaagcagtcaaagaagctgcagagttcgaggcacaggataagaaacggaaagaagcaattgatgcaagaaatgatgcagatgctatggtattccagactgagaaggctatggaagaggctggagataagattgacgctactgagaaagcagctgtacaggagaagattgatgctctgaaagcagttgttgacagaaccgctaaccagagtgatatctctgatgcagatatcgatgcgctgaaatccggcaaagaagatctgatgaatgcagcacagaagctgttccagaagatgtatgagcagactcagggtcaggcaggcgcacagggcgcaggtccggacatgagcggagcaggagctggtgcaggaagtaccggagctgatgatgtagttgacggagattaccgcgaggtataaaataagtcggcagaagcaaatgcaaatgctgatcaatggcaggtcatctgccataaaatgagaaataagaaatatgctgtgaaagcagccgcgtgacaaatacccgcgggcagaatgcagcaccgcacaaggtgttgtcctgctcgtgggtgttcgtgtgcaaaaaaagcttttgcagattcgaaagggtaagattatggcagagacgaagagagattattatgaagtccttggcgtagaccggaatgcagacgaaggaacgatcaagagtgcctacagaaaactggcaaagaagtatcatccggatatgaatccaggagacaaggtagctgaacagaagttcaaagaggcttcagaagcatatgctgtcttaagtgatgcagagaaacgtaaaaaatacgatcagtttggtcatgcagcctttgaacagggcggtggcggagccggcggatttggcggatttgattttaacggagctgatatgggagatattttcggagatattttcggagatattttcggaggtggaagaagccgcagaaacagcaatggtccaatgagaggtgcagatctgcgtgctgctgtgcgtatttcttttgaagaggcagtgaccggctgcgagaaggagctggagttgacactgaaagatgagtgtgaaaagtgtcatggtaccggagcaaaaccgggaactacaccgcagacctgtccgaaatgtggaggaaaaggtcaggtggtatatacccagcagtctctgtttggtatggtacagaatgtccgcccatgcccggactgtcagggaactggtaagattatcaaggacaaatgcccggactgctatggaaccggatatattgcaagcaagaaaaagatctctgtatctgttccggcaggtatcgataacggacagagtatccgtatccgcggcaagggagaaccaggtgtcaatggaggaccgagaggtgatctgctggtagaagttcaggtgagccgtcatccaatcttccagcgtcaggacatcgatattttctctaccgtaccgatcagtttcccggtggcaacactcggtggaacgatccggatcaagactgtggacggagaagtagagtacgatgtgaaagcaggaacccagaccgataccagagtacggctcagaggaaaaggtatgccgtctctcagaaacaagggcgtgcgcggtgatcattatgtgactctggtcgttgaggttccgactaatttaagtcatgcggcaaaagaagcactgaaggaatacgataaagaaaacggaaatactctgaatcagaagccagaagccggaaagccgaagaaaaaaggatttatggataagctgaaggaaaatctggaagacttataatatttgacaaaaatcatcaaaaaaaattgacagaaaaatggacaagtctgtgcagttgtgataaaataaactacgtatggtaagagctatttttacaatagaataaagagtcttattgattctgataaggaggaataataaaaatggccagaaaaatgaaaaccatggatggaaaccatgctgctgctcatgtatcttatgcatactctgacgtagctgctatctatccgatcaccccgtcatctgttatggcagaagctactgatgaatgggcaactcagggaagaaccaacatcttcggacataccgtacaggtaaccgagatgcagtccgaggctggtgcagcaggtgctgtacacggatctctggcagctggtgctctgaccaccacctttaccgcttctcagggacttcttctgatgatcccgaacctgtacaaagtagcaggtgagagacttccgggtgtattcaacgtatccgctcgtgcactggcaagccatgcactgtctatctttggagatcactccgatgtatatgcctgtcgtcagactggtgtagcaatgctctgcgagtccagcgtacaggaggttatggacctgactccggttgctcactgtgcagcaatcaaaggacgtcttccgttcatcaacttcttcgacggattccgtacttcccatgagatccagaagatcgagcagtgggattacgaagatctgaaagatatggtagatatggatgcaatcgaggcatacagaaaagatgctctgaacccgaatcatccgtgccagagaggttctgctcagaacccggatatcttcttccaggctcgtgaggcatgcaacccgtactacgatgctcttccggcaatcgttcaggagtacatggacaaagttaacgctaagatcggtaccgattacaagctgttcaactactacggagctccggatgctgagaaagttatcattgctatgggatctgtatgtgataccatcgaggagacaattgattatctgcgtgctgcaggcgagaaagtcggtgttgttaaagttcgtctttacagaccgttctgcgcagatgcactggtagaggctattccggaaactgctaaactgatcaccgtacttgacagaaccaaagagccaggtgctcttggcgagccgctgtaccttgatgttgttgcagctcttaaaggaaccaaattcaatgatactccggtattcacaggccgttacggactgggatccaaagatactactccggctcagatcgttgctgtatacaacaacactgagaaggctaaatttactatcggtatcgtagacgatgttacacatctgtctcttgagaccggtgctccgctggtaaccactccggaaggaaccatcaactgcaagttctggggactgggtgctgacggtactgttggagctaacaagaactccatcaagatcatcggtgataacactgatatgtatgctcaggcatattttgattatgactccaagaaatccggtggtgtgaccatgtctcaccttcgttttggtaagaaaccgatcaaatctacatacctgattcacaaggctaactttgttgcctgtcataatccgtcctatgtacgtaagtacaacatggtacaggagctggttgacggtggtacattcctgctgaactgcccgtgggatatggaaggacttgagaaacatcttccgggacaggtgaaagcattcatcgctaaccacaatattaaattctatgtaatcgatggtgttaagatcggtatcgagaccggtatgggaccgacacgtatcaataccattcttcagtccgcattcttcaagctggctgcaatcattccggaggagcaggctatcgagcttatgaaggctgctgcaaaggctacttacggacgtaagggtgatgatgtcgttgctaagaactgggctgctatcgatgaaggtgcaaaacaggttgtagaggttaaagttccggaaagctggaagactgcagctgatgaaggacttgttactactcatgcagagagcggaagacaggctgctgttgacttcgttaacaacatccaggctaaagtatctgcacaggaaggtaacactctgccggtatctgcattcaaagattatgtagatggaactactccgtccggtacttctgcatacgagaaacgtggtatcgcagttaatatcccggtatggaatccggaaaactgtatccagtgtaacagatgttcttatgtctgcccgcacgctgcaatccgtccggttgctatgaccgaggctgaggctgctgctgcaccggctgatatgcagacactggctatgactggtatggctgataagaagtttgcaatcgttgtatccgcacttgactgtaccggatgcggctcctgtgcaaacgtatgcccgggcaagaagggtgcaaaagctctcgatatgcagaatatggaagcaaatgcagcttgccagagcgcattcgattacgctgtaactcttccggagaaagcagacgttatcgcaaaattcaaagaggctaccgtaaaaggatctcagttcaagactccgctgcttgagttctcaggcgcatgcgcaggctgtggtgagaccccgtacgctaaactgatcacccagctgtttggtgacagaatgtatatcgcaaacgcaacaggatgctcctctatctggggtaactcctcaccgtccactccttacactgtaaacgagaagggacatggtcctgcatggtccaactccctgttcgaggatgcagctgagtttggttacggtatgctgctcgctcagaacgctatccgtggcggactgaaagagaaaattgaggatatcgttgctaacggtcagaacgcagatgtaaaagctgcagctcaggaatggcttgatacttatggagtaggtgctaccaatggaactgcaaccgataagctggtagctgctctggaagcttgcggatgtgacaagggcaaagagatccttgcacagaaagacttcctcgctaagaaatc

SEQ ID NO: 425 - DNA, 32759 bp, Unknown
  16S sequences of unknown bacteria
atatcatttcactaatggacaggcgggaaagcctataaaatggggaaagttagaggaataattatataaattcaagtttctctgatgtattctgatatatatattccgaagttgtcggcagagagtaggcagtaacatacaaatccctgaaaggttcactgtactctgtaatattcatctgtatcgcaatctctgttgcatataccataagcgggtcgtcgttttcggccatctcaaactggctgccaaacatactttctaccagtgccagcagtacggcttctttgttttcaaaagctctgaaaaaagaactgcctgtcattcccgcttttttggcaatctcagcagtagttgtatggctgtatcctttttcgaggaacaatgttgccgccgatcccatcatttttttcattgtaagtataccgcttggctgtttaccgattttcgccataactccacctctttcgttttctattgcaatatattatactcccattttgcaccttatacaagtaagctgtaaagaaaacactttttcatgccaaaacaaataaatacaacagcttgtacacatttctgtactgtttttctgtattatatccactttttgccctatgaacaaatatgacgcacccattacggaatgcgccttacctgttaaaaatattatcattatcgtgtctggctttactttctgatagctgacgcattcgactgtttcagcgcagtcttttatatttcctatacatttgccctgttttatacagtccccaaatgcctttatcttcttgtattatttacgaaaaaatggtaaactctaagctgtaaggaggtgttgcagatatgaagattgcaattaacggatttggacgaatcggaagacttgcattcaggcaggttttcgatgacaacggcatagagattgccgcaataaacgatcttacaagccctgagatgctggcatatcttttgaaatatgactcagtgcagggacagtttaaaaaccacgaggtaacaagcgatgatacggctataattgtagacggtgtcagagtgcctgtatacagcgaggccgacgcctcaaagctgccttggggagagcttggtattgacatagtgctggaatgcacagggttcttcacttcaaaggcaaaatcacaggcacatatagatgcaggcgccaaaaaggttctcatctcggctcccgccggcgatgacctgcctactatcgtttacggcgtaaatcacgacaagcttactaaggaggacaatatcgtttcgggagcctcctgcacaacaaactgccttgcacctatggcaaaagctcttaacgactacagagaagtaagaacagggtttatgacaaccatacacgcatatacaggcgaccagaagatactcgacagcccgcacaaaaaaggcaacaagagacgtgccagagcaggcgctgtaaacatagtaccaaacagcacaggcgcagcaaaagcaataggtcttgtaatacctgagcttgacggcaagctcataggctccgctcagagagtacctgtgccatcgggctcaatcacaattcttgatgcaactctcaaagatgaaacagaaacagtaactgttgagggcatcaatgaaattatgagaaaggaagcaaacgagtctttcggatatacagaagaagaaatcgtatccagcgatatcatcggtatgagctacggctcactgtttgatgcaactcagactctggctcagagatgcggaaccaaaatctatgaggtaagagttgttgcgtggtacgataacgaagcaagctatacaagccagcttgtaagaacacttaaacatatgggaacattattataggaggtgcattatggcaattttagacaagataactactgtagcaggtaaagccgtagacaagggcaatgacgttatagaaatcaccaagcttaaatcaaagatttcatcagccgaaaaggatattgtatcactcaagtgtgatatcgctgaattttatctcaaacagagggaagcaggcgaaacaatagatgcaggcatcgctcctgtaatggcacagattgatgaaaaacttgaagaaatcaaatctttaaaagaacagattgaagatataaagggttagcttacagacaggagatgcgcttgcatctcctgtattgcattagctgaaactgaaatagtgtaattttagtgtaaaaatagtgtaatttttttaagaaaacaagttacagcaaggaggaaattatgccgtttatactcttatttctgctgcttctggcaggcacagccgcatatatgtatttcagcagaaaccaaggtcgctacacacacaaaaaagaaaaaccggcagatcctaaaaaggttatttacctgcccggtgatatacagtcagataatacagataccgactgcaaggagccttaaaagctccttattttttcctcaatactatctttatgaaattaaggtgtctgcctccgccggcgttcattgcagctctgtcgttaacagcatactcgttttcctgcacaagccagtcagcccacacctcttcattactctccatctcacttacctctattacctccgcctgcccggaagcgctgacaatatccgtccagtaggagatatcctgcatatactcaagctgctccggactccacgaaagcagcagctcctgcggcagattgtcatggcaattctttttcattcccggcaccgctatatatacatagccgccctgcttcacaaatgggagcagcctgctgtcaaggtactccctgtccctgccgaaatagttgtatgagtcaacacatataacggcatcaaagaagctcttttcaaagggcagatctgcggcatctgccttaaccggtattatctctgcctcggacagtccctgcgactcaaaaaactctctgttctcgcaggggtcgctccagagatcagcagcatacaccttaaatccgtactctgccgcaataaacacacttgtaagcccctgtccgctgccgagatcgcaaacaacgctgcccttaggaattttacagtctgaaatcagttcctctgtcagcttgacaggattgggacccattatctttgacataaattcatcggtctgatatttcccgctctttatatatttcatagctatcgcctcctgtttatcttcgctatttctttgaatttcttttctttttgcgcaaggtagctgtctgtatcctgcgaataggcgttttcgctctcaagtttcagatatgcttcccacctctcctttgaaagctctcccgaagctatcgctgattttatggtgcagccgggctcgtttgtatgagagcagtccgaaaatctgcattgccccataagctcccgtatatccgaaaaggttttttcaatacccttcgcctgatgccacatgccaagttctctcattcccggagtatctataagcatggcaccctgcggcagcctcaccagctgtcttgaggttgtggtatgtctgcccctgtcgtttttatcaattcctgccgtatcaaatctatcctctcccagcaggagatttatgagagtggatttgcctgtgccggaagatcctgcaaaggctatggttttgcccttttgaagatatttatcaagccctgccgtatcataattaaaggcagaagttaaaaccgtctctgttcccggcaacgccctttcaatttcagtcagcttctccgaagcattactgcacagatcctcttttgtcagaactgtcacagggaaagctccgctgtcccataccgccgctgtatatctttcaagtcttcgtatattgaaatccccatttaacgacgtgcatataaataccgtgtcgacattggcggcaatgatctgtccctcgcaggcagagcctgcagctctccttacaaacgtgcttttcctcggcagtatactgtgaataaccgctctgccctccccgccgggcagcgaaagcatcacaaaatcccctgcagcgggaaatgacactgcattatctgccgtatatctgagcctgcctgaaatctccgcgctaagctctccacggtcgcacacaaccgtatacagtcccctctcctgtgatataactctggcgggaatatattcgggatactgattttcgtatactctaaacctgtctgtatatccgtaatccgcaagactcataagagcttcctttcaaaatcctctatatgtctctccagcagcttcaaagcctcattactgttctcaagctccatcagaaaatacatgggagcataatatttaacggcaagaagctctgcattctctcccggcagggcaaaagaaagcacatcccttacatattccagcggaccgcttccaaggtacatattatacagtctttcaattccctcatcgttatatctttcaagcagaagtatgcgccggaatgccgcggcaaattcatcctgagtccagtatatgaactgggctctggtaaactctccgagctgctccactgtcacactgtcatagcctgcttcgctgtcggaaagtctgttttcgggcatctcaaattctctggctctgcgcaggtcctccgtctccatatgcgctataatatggtcaaatatatctctcttgctcttgtaatgtctgtacagcgcgcccttgctaatccccagctctcctgcaatatcgcttactgacacagcctcatatcctctgcaggaaaacatatccagcgcagtctgcattattctttctttggtgtctgtcatagtcaatctccctccatcagacattgtagtaaacgttcgtttacttgtcaagaaaaaaatcagcgtgccccgattgacaaggcacgccgtaactgtctgcattattctattttgcgtattctttcataagctttattgctttttcaagtcccgctttttcttcttcatatgtgtttgcaagatatttttcctgagttttcttcagttccttgagcttggctatttctgccgaaacatccgcaccctttgtatcgtatttatcaccgagactaattataacgtcgcctatgtcacagtgtctgtacttaataagcccgtctccccatgtgccctttctgttgtcaaacagctggttctccatatactcgcatgtttccttatcaaagttcatatagtaccatgcccagtcaacgctgcccagatattcgtcataggcctcctgaattctgccttcctcaagagccgctatgcctgcttcaagatttgccacattatcctggtacagctcgtgtctgattatattctccggctcgaaattaagtcccacaagagcatcctgaagaatcttgaatatttcctgagtctttttgttaagctctaccgctgccgccttgtcgccggactcctcaacctcagccatctttgcctctaaagccgccgctgcgtcctttgcctctgcaattactgcttcaaagtctgctccttctgcaagactttcttcaaagctgctgatcctgtcagtaaagcacaaaggtcttacagcctttgcatcaaggtctattaccagcttgccgtaggtcttgattatatcgttgaagccctcttcattaagaggctgcgcttctgtgctgtcataggttgaatgatatcccttatcgaaatatactgtgccgtcaccgttttctgccactattgacggaattcccataagcgtccagtaaaaatcctctgttcctgtgctgttgccgtaatagctccagtcatacggagactcctcgttaagtcctccgatgctctccttgatgaagcctacaagctctgtcgagcttccggtacctgcgcaggtttcgccctcaacggtatatccgccgtcattgtttactattgcaaacgcgccgtccacccagtcaggatgaacatttacaatttcctcataagcgcctgccgaccagtcgtactcgctgccggaaacgccccattcctctgcgccgtgcatacagaagcgtattgttttgtcaggagtgtattcgctgtccacaagagcctttgctatagccattgaaaccgccacgccctgtgcatcgtcataggttgaatggaaatatccgtccatatgtgagaatacgaatactgtttcttctgtggttcccggaatttcaccccacagattgtgtgaagtcacgtcctctgtaacctttgagtcggcattaagggttactgttatcgaatcctttcctgatgccttgattgcatcctgcagagccttgcagccgtcctcgcttatagccagcgccggcgcatctgcaggtccgcatacgtcctgaacgcctactctgtcattgccttcttcggcatatacagacatagctataacggctctggcgcctttaacctttgcctgatatgcaggatagtttatccaccagttttcgttctggtcaacatcaagcagcaccagcttgcctttgacatcaagtccctcatagtccgcctctgtgccctcgtttacataaaccagctctatctcctcattgtctgcctgcagggttgtctgatagccgcccaggtctatcttctgttccttgccgtcagcatttttgaaggtgatatttgcgccattaaatacccagccgtcaactgtgatatcatccacagttatattctgaagtccgatgtcctccataacgcctttgaggtattccatggtctgcttctccgcaggcgaacccgccgagcgcatacccattacaggatcgtctccgaattcgcttacgctcatcattacttcctttgcaaaatccatatctatggctgcattgaatttatcaaaattctctccgtaatctgagccgcctccgcaggaagaaagccccagtacaagtacagcagacaatgctgcaattcctattttcttaaacataatcctctcctttgccttacaagtttagttcttgctgaatattatatcaattcagaaaactccaatcaatccattaacctgctgccttttcttactaacttgctgaaaaaagccgccctgtcgaaaggacagagcagctgtaatttttcgttcatattttcgggttattttttctcataaagcatatccataatgtatgccgggaagaattttctgagggtttcctctgatgcaggctcagtgcagaggcttactattatgaataccgggaagtttatcataagtccccatatgcctgcgtgtatgttgcatgggttagaccatacgaaattgcacagcgcaacaacaatgactcccgccacaagtcctgcaatagctcccgctttagttgccctcggccagcagaatactcccagcatacaagggaaaagctgtccgataaagccgtatgccaccagcagaatatatacaagctctgccggatttgtaagcgccagcggataagccaccagaaatactatcacaagaaaaacctttctctgaatttttccctctttttcggcagggatattccttgccggagcaataacatcgtgtgtgaatgtaaatgccggcgtatgaagctgcggctctgcggagctttgtgccgctgcaagtatgcctgctcccagaagtcccaccatccaccacggcaggttctgcatgcagaaggaaagcgccaccttgtctgtatctccgtcgtagccctcaaatgcaaacacgcatataaagccgactataagcatcgggatcattacaaggtaaaacagcgatacataggtgtactgttttcttactgtatcctcgtctttgcctccggcagcccatacccagaactgcggccagaaagaaaacaccgaaattataatcgaggttgtccagaaaagcggaggaaaatctccggttgctcccggcagagtcatatgctcagggcttacctccataagtctcttaaaagcctcgcttacactgaaagagccaagcactgtataaagcacaaacaggcatactgtaattgagagtatcagcataagcactccctgcattacatttgtccagcctatagcccgaagaccgctgttatatacataaaacgctatggcgcataaaattataagctcgccaagccacatgggaattgtgccgttgctcattacatttaaaatatgtcctgaccctattatctgcaccagcgaattgccaagcactgcaagagctcctactatgccgcagagcatacgaaggccctttgactcaaatctggctcctatgccctctgcctgggtcctgtagccgtatttgccggcaaccctgtttactctcggtgaaataaggtatgacgaataggttataaagccaaggtacaccacaacataaagagctgcaacgcctttggaatatgcccagcccggcgcgcctaaaaatgtatatgcgcttacatttcccgcgccggtcagaaataccataactataaggcccattgtgttgcccgatgacgaccagttttcgaccttgctcatatccagcctgcctttggccgaaaagcccagtatgcaggccacaagtgtgtagcacagagttatgacaagaggtccccacgtctgaagcatctagtgcacctcccatctgtaagcgatattgataacgattacagtaacgataagacttattatcgacactgtaaaaagcaccggcataccaagcagcatacacggaatgttaaacaggttgactaccggagatatcatcgaaagcagcgataatatcatcattgcgaataccacccattcctttgccttgcggggtcttactataacccatggcttcattttcttttctttttttgtttccatttcatatcctttcgtatttaatcctgccgtctatcatagttatgtccgtcttaatattcataatttcctcaggctgcgcctcaagaatattatccgataaaaccacaagatctgccagcttgcccggctctatgctgcccttgataccctcttcaagagatgcataggctccgttataggtgtacattctgattgcatccataatgcctatctgctggcaggctcccgctaccgtaccagtcctgctgtccgctcttttaaccgccgtatatatccctatcatagggtcaggctctattacaggcgtatcagagcctatggcagttattatccccttgtcaagataggatttgagagggaacatgcagtttaccctgtcgccgtagtatttgatatacattgcggcgttgtctataaaaaagcccggatttgacactaccgtcacattggcttttttgagcctgtctattatctcatcatttattatggcgcagtgctcaatcctgtgcctgcagggtcttgggtttaatttctgcgctttttctatcgatgaaagtatcacatcaacggccttgtcccccacagcatgcgccgttatattaaatccggcgttgtgagcgggaattaaaacagcatccgcctcttcctgtgtataaagctgtatgccctcaagggcagggtcgtgctcgtaaggccttgaaactgcgcaggacggtccgctggtgcttccgtcaattaatattttcacatgtcccagcctgaaatgctcattgcccagtccgcctcttattcctgtcttaataaagtcgtttacccattctatcgtcttttccttgccgcaggcgtgataaagcagcacgtacattcttacatctataactccgttttcgcaggcctcctgataaagtcctatggtatcggagccgtaaaagctggcatcatgtacgctggttatgccacagcggagaaacatatcgtttgcggtcttaaatgcccgcatatattcctcttttgtgtacattaccttgtcccacatatatgtgcaggctctttccttgagaagtcctgtcatctgcccgttttcgtcagttaccacctcgccctttgcaaagttttcggggtgtatgtcccctgcctccaaagctttcgtattgtatacgcccatatgcagacaggttcttgtcagctgcacaggattgtccggcgcagcctcgtcaagctcggctcttgtaggatgcctgccctctttgagcttgccctgatcgtagcccgtggcttttatccatgcgccttttggaagcctctgcgcttcttctctgattatcctctgtattgacggtatatcgggtgctttctgtgcgctgcagtcaagtattacagcggcattctgccctctcatacccaaatgacaatgggcatctacaaaaccgggaagcagcgctctgccgttaaggtctatgactctggtttcaggtcctgtccaaagcttcgctccttcattgtctcccgtatatactatatatttatctctgactgccacagcctgacagactgtattgtttctgtccacagtgacaaccgcaccgtttacaaaaacggtatcggcatacattgacatacatctgttcatattggcacctccaaagttttccgaatacgtctactgtcatcataccacacatattacaaatgccgccagtatatttgcaattcagcaaggatattacccaaaacaagctgaaaaatatattatgccctctctgcaggccggcagaaagggcaatataccgctattcttttttaagatattgaacaaactccttcttcgttctctgataattggctctgcagattgtaatctgtgttccgtttgacataaatatcgactggttttccataaggtccacataatcaaaattaatgatatagcttctgtggcacatatagaacctgctgtcgacctcctcatacagatcctttaatactgcattgtacttaaaaatacgcttctgggtgattaccgaggtttctcttctgtactgctcaatatagatgatgttcctgaaaaaaactctggcaacaagatttttattttcaataataatatagttcttgttcatagctacctcccatttcatatctttttttgaaattatatatattaattacataaaaatctataaataattttgaatataattcggcaaatttcgacatttgcatctctgcagcatcttttgggcaaaaaaataggcgggtatatcatttacccgccaatgcagttatttaattccgtgtattacgttctttgcccatttaccggacttgtatctgtatgtcaggattgccgccttgaataaattctccgatttgacaaggagaactacgatatataccggcagtttgaataccattgcgcctaagaatgcagcaggtacggctatgagccatacgcacgagacctcgcttatggccgcaaacctcgtatcgccgccgcctctcaggactccggttatgagagttccgttgtacaggttgagtaccataaacataccgtatatgagcagtatgcgttttgcataggaagccccaagcggtgtaaatccaaacagacttacaagaagtcctgaacagattataaggagcactccgaatactgcgccaaacagcagtgcaattctaagcagcttctttgccatggctttactcttttcggtattgttttcaccaagctgctcgcctataagaataagggctgcatctcctatgctgaagcccgccattataaacaggttttcgatggtattgctggcctgcgcagccgcataagccgtaactccgatatgacctatagccgccatatacgcggactgtcccagtccccacagagtttcattaatcgttgtaggaagcgagtttttaactactctgcctgcaagctccctgcctattcctctgaactctttgagtttacctgcaattatgtttttcctgccgaataccgcataaagtataagcagcatctccaccgaccttgcagcgagagttcccaccgcagcgcctgtggtttcaagccttggcataccaaaggctccgaatatgaacacatagttcaaaaatgtattggtgctaaacaccacaatgcttacataaagaggtatccttgtctgctgggtggctctcagcgctataacaaaaggctctgttattcccaacagcaggaagcacggtgcggctgttctcacgtactttaccgcaagctcgataaccgcctgctcctctgtaaaaagccctataatataccttgggaaaaacattgcggcgataaaaaatataacgccggcagaaagacttattacaattccaaaacctactgtctttcttatatttttgaggtccctcgtaccccagaactgggccataaaggttgccgtaccgctgttaaagccaaacagcaccatccagtgtatgaaataaatctgcacgcctattccaactgccgcaagttccagttctcccagataacccaccatcaggttatccacaaggttaagcgaacaggcaattaaagactgcactgctataggcagtgcaattttaagcatttttttatagaattctctgttattaagactgactgtttccatttactcacctaacataattattctgagacctgcttcctcaagcatctcaactgccagttcgtcagggtagccttcctttacgactattcggctgatgcccgcattgattatcattttggcgcagataacgcagggctgatgagttacataaatagtaccgccctcaatgctctgggccaaagttgcggcctgtattatggcattctgctctgcgtgaagcgccctgcacagctcatgacgttcacctgacggaattccaagcttctgtctgatgcagccgccgcgctcttcacagtgcgcaattcttctgggcgcaccgttatatcccgtcgcaattatatgcttgtccttgacaattactgctcccacctgtcttctcatgcatgtagagcgcctgcttgtcagaactgccatttccataaaatactgatcccagctaggtctttccattgctaaattcctttctgctaataatatacttctgcaagatacagtccctgcggaggagctgtaggtcctgcttttgttctgtctttactgctgattatttcttcaatatattcaggcgccatcctgcctttaccaacctcaacaagagtgccggttattatccttaccatattgtaaaggaagccatcgcctgtaaccgatatttctatctcttcatcgttcctgcaaacatcgagggaatatattgttctgacggtggtttctctctcctgtccgccggaagcctgaaagcacgcaaagtcgtgagtgcctgcgatatgtcccgccgctttgctcatggcctctgcgtcaaggcatctgtctatctgccaacagtagttcctgcgaaagatatcggtatcgccgctgtttaatatcctgtagatataccgtttgcttttgcagttaaaccttgcatggaaatcctgcggcatttcctctgctttcagaattttgatatctcccactgaatttctgttcattcctcccgaaagaagattgtttgcggcaagcacaatgcgctccgcaggtattgtgaaatctcccgaaaatgaagctctctgccccagcgcatgcactccggcatcagtcctgctggtgccgtttacggctatatcgcagccgcatagtattgaaagcaccctttcaagctctccctgtacggtccttgccgcaggctgtctctgccagccgtggaaccctgtgccgtcatattccagtgtaagaagaatgtttcttgtcatttactatctccttggaagaacaatagtcttattgtctttggactctctgtagagaacaaatcttctgcctatagcctgaacaaactccgctcccaatctatctgcaatttcgtttgcagtagtcttggggtcaaggctgcaactttcctgcattttaactttaataagctctctgtgctcaagcagagtatcgatttcattgattacattctctgtcacatcgcttttacctatatatacaaccggatcaagctcgtgtgcaagtccttttaaatagcttctctgtttacttgttatcattttaattctcctaaaaaatttatacttaattgtatcacaaccgggcagtataagtcatcaattattattcgatttatatctgccatattacaagcatatatattaccgccgcggcgcttatgtacgggcccagtggtttgctgtcggttcttttgatttttttcattgcgataagcaccgtaaaagccatagcgcttataacagacatgccgattataactgtaattattccttttagtcccgttataaagcccagcgccgccataagcttgacatcgccaaagcccatagcctcttttcctgaaatcagcctccccagaaacgccataagaagcattactccgccgccgcaaaacgctccgtaaagcatatcaagcggattgctgtgataattgacaagtcccaccgagcataccgcaagggcgacaaccgcctggtcgggtattatcatatatttggcatctgctatggatattattatcaaaagccacattgccgccataaccggcagagcaaataaaaaatcgtctgccgccagcttgactcctcctgcaaccatcagcaccgaaaacagcgctttccatggtctgctgtttattctctgcctttgcagcttgtcctcttttggaacctcgccgtagtcgcacagccactgcgccgggatatgattaaacgcatacaccgccccgtttccgcctataatccccagaatcatcgctactatgacacctataatctgcatcatttctctctttttgtcctttcttaccctcttttgttgttttttgtcgatttatttagtactatttttctttcctatcctttatacttatattcatctcaacttataatgaaaggagtaggatatgaaaaaagagttattatctattttatcatcaaaatcgaatgattgcactataaaatccaagattacggataaacttgaagaaaattcaaaatctaagcaagaaacacctgtttcagaaaacacagctcagaatacatacggctcccatgtccttataatttctgaggattcggcactgcgtaaaataatctcggaaagtctctcagactttaacgttatctgtgaatacacaaataacggagaacaagcaattttgcagtgtaacaatttacctgtcgattattattcagcaatttttatcggcgatttgacaacagattccgacggaattcatacagcagaaattctaaaaggccgactccatatatccgcccctataattgcagtcagcagcaaccaatgcaacgatccgtatatagacgcatatatttctccggttcccgatacggcttctgttattgatatcttcagcagatcaatcaacggcagtctcgccatatccaaagaaaaggccatggcaagactgggcaacagacaggatttatatgacaaatactataatcgttttatagaaaactacataggcactgccgatgaactttgcagcctgctgcaagacgaaaattatgaagaagcctacagactggctcacagtgtaaaagggctttcaggaactctgggccttacggatatatacaatatctcttcaaggctttcccttgcaattcataataaggaagtctcaggcgagctttatctaaataatttagaaactgcgctcaataaactgttgccctagcaaaagcctgcgtgataaaatcatggtatgaaaacacacttatttttacaggcgccgatacaggcaggcaaatcaactttgcttcaggaggctatggagccttacagagaatacataggcgggtttgtatcacagcgtttaaaagacaacagtcttaatactttagggtttcggctggcagattacagcacgcgccctgaacttacatccacattttcagacgagctttcaaacatatttatgaaacgcaccaccgaagaaaagtggttcaaattatccgtctttgaaaatcaggcaatagaaattcttgaaaaagcaaggaggtacaaaaagataatactgcttgatgaaatcggcggaggagaactgaaatcggatatatttaaaaattatctggacaggcttcttatgggtaatgttccctgcattggagtacttaaagcccctaaggctgctgcaaataccggcagaggaataggcactgaccttaaagatgaaaacgccctgcttcacgaaagacttgacgcatataatgctgagttacttatgtacagcagagataaattctatgagcagaagaaatatatacaaaggtttattgaggaaaagctatgtggacattttatgacagattgattgacggtatagacgaatgtattactgtcgacagagttgtttccggtgcaagctggacagtcgttaaggcgggagaatactgcggtctgtctgccaatatagagggcagacgcacctctcctgattttcctgcgtttagaggcaagtcccttagagaagtggcgaggctttgcaaatcgtgggattttgcagaggctgcaataggggctgccgcagttaatgcctattacaacagctgcaggtttttaaccgatacagcactttctgcaaacaatacctttgatgcatatgaaaatcttaccgcaggaaaaaaggttggaatgataggccattttatgcaccttgagggcatccttaccaaggcagatgtttatgttattgagaaacgccccgaagtgggtgaatatccggaggcggcctgtgaatatctgcttcctgaaatggattttgtctttataaccggttctgcttttgttaacaaaacaatgccaaggctgcttgcgctaagcagaaatgctcacacagtagttataggaccgagcactacaatgtctgacgtgctgtttgactacggcgccgatgaggtttcgggactgatgataacagatccagccgcagcaatgcacaccgcagtttttaacggtcacagaaacatattcagatgcggcagtaaattaagacttttgaaataaacggataaaaaacggcagagggggcttattcctctgccaaaaaaatattttctaatatttatttaaaattgtagtttctaacttagttattatttaagtaaacccttttcgacgattatatcaatcatctcagcacaatcttcaaaagtctttttgatactctcaagtgctctactcataatatccctcttttctcttaaccatcttgtggttattttgattatttcttaactacattgttattataccacctttatttgtggttttcaacaacttatatcgaactaatttgctctttttaacaaatttatttatgcccttatttaagatttttcagtcaaatcataatcttgctgtatttccagcctcatattttctcatatacgcctttttttcagcagctgtcctgtcctgcacgctaaaaaagaacagatttgcagtttatcgctttgctcctctgtccttttctatatattcttgctttttatactctgacaactctcacaccgccggtttcgggcttctgccatgcatcttcaacgctgccgcctttgagattgttttcaatacaccgtataacgccgctgtgcgctactatgaatatttccctgctgtcgtcttttttaagaatatccgtcagcgctttaacgactctgtactgcagatcatagaagttttcggctttgtttccggttttgaatgaaaacaggtttttccctcttttttcgtacagctccggaaattcccctctgatatcctctatatatctgccgtcccagcttcccaggttcatttcccgaaagccttttacctccgtcacttcactgcatataatctgcgctgtttcccttgctcttttgaggtcgctggaatatattctgtgtatattaccgggcagctttgcttttgcctcttctgcctgcttcctgccggtttcactgagaggcacgtctgtctgtcccagaaatattttgtccttatgctgctgcggctgcccgtgccttacaagataaaaggttctgccttttgcaaggtctgaaagagcttctgatttcatcccccgctcatagaattctttgagttcttcataagctgcaggggtgtccatatccagaacagtgccttctctgccggtttcaactcttatcataaggtcatcatatttgtcggttatacctttaagtccgttagtgccgtcgtggctcagtatctcatctctgtatttcatggggatatacagagggtgtccttttttgcctctgcagcatggaacaataaatgaactgtcatctttaatctccctgacaaggtcatatactgtttctttttcaagcaggggacagtcaacgggaatcagaaaaaatcctctgagggctttgtctgttttttggactcctgcctgtattgatgtaaacataccctccggatatttctcattgtagctttctgtcacctccaagccgtttatgagggacaaaagctcctgcctgttgtggccgcttacaaccactatgtccttaatgcctgcatcataaaaagaggcgataagccttgctatgactgtcttaccgcctatctgaagcccgggtttgaagcttcccattcttgacgaatagcctgccgcaagtattacggctcctattctgttatttaccgtagcctgctctgacattaatcatttctcccgcaatgcttactgcaatctcctccggagtctcagcgtgtatttcaagacctattggtgaatataccttttcaaattcgctttcgtcaaagccttcttttttgagcgcttcataaagaaccttgtttttgtttctggaacctatcattccaaggtaagcgcaagggagtctgagagcatctcttaaaacgtcaaggtcacccaggtggcctcttgtaacgattactatatagctgttttcgtcaagttcaagaccttcaaaggaattcctgaatgaatctatagtctttacctcatatgcatcaggaaaacgttctctgttggaatactcctctctgtcatctattacaactgttctgaaattcacatatctcaaaagcttctctgcttcaagcgcaacgtgtcctgcgccgaaaatgtatgctgtggtaatctgttcaaattcttcttcaaaagcttcaggatgagcggcatccacatactgtatcagaatatcggcatcaccgccgcaggccattcctatgccctgctctgaagtatccagtctgaaatgaaacactctgcttttttcctttgtcttaaacacctctgccgcaagtctctcagtttcggcctctatcttgccgccgcctacggtacctatggtgctgccgtcttccctaaccagcatgcacgcgcctttttttctcggtgttgaaccctctgaatttattatcttgcacattacaaagctttcgccctgctccagcatatctctgccgtgataaattactttctgtgacataattacctcctgttttttactctgtctattctctttaaaacacttccgcaggcgcattcctccgtaatccatctggatatatcgcctgtcctgtaccgtatgaaaggcatagccctccttgtaagtgtcgtaaatactatttctccccactgcccgtctgaaacgggtctgcctgtttcagggtttattatttcaatatatatatcgttttctctgatatgatagcctgatccctgtccgcaggacacagcgcagccaagtcccatttccgtcataccgtaatgctcgaaaatccggctgccccaattctgtgaaattcgctgccttgcagactccgatacatagtccgaggaaagcagcactctgcctgctctgatatcagggttttcttcggaaagctctgcaatatattcgggcgctccgattgcgcagtcgatatgcccctgcggctcaaagctgacctcaacacctgttctttcaagagctgtttttaaaagcagccctatagaaccctctgatgtgtgcggaaacagtatcagcgctctgtctcctttccctaccataaactgcataccatttgcaaaatagtcaatggtcagttcctgatcctctgcggtaaaatatatgcgttttggtctgcctgtcgtgccgcttgtctgaagagttacaattcttgaaacctccgaggctctgacacataccatctcttcaccgaagtttcttaaatcctcaggagttgtaaatggcaggctttcaaagtcaccgatatcacactgctcatatagtctgctgtaaaagctgctgtttccttttgcatattctacggtttctctcagcttttctctctggtatttctccagttctgtccttgagctcatatccagcctgtgcttcccggctatccacagatccagccattttttgttcatctagcactccaactcaagtatctcaaatacatatttaatagtttcctcggttataacggggcatttttcaaccttgttgataggctgtccctccataagattgctgcagattttatcaccaaaggcgtcctcaaaccagtcctcaaggtctgcagcattttcgggtcccgtcttgggatctgcaagatgcatcagacactgggctgccgtaagcactccgcagggcttctcgcagtcaacatctccgcacagcgccgatattgcttctataaggtcctcgttctgtttaccgagagctctgagtcccatttccataaccatctggctgcagcagtagccctgcagtttaagttcaaataattcttctttcatattctcacctcttttgtgctacaagcataaaatatcctgtattttttttatttttgacattgcatataatgctgtcttctttaccgtcaagtattgtctccgccatatactgggtaaggtcctcggttctgtcctcaaagtgagttattatgaagcccatttcctccagctgatctcccagaggccctattatgaatttaccgtcgtggcggaaatcaacagctttagctgttctctcctcgcagtctccctccttgtgtttgcgcattgcctgtctgtctgcctctattctcactgcttttatgaagtttttttcgggatttatatgaaacagatcgcttaatatgagcctgccgccttttttgagtacgcagtaggcttcgtgaagcgcttcatcaggcatatttattacggacagtacacattccataaacacaccgtcaaaggtctttgaggaaaagtcgtcaaggaattcaccgtcgcccagtctgatgtcaagatcgggatttgccttgcttccctcttcaataaatcttaaattcatatccacgccgacacagtcaagaccgtattcatcggtgagaaatctcatagtttcgccgcgtccgcagcccacatcaagaattttgtctccttttttaaagcccgcagcctctgccgcgcttcttgttatatcaaagtttccgggtctaagcatctgtacctcctgtttaatttattttctgtatatgctgttgtatgcgcaaaacggtataagtctgtcatcgtctgtaagctgcaccactctgcatcttttcagtctctctgcatcgagattggaaaggtccataaaggccattcccgatactgtaaacatatttgatttatagtaggtaataaattcatcaaggtctacaggctcgtccgcacagcagcaacagctctcctcagcaggtgcttcaccgcagcagcaggagctttcttcctcagcctctccgcatgaacagcagtcttcgtctgtttcctcatattcgggcaggtcccatttgtttaaaacaaaatccctgtcctttctgattatttcaagagggtcgtggctgtcacagcagcttacccctgttttccttgtctgctctgttatgagagaacgtatactgccgtctttttctctgagataagttccgtagaagcagcacattgtatgacctgtggttatagggcacaggtcgcctgttttgaacagtccgtctgtctgctcctctatagctcgcatacagtcaaacattgtgactctgttttcgtaatccttatcgggcactctgccgaaaaagctgaccggctggaaatgtatgccctttaccacatctctgtttgctatgagaaatctcatcatttcccctatgttgtcaaggttgatgtttttgacaaccgtaggcaccagtgtaaccggaagtcccgctctcctacagttttcgatggccgaaagtttcgtatgaagcaatggctcgtttctcatctgcatatatatttcatcggttgtaccatcaaattgcaaatatattacggagactcccgcatctttgagcttctttgcgtagcccttttcttctgctattcttctgccgttggtgtttatctgtatatattcaaaacccttgtctctacccattcggattatctccggcaggtcatctctgaccgtaggctcgccgccggaaagctgtatgttgaattctctttcttcgcccagctccagcagcagatcatattttcgttctatctctgacagcggcatatcgttccccgcatcttccgcctttgcaaagcagtaagggcagtgctggttgcatctgtctgttacgtctatgagaacgcagcaggctgtttgcaggtggttctcgcaggtgccgcaatgaagcggacattctccctcagcgcctttagttatgttaacctttggcggtatgttgacaaccgggtgctttgtccacctgatatagtcctgcggatttcttgccacaagagctgaaacctccccgtgctcaggacatttttttcttataaggacttttcctgcttcaagcacatattccgcctctaccggctcgtgacatacagggcatatactctgtgtttttgataaagttatcattcttgtctccctttatttgaattcaggaattctcctgagtatgaaatacgatactattccgatgattgcgccgcttgcgactcccgaaaatatgagaaccggaaagtacacaaatatccttatattctccaccagcaacgccgccaccagtatctgtcccagattgtgagcaacgccgcctgctattgaaactcccgtaaccgaaaacacctttgcttttttgacaagcaccatcactgcaaaggacataagcgctcccgccagcgaataaagtgctccgaagagcccgctgaacaaaagtcccgccaccagcaccctgactgtgtttatgccaagcgcatatctgtatcccagtctgtacagagcgattatgactacaaggtttgcaatgccaagcttgatgcccggcacgccgaagttaaagggtatcagtacttctatatatgaaaatatcagcgccagagccgtcataagacctgctactgctgttttttttgcactgtttttactgttcattttatctggctacggcatcaagctccgagcttcctcctgtgatttctgcaactactttgttgggcaggcagattatactctgccctgttttggaaatactgccctgactgatacagtcgtgtccattgcagtctgccgatttcatatacatactgccgtctttgattgcaattatgtttgtatgtccgttctctgcaactgtgatttctctgtcctcatcaagggcgtatatgccgtaaagtttgccgtctgaatatatctccgcacgggagcctgcttcctgtccgaaagacagcatatatgacatggcaagccctgcaattataagaaccgctgcaagaattatgtctgcttttttaatcatttttcttaaactccacgctgcttataataatggaaagcagtatcagaatgcttcccgcaatctgcactccctgcattatctcatgcaggaatatgcagccgaataccgtcgccgaaactgactccagcgggaatataacgccggcctgtgaagccgaagcgtatttgactccaaaggtaaacagaagctgtgtaaagaatgtaccaaatactacaaggtatataaattccataactatcggcgctgaaaccatatcaaatgatggtaccggttctcccagcgccaacgccattacaagagcaactgcaaaagaaaatataaactgcatgcctgttatcagggatacgctggtttttcttgtgaaatagtctgccgtaactatcgctcccgcatagcagaaagcgctcataagagaaagcatctcgcccttgcccatggaaagcgcccctgaggtaatgcccgttatggacattattgtaacgccagccattgctatggctgcgcttacaaacactttgcctgcaggtcttgatttttcgattatccataccataaacgggactattacaacataggctgccgaaatgaaagcgtttactcctgtgttaatcagctccagccccatagtctgaagcgcgcctccaagtccgaacaaagtcccgcagattgcgcctcttttccagtcgcctgccgtagccgctctgaaatcctttcgccagattacaagcgccataatagcagtaagcgcatcccttataatgtttgtccagttgggcgcaattgtgtcaagcacgtctttagctacaacatattcgcctccccaaagtagcgcagcaataaccagtgatataacgcctaccggcgctccgtatttttttacaagtttatcaagcaagcaaagtcctccctatagatgttctgtctaaattatatcatctttgagcgcctgcgaaaaggaaaaacattgctccggcaattataaaaagaccctgcttataaaatatcatatacaaggatctaaaataccccgtataacagcaattatatcatacggggtttatattcagtttaaagcttttgggtatgcagattatctgtaaaagttatagcaactcaactttctctttaggcagccctgtatatttaacgatcttctctacaggctcattatccactttcatcgccttcgccatctcaagctcacgctctgctctgccggaagcctcgccttcgcttctacctatttcctcgccctgttctctggcctcctgtatatcgtgcattctctcttcatatgcgttcatatacttcactccaatctcatcacttgccttaatggatgatactatctcattaagtctgattatcctctcatatcctgatgacaatgccttatcatctgttgtttcctcaaagtattcaagcatagctataagctcattgcttactccctcaaggtctttacctttggtgttcagatagagaattacttctccgtcatatacctctttgtcaggatatccctcatacattctgcgaactgtatagcggtattttccttctccgcccatatcaaagcctgctattactatcatacacaggtcacttaacctgttatagtctatagttccctcaggcagcagcttgcttgtcattaacgcgccgtaataacgcattcttttatgtaaattattttggttttccttctgcacttcggcattgtaaactctatcgtcatcacctatggcgcatacatcaagccttgctatttttcccagaagctcctttcgtttctcattctccgcaatgggttcccctttaaagttgatttctctttcaagaatgatttcaagaattatcttatatgcttctgcgctctcaatcagttcactgaacagaaagcggtccatcaggtttaaatcctgcagttttttaggtgggtttgtatgcttcatctgctgttgcctccttaattatatatcaaatgaactgcatattacaagttctgagttgtcatcctgaaataattatacgaggcttatttgcattagtcaacatattttctataaaatgtatttttatatattttttaggtttttgtatacatccataaaaaaacagagtatgtaaaactggaatgaattctgtacatactctgttgtttttgctaaaaccacctgtaaagttagaccaccactaacgtccaaccacaaaagcgttatagcgccaggaaaccctttatctattattttacttcaaaaagctcctcaaagtttctgttaagccagtagtcctcacctttttcactgtcctcaggcttaggttttgccagcagcaccacacttttcccggaggttctgttctccactttaaactccatctcgcctctgtcgtcgattttaagcctgccgttttctctgctgcagtccagtataaccggaaatgcatctacagggcatttggatgtagctgaaactatgtgaacatcatctccgttcttaatatcaagcagctctccggcatacagggccgccatatatccaagagctataccgccgcacacatgaccgtgatattctatgcatttgttccataattctgtattcatatccacctcaataaaaaacaggatctatagcaagtgtaaaccctgtccttagataaatcaattactatttaacaactaccttcttgtatccgctgtatttaccgtaaacattcttgccgtctactttcttgcctgcagcaacctttacatagtaagtgccctttttaagctttaatgtgtatgaagtcttagttgtatattttactgttgcttttgtgaatttcttgctctttgagtaagcaaccttgtacttttctgctcctgcagtcttgctgtatttaactgtagccttagctttcgatctcttaactgtcaggttcttaacctttaaagccttagcagctgctgtgtccatagcagtcttatcaactgttacagctataccggaaattccctgcacaagtcttttgcctgcattatcgtctgctgctaatgagcctgcaattacgttatatgatgtatctgctgatgttgttgctgccagataatctgcaatagtctgtcctgctgcaactgttccttttgctgctgttactgaaactgcaagaggctgctctgttggcgcacctgtaaatgctgcatctgagcccttagtttctccgtaaagataagcaggaccggcaaggtatgctttgtactcactcttagtatatgcggaaacagctccatcttttacttctgctgcatacagcgctgtaacaaaatccttgttaatgcctgcatctgcaagaagcgtttctactgttacatactggtttgaagtaataccattccaaacaccttctttgtaatagaacccgccgattgaacctgtttctgcaagtgctgcaaactgctctgcggtgtactctttttctgctgtaagagttccgtcttcaccctgaagatatactataaatgccgtagttgctgctgcatcgtctgcacttgcagttactgtcattccggcaaatactgtcataaccattgcaactgaaatgattaatgataatattttctttttcatattcttcctccaacaaaaattaaatttatatccatctatattctatctctttgtttttttaatttctgttgtcttgccaacacttttcgatttaaaacaaaatagtttcgcctaaaaagccatattatatacaaaagaccctgccaagataattccaagcagggttccatatatcataattctctttaagtattttctctttctgccagcctgccgctgcatatcagtacggcaagtattatgcagtatgtaagcgctccggtatttccggctataatatcggttaccgtatcgaccattcctctctgcatttcacctcctgtaagcctgtctgtggtaaactcgaaaatctcccatataccggcccccgcagatgaaaagaaaaatgcaaagccgcactggagcagcatatacagcttagtatttctgacctccgaaactgctctgtcaaacagtctggacagaagcaccgttgcaagccatgccagcaatatgccgctgaaacaatgcactatcttatcatacggacccacacttctgtaaagattaagcactgagcccacaggtgatgcgcagtaaacaaaaatcagcccgcagtaaaacagattgtctttgactttaagcagcagtgaaaatacaaccagaaccgcaatggcacaaaacgaccctataatatttccaaccggcgggtttattcccgattttactgcaattactgctgttatccctgttgcgactgcaagtatcaaaactgctgtaattcttcttttactcataatctatcccaccttttaaatttattacgctataaacagcataatcatccctgctaaaacagaaactatagtaagaagcgccgatactgttttcaggtcttccttagcgataaatctcacaataccgcctgcaagtcccgcaagtccgcaggcgcctgcagcaacacgccacataatccagttgatcggcaatgctgtaatattcattacgcttatgagaattccccatgccgccattatatacagaattgctctgtttgctttttcgtttttaacaatcagaagcagtaccagcccgataatacttataacgctcataatgacgaacatcaaagcaagatatcctaatgccatctaaccccctccttataagtcttcctctgcaactttcatcataattgcacattctatgcgcttgcagaacagttcgcagcctgcctcatatatgcctctgatgctgcctgtcgcatgatatgcgtttgccgcgcagccacctgaacagtaaagcttcgcccagcagtcgccacattcaggtcttgcatatacattgcaggagcggaaatcctctctgatattgttattggtaactccctgccagatatctcccagcctgaactcctcatctcctacaaactggtggcacggatacaggtcgccccaaggtgtaactgccatatattccgtaccggagccgcagcctgaaatacgcttgtagatgcaaggtccgccagtaaggtccagcatatagtggtagaaagttatcgggtttccttctctgctgcgcctcagcatatcctttgcaagtatctcatactgttccttgacgatttccatatccgcttcggtaagcgccgcaggatcggaaggcgcacagactacaggctccatactgagctctgtaaatcccaggtctgccatatggaacacatcttccgtaaaatcaggatttgcgtgagtaaatgtgcctctcatatagtagtttttgccgccccttgcttccaccatttttttaaatttaggaacaattatatcgtagctgccattgcctgcatagtccacacgcttcaaatcgttgatttctttcctgccgtcaagggacagaacaacattgctcatctctctgtttgcaaaatctataacgtcatcgtcaattaaaacaccattggttgtaagggtaaatctgaaattcttaccgtgctgtttttcaacgcttctggcatattcaacaagctgtttgacaacctcccagttcataagaggctccccgccaaagaagtcaacctcaagatttgtccttgttccggagttttcaataaggaaatccagcgctcttttgcccacttcaaagctcattagggcgcgttctccgtggaatttgccctgacttgcaaagcagtagtcgcagttcagattgcaggtatgcgcaacgtgcagacacagcgccttgattacattacctgaatgttccttaaatgtacccgccatatccgcaaaggtatcaggactgaaaagcttgccctctttaatcagaccctttatatcctcaatacactcacgcacatcggcttcggttacatctcctctgtctttatatttatcacatacaacctgtgtaatcgtatcttcatcattagcctgaaacattgctataacgtcataaacaggctcgtctactacatgaatagttcccgagcaggagtctaaaacaatattatagccgttcattttatactggtgaaccatatacaggctcctttctatctatatataatcaatcctgtttgctacgcaaatggggttaggtcttttcgccgtagctttcagccaatcgcgctatgcactcttgggaaagcctgacgtttgacctaccaacagttcacttcgttcactgggttaggtcataaaaaagctgccttctgtaaagacggcagccttggcttttgcgaagtcctatttatcttctttttcgcatttctggttagcaacaccacagcttgtcttgcatgctgactgacatgaagtctggcattcaccgcagccaccgttcttagcgctttcgcataagttacgagtttctattgttcttatctttttcatattctgcatctccattctgtttggtttatcatcgtattatacaggctttttctgttctgtattgcctgtatttatttagtatatcaaatcgaaaatttaaagtcaatgctatctgcttaattgctcttcaattctgcttctgacaacagcttttatctcctcaagggagcctctgcctgtaaagcctgccgccttggtatgcccgccgccgtcaaattcaacggctatttctgcaacatcggcataagtcttggctctcatacttaccttgatttcctccgttccgtactctttgagaaacactgaaatctcaacgcctctgatacgtctcagcgtcgatactattccctctgtttcgtccatacctgtacctgtttcctcaagcatctgctgtgttacataagccatagctgccttgccgtctgcaaatatatcgagagtattcattatcatattgtcgagtcttatcctgccaaccgatacattctcatatatctgtatgcagacttcgctgtggttcattccgctgtcatacagcgcagcggctatttcgtgagtttttttggtgcagtttgaatactggaagttccctgtatccgtagtaagcgccgcatacagagcctctcctgtatgcgcatctatttcatctcccatggctgtgataatatcgtatattatctctcccgttgcggctgcatcagggtcaacatacgcataatccgtatcagagctgtttgttctgtgatgatctatgcacattgtttctctaccggaaaggaatttgccgtaccttttgggtattctgctctcatctccgcagtcaatatatacgcacaggtcagggtcatctattatgtcctgattgtcagtgcagtaatctctgtcgagaaatttaaggttgcccgctatctcatcttcaatgagaacatagcaggttttaccctgttttctcagcgcgcctgcaagggctgcagaagagcctaaagcatctccgtccatatgaacatgaggaaacagcagcacactctgcgcctgtttaagcttctgtgcaatctcttttattgtgttcattattcttcctcatcgtgctttatatcaagcctgctgattatatcgtctatgtgtctgccgtattccatcgacttgtcaattttgaagataagctccggtatatgtctgagctttatctgatgaccgatttcgcgcttaataaggcctttgacgctgcggaagcccgcaagaacctgctccttttcctcatcggtaggattgcagttttcgccgcttcccagtatgctgacataacaggttgcatagctgccgtcgcttgttacgtcaacagcagatatgcttatcattcccgacagcctcgggtctttaatgcccgacaaaagcatctggcttattattctccttatttcctcgcctaaccggccctgtctgtatcctttacccatttatctttcgatttcctccataacgaagcattcaataacgtcaccgattttgatgtcgttatagtcttcaattcctatgccgcattcgaagccgtgctgtacttcttttgcgtcgtccttaaatcttttaagtgatgagattttaccctcgtgtataactataccgtcacgaacaaggcgaacctctgcattacgaacagccttaccctctgttacatatgcgcctgcgataatgcctacgcccggaaccttgaaggtttctcttacctctatcttacccagaacaacttccttgaattcaggatcaagcatacctttcatagcgtcttcaacatcattgatgatatcatagattactctgtaggttcttatctggatattatctctgtctgccatactctgaactgccgatgacggtcttacgttgaagcctatgatgatagctcccgatgttcccgccagcataacgtctgactcgtttacagttcccacacctgtatggattatctttactcttacattttcattcttgagcttttcaagcgatgcaactatagcgccgactgagccctgtacgtctgcctttacaataaggttcaggtcttttacctcgccctcctgtatctggctgaacagctgctccagtgtgcttgctgaatttcttgcaagaacctcttctcttaatttaagctttctgttctctgcgatttcccttgcaattctgtcctctttaactgcattgaattcatcaccggcctgcggaacctctgtaagtccgaggatttccactgctgttgcagggcctgccttggcaatcttcttgcccatatagtttgtcatcagtcttattctgccgcagcttgttccggctacaacgctctgacctgatttgagtgtaccgtttaatacaagaagtgttgcaacaggaccctttgccttgtcaagtcttgcttcaactaccgtaccctgtgcaagtcttgcagggtttgccttaagctcaagcatttctgcctgaagcagtatcatctcaagcaggtttgtaattccctcg

SEQ ID NO: 426 - DNA, 3984 bp, Unknown
  16S sequences of unknown bacteria
actgcggcgcggatgacttcgaggccgaggaaaactgcttcaccatcacctgcgcgccggacgatttcaacgccgtcgccgaagcgctgggcgcgaagggctatgcgtttgcctccgcgcagatcgagatggtcccccagaactaccagaagctgacggacccggaacagatcaagaacatggaaaagatgctggacatcatggaggacgatgacgacgttcagaacgtctggcacaactgggagcaggagtaatttcggttcgcgcttaccttctattataatgaggcctgcggggctgtttctgagagatcagggcagccccggcagttttttgcggcggaaaggcggggcggcgatggcgtattatcaatattgtatggtgcagtttcgcgagaagggcgcggcgtatgcgtatctgaccggcggtgtgccgctggaggcgggggcgtttgtcgtcgtccccgtcgggcggtttggcgcgaagaggctggggcgggtgacggaggtttttatctgcacggagcaggatgcgccgtacccgccggggcgaacgaaatttgtcctacgccgggcggcggagacggcgtttccggagcgggacgtgccatcaaagcgcgtgccgcaaaagggtgtgctgcaagagagcgcgccgcaagcggcgcaaaagaatgcaccgttgggatcgttggaaccgtctgcccggaagcgacctgcggcgagcgttggcccggcggagacgcctggtatagagcagtctgcgcaggcctgcgaccggcagagggcagcagacctggcggttcgcacccagggcgcaggggcggtgggccgcacggaacaggcggcgtccgagcaggcggcgccggaggaagcgccgcagcttgaccgggcgcaggcggcaaagccgcaggacctgccgggaccgatcctagatacgctgccgcagccaatccggctgaaagagcctgcgtggaaaacggcggcatccagcttgtcgaaggctgcgccgagggcagtggcgcaggaagcgtccggatcgccgcaggacgcgggggaaaaagctgctgtgccgaacggggcgggaaagccgaaaaggtggcagaggtggctgctgctggcggcgacgctgggggtctttttgttcgtgctgctgcgggaagcgccggagacgaggcccacggtggaccccgactgggccgcgcgctgggaggcggaacaggaggccgagcagcgggcagaggaggcggaaattcaggcgatgcgggacgccgggctgccgtatgtcggtatgccggagtcggagatcgggacaacgccggtgctgggcagttacggggtcgtccagcatttgctgaatcataataccggctgggagggcagactgaagcggacgaggtatctgtggtttacgacgggccgggagctgatcttcaccgccgtttgcctgaatggctacgtttcggaggtccaggaggaatccggctattggcgcgaccacaccctcctggtgcccgtcgtcaagccggacacccacgcgacgtactattacaacgacgatgacaacggcagcctgcgcgacgaatacgacagcccggaggacctctacgaggagaacccggatgattatgaagatttagacgacgcctgggacgcgtgggagaatgattgaggaaaaagactcccgcaagaatgacactgagcgggaaatctatgtaaataatcaagaaaaatctgagaaagagaaaaggcagaggatatacccccctgccttttcagtttattataataaattatgttaatgggcgatagacaacgataaacattcctgaatgcatattgcgcgtgtgagcggccacagatgcgctgcccagcaccacatgctgggcaaacaacgtatcagtttctagaggcggttcttggctgcactgacttggagaagcgcgtgccgcacttccaacaaaggtctcgctttacgggctgttcctgcccgcaaactgggcaaaggatatatccctcgcgtggcgttgcttctggctgcacagcagatttgggttcagatggctgctgcggttgctgctgcggctggggcactgcgttgatgctttccgcagcaggagcttccgtggcaggcaacgtgacaatataatcctgtgcctggtggatgtgcataacgataaggacttcccgcagcgcaagcaggagcgaaccttcaagcagcgccaaaagccagatgagaagtgcaacgcccaaggaaaagtcatcggcaagctgttttccaagaacaatgccgccgatgaatccaccgataaagataatgacagcaaatacttttaaaatggcggttatgtcggtttcagcgcccacagagcttttcggagaaatggtatattgcctgtcttgcatgatgcagcactcctacttttttctattttggcggttacccgtcaagataattgtagcatagcaggcgatgattgtcaatgagactatatatactgataattaaatatctgcacctgcaaattatactagcatcaagaggtgatgctatgatttgtgacaagatcaaggagcttcgtgagcgggcgggcgtgtcccaggctgcgctggcgaggagagtcggcgtaacgcggtcggcggtcaatgcgtgggaaatggggctgtcgatcccgacgacgcagtacgtcgcagagctggcacagttcttccgggtatcagcggattatatgctgggccttgaccgcacggaggcgatctatcttgacggcttatcggaagaagagaaacatattttatatacgctgattcagtattttaaccggaaatagacgcagacaggagggcgcgggatggagatgcaacaggcgcgggagattttggcggcgctggccgatggcagggacccggcgacggggaaggcgcttccttcgcaggacagctgcaatcaggcccaggtcgtacgggcgctttatacggtcctggcggccttgccggagatggatgcagagacggacgaaatggagagaggcgaggcgcaggaagcgccggaggcggagcaggcatcgaatgccggagagccttggacccttgccgaggaggcactgctgcgggcggaataccagagcggcatgagctgcgcggtgctggccaagaaacaccgcaggacgcggggcgcgatcgcttccaggctggtgcgtcttggcgtgatcgcgtgtcggcgggacgccaggtgaggtctgtcggcggagcgttttttaaactgttgtcgctttcccggcggcgcgaaagcggtctgccggggaattgactttgggcgggccgggtgctataatcccctgtacgagcgggcatggcgccctcggggaggaccggagcggcgaacagcggattccttctgcatcaaagcacgggggtcggctgtttctttttgcctgcgctggcctggcgcggcgcttggcctagaaaacgcgtcgcgtggagcggaggccagaggaagaacatgtgtggctgctgcggaggctgaaaaagcgatgtgcgctggaagtgggaaggcgcgcgggctggtgcggcgctgagaagcgcgaaggggcgcaagatcatgcgctggggatagagaaagagaggggcttatatgaatctgctgcaggcgagtgagatcatgcggcggggggagaaaatcccgaggcggcagcaggcggggctggtgattgcactttcggtcccggcgatcttggagcagctggtctcgacgctgatgagctacattgacacggcgatggtcggcagtctggggtatttcgcgacggcgtccatcggcgttgtcgccagtacgacgtggttgttgaacgggctggtgagcgctgcggcggttggattttctgttcaggtcgcccagtatctgggggcgggacgggagcgagacagccgggatgtgctgtgccaggcgatcttatttaacgcggcctttggcgcggcgctggcggta

SEQ ID NO: 427 - DNA, 20041 bp, Unknown
  16S sequences of unknown bacteria
gtcgaagagtccgtggcgggcaaaaccgctcagcatgtggtcgaaaaactttaccccagtatcgatcttctgttttccggaaccatccagatcgatagagacacggatatttgtttcgcttgtatttcgttctgcaattgcttttcgattcataattacctcccggcggtatcttttctgatatcctgtaatatttttattatcattttttcgacaattagtatatcatagaaagggaaaatccatttctcagaagatcatccaattatccccatattttttaaaatgcgggaatgcatgccgaccgaaagactgataataaaagattaaatatcgaattttgtcgaagaatgataaatattgattgttaaagggattgttatcagtatcaaaattatttaaaatcaaatggtagttattattttacaggagggcagaaataatgtcaaagatcaaactagctatcgctgatgataataaagacttctgcgatatactatatgaagttctcggtgaggagaaagatatcgaaatcagctggaccgccaacgacggcagaaaggttttagaagaaattcagaaggaaacgccggatgtgctgattctcgacaacatcatgccgtatatcgacggttttgaagtgttggagcagatcaacaagatggaactgagcaaatctcccaagatcatcatgcttaccgctatgggcaacgagacttttaccaaaaaagcgatctctctgggcgcaagttactacatagtaaaaccttttgaccttcagattctgctcaagcgaatctacagtctttccggtattcataaggaggaagatactcctgcggcgccgaaatctgccagaaagctcatccgcaaggaagacagcgaagagatgtccaatctggaaatcgatatcacgaatatgattcatgaaatcggtgttcccgcacatatcaaaggatatcaatatctgagaatgggcatcgcactgtgtgtggaaaatatggatctgatcagtgcggttaccaaagaactctatccgatgatcgccaaggcctacaatactacgccgagccgtgtggagagagcgatccggcatgcgatcgaagtggcctggaacagaggaaaactggaaaccatcgacagtctgttcggctatactgttcacaacggaaaaggcaagccgacgaattcggagttcatcgctatcgtagcggacaagctgcgcctggagcgggcggtttaaagttactctcttttcatcttcaccgagcgatacgggaaaagggtgatccctgccgatatcctccgaaaatgacaccgctttacattgcagacgaacaagaggatggaacagaaaaatgagtgagaaaaagaaggcggccggcgttcccggcagagacaaaacaaacaaagccaaaataaatgaaaaaaacgacgaaaaaagcggccagagccgcctgtttcataaatttgaacctatctttgacgaaaattccagaattctgattctgggaacttttccttccgtaaaatccagagaacaagatttttattacgcccatccccgcaatcgtttttggaatatcctttcaaaactgacgcaggaacctcttcccgtcacgaaagaagagaagatcgagctgcttctgcgcaatcggatcgccctttgggatgtgatcgaaagctgtgagattacaggctccagcgacagcagtatccgcaacgtcgtccctgcaaagctggaacgggtcctctgtgtaccgcagatcgagaatatctacgctaacggaactgcggcgaaacgtctctatgaccgttatcagagagagcagacaggcagagaaattatcggactgccgtctaccagccccgcgaatgcggcctggaatctggagcgtctgctgaaagcctggaactgcattattcgtgaatgagatcttccagcttcagctgctggagatattccagcacccggaaagccaactccagaataaaagcattttcatagtcgttaatatccagatagaggagttcttcgatccggcccattctgtagtttatcgtatttctgtggcaggagagctccgaagctacccgctgtatgcttctgccggatttcagatagacggccagcgtctttaccagttcggaattatgcttccggtcatagctgaggataggttccagacaagtcgtatattctctgagaatcttctgatcttcggaagaaaacagcattttgtaaaatcccatttcatcgaaagaaatgcatttactgtctttaaatttcgcataactgacggcagcccgggcgttgcggaaactcagtttgatattggtgagattcgacactatagtgccgacgccgcagcgcagcgtacgggaatgatgaatctcgctcagatcttttacgatttttttcgcatatgcataagctcttccatacggtacatcctgaagtaatatgacgccatatcccgcttctctgaaataaaagaatttttctcccagcgtatagaaaaagcgattgagatatttataattatcgtcatttgccgactgaaagaataccttttcgtcatcgcgaaaagcgagaatgacataatccgcatcgagagggaatccgaaacggacgatgtattcttcatttcggctgctcatgtgaggatcgtataaaagaccgctgagaatatcgtttaccgtatcgtaagcgtggtcaaagtcgaacagagcggaacaggcttcccgggtgatgtctccgatgtgaatactttccgggacgcagagcagagggaactgaagttctctgcagagttcctccacttccggagcgatcatatgatcttcactgtcggtcacatgagcgtaaagaatcagaccgctggcattcatatcattgaggctgcggatataatcgagcagttcgtccgtgctgacatcggtatgctcggtactgatcaccagatccccgctgcgcagcagatggagattcgaagcccgttcatcctgctggatccaacgtaccatacggtaaaatccgtccgatcccgccagtggagtgagagaaatcttatcttttattctgtcatacaacgattcaaccatcagttccaatgttaaaagcctccttctgtctttattccgtcctttttccaaccatgacacagtaccgcggttcccaggcaacgggtctcatttccaggttccggcgggaaatctgcggagcagatattgccttgtactgcgctgaaatcccccgcgttttccgatgaagtcaatctgtcagaacacagctgtgatttgaaattattataccactatttgtgctctcagcataaatatctttccttataaaaccattttcagcaggaaatatacagatttatcctctttgctgagttttgttgtgaaatatccatatattttagaaaattcttttgaattcattgctctcagcgaaatatccgccggaaatcgctttgccgatcggcaggatttcgcataatctccttgcctgaaaaaaaattctgtcatataataatccgtaattatatcgagcacagctcttgtaaattcgcttgcttagaatgtacgaacggctgcagcatgcgccgccagctcgtctctttcattttcagcggaaagagcacggctccccgccgaaagccgggggacgggatccgccgtccggagaagcggagacatgaacgctaaagttatactgaacagcgaagaaaaggagagggaagatatggtagtatccgatacaactctggcgaggatcaacgaactcgcaaaaaaagccaagactgttggtctgacagaagaggaaatcgcggaaagagacctgctgagacaggaatatctcaggaatttccgtcagaaattccgcagtcagctggagcagatccagatcctcgagccggacggcagcgtcacaccggttcggagccggacggcaaacgacaaaaaaaattaaaaaaggctcgtttcctgtgcgcagaatctacaaattctgcgctttcttttttttatcataaaatcggtaagaaaaggaggcaattatgatgaaaaaaagaatcgcccgatccgcgaaagcactcatatttatcgtggcggccgcactgcttttctcaggttttaccacagccggaggcacccggctggaaaaagaagcggcggatctgatgctgcgaaggacggaggctatgcagcgagctatgtttcacggaggaagcgacgctgacatctactcccatctggcggcggtagaggcccatcctcttctcaaagaggatatggaatccatcagcgatttcagggaaagcgatgcggataaagtgatcaatatgaaagtgattcgctgcgaaatgaaagaaaaaacggcaaatacgcgcttttttgatatttcggtcaagtggtacctgctgggatacgacggttattattcggaagagcagacctaccggattcgtacggtcacccaggggagaaaaatgtatctgtccgatatgcagccggtatgacgatacctatctactaaataggtataaaaaattgtgaaacaggccgaaaataaattagaaataataaaatataatttgttattttaaaaaataatgcaaaaaatatactaaagtatataaaaatcctcggttttgcaaaaaaaacggtttatcttctttgcaaaaaaggtataatatacccagcaaaacttcggggttgcgataaaatatacaattacaaattatcgaatagtaaaatataaagttactatcagatcaatatttgaggaaggattataaaaaaagatggaagaaaagagacaggtctatctcgattattccgctaccacgcctgtaaagcaggaggtagtggatgagatgattccatattttacagagaaattcggcaatgcttcggcaatttattccgcaggcgcggaggcgaaggacgctctggaaaatgccagagcccgggtagctgcgctgatcaacgcagagccgagagagatcgtatttacctccggcggtacggaatccgacaactgggcgctgatcgccatggcgaagaagctgaaaaataaaggttgtcatattatcacatccaatatcgagcatcatgcggttcttcatacctgcgaatacctggcacgaaaagaagggtttgaaatcacctatgtcggagtgaattcagaggggattgtggaccctgcggaagtcgaagcagcgatccgtcccgatacgattctcatcagcatcatgcatgtaaacaacgaagtgggaagcgtgcagccggtgaaagagatcggcgccatcgccagagcccgcggtatcttctttcacacggacgcggttcaggcggccggaaatgttccgatcgacgtgaaagagatgaatatcgatatgctgtctctctcttcgcataagatctacggaccaaagggtgcaggcgcgctctatatccgtaccggcgttattctgcctacatatatacacggcggagcgcaggagaacaagaagagagcgggtacggaaaacatccccgctatcgtcggtttcggcaaagccgctgaaatcgcaaaaagagatttcgatcagcatgtcgctcatgtcagccgtctgagagaccattttgtaaaaagagtgacagaggaaattcctcatacctattacaacggaagcagagaccgccgtcatcccggcaatgccaacatcaccttcgaatatatcgaaggcgaagcgattcttctctatctggacttcgccggcatcagcgcttcttccggttccgcgtgctcttcaaaatcccttcagccgtctcatgtgctcacggcgctggggattccggtggagctgatccatggatcgatccgcttcactttcggggacttcactacgatggaagacacagactatgcagtagatcagataaaaaagattacagaaagactcagagaaatctcatccatctctgagaagaaaggttggtagataaaatggcaatgtacaatgatacggtaatcgatcatttcatgaatcctcacaatgtaggcgaaatcgaagacgcctccggcgtaggtacctttggaagcccggtctgcggggatatgatgcagatgtccatcaaggtggacgataaaggcgtgatcaccgatgcgaagttcaagacttacggatgcggctcagctatcgcctcttccagcatcgctaccgatatgatcatcggaaagacctgtgaagaagcgctgaaggtgaccaacgccgatgtcctgaaagccctgggaggtcttccttccgtcaagattcactgttcgattctgtccgaacagtccatcaaagcggcgatctacgattatgcgcagaaaaacggactggagtttgaaggcctcaaggatttcgatcccgatgcggaagatcacgatcatgattcctgtgaaatcgacggagatgatctttaatttttataataaaaacgcgaaagcggagcggaagccgccgtttctgatctgaaacgacaggactgtacgcgatccgatatccgacgaaaaaccaccaaggggctgtcttttcagacaaccccttttcacagtatggagaaaaataaatggcaaataagctgacaccgatgatgcaacagtatctcgacatcaagcagcagtaccgggactgtatcctgtttttccgtctgggagacttttatgagatgtttttcgacgacgccgtcaccgcatcaaaggcgatggaggttaccctgaccggaaaaaactgcggtatggaagaaaaagctcctatgtgcggcgttccgtaccacgctgcggacacatatatcgcaaaactcatcgaaaagggctataaagtcgccgtgtgcgagcagacggaagatcccgccgcggcaaaaggaatcgtaaagcgcgaagttatccggatcgtcacgccgggaaccgtagtgaatcagggaatgctggatgaaaaggagaataattatctggccagtgtctatgcttcgaaggatggagcggctctgacttactgcgacatatccaccggcgagctgatgtccggagaattcacgtccggagatatctggggagatctgctcaacgaactgatccgcatcgatgtgagagaactcatcaccgacgaataccttcgggacactgaattttacagaaacgtatcggatctgaccgatgcttatctgtccatcctgccggacgcttacttcgacggacagcagtcggaggctttgataaagcgccagttcggcgtaagctcgctgacgggaatcgggctcggggaaagccctctgatcgttaaatcgctgggcggtctgctttcctatctgcaggagacgcaaaaaaacagcgtagcgcagctgactcagataaatcttctggacagcgaaggtcacatgtcgctggacaaatctgcgatcaaaaatctggaacttacggagacactgtttgaaaaaaaggtcaaaggatcgcttctgggcgtattggataagacccagaccgcgatgggatccagaaagttaaaaagatggatcagagagcctctgaaccgttctcaggacgtgaacctcagactgaatgcggtggaatttctgatcggcgatatcattttgcgcaataatctgagagaagcgctgaaatccgtatatgatctggaacgcctttccggcagaattgccggaggaaacgccaacggcagagatatgctggcgctgaaaaattccgtagccgttctgccggaactgaaatccgatcttcgttcctgcggcagcgagatgcttcagatgatcgcggaaaaaatcgatacgctggaagaagtctatgaaaaaatagacgccgctatcacagaagatcctccggtcacgatcaaagaaggaggtctgatccgcagaggatattcagagaaattggatgaaattaaagaagcttccagcggaagcctttcctggattatgaatctggaatccgccgagcggcagcgtacaggcatcaaaaaactgaaagtaggcttcaacaaagttttcggttactatatcgaagtttccaaagcacaggcggaaaatgtaccggaagactatatccgcaagcagaccctcgtcaactgcgagcgttatgtgacgccgaaactgaaggagatggaatctgtcgtcctcaacgcggaaagccgcatcaactctctcgaatacgagttattcacagaactgagagaatatctgaagacttttacaaagaccgtccaggagacggcagatggcgtctccgatctggacgtgctgatttccttcgccgaagtcagcagtaaaaacggttatatcaagcctgcggtagacgatggcgacgtgatccgcatcatcggcggccggcatcctgtcatcgagcagacgatcaccaacggtatttttgtctcaaataatacatatgtagaccgggaccgccagagtctgctcctgattaccggccccaatatggccggaaaatccacctatatgcgccagacagctctgattgtactcatggcgcagatgggttgtttcgtaccggcggaaagcgctaagatcggaatcgtagaccggatatataccagaatcggcgcttccgataacctgacccaagggcagagtaccttctttgtggagatgagcgagttagcttatattctcaataccgctaccgagcgaagtctcgtcatcctggatgaaatcggccgcgggaccagcacctacgacggtctttccatcgcctgggcggtggtcgatcatctctgcagcagaaaacgccgtatccgtacgctgttcgcctctcactatcacgagctcacagtgctggaggagtctctggaaggttttaaaaatctgaatgtatccgtcagtgaaaaagacggcgatgtggtgtttctgcacaaaatcacagaaggaagcgccagcaagagttacggcattcatgtagcgaaactggccggtgtaccgcagtctctgctgaaagctgcccagatcaaactgcaggaattggaaaccgcctccgcgtcacatcaggaatcggtgcatcagagaatgctgcatcctttatcggacggacgggattccgatgcggaaactgccgccgcatctgcgcggggagacacacccgcagcggaaaacactgcggagacacagcagctttcgtttctcacttttatgagtcatccggctgtggagatgctgaaatctctcgatctgatgaatatcacgccttccggggccatcgccatcctggagcagctgaaagaggcggcggaagagacgatgtaatagctgagaatttatgttaagataaaagacacagatagttttccgcctgccggcggcgtattgttaactccgtccggacacgggggattctacaggtctgaacattaccggaaaatatgaccctcagctgaaatcatacggattgctttcagccaaaagtacgggggcagagggaggcatgcagatggcagattttataagaaaaaagatcgcggaactgccgaaacagttggcggataaaatcgcggccggcgaagtcgtagagcggccgctctccatcgtaaaagaactggtagaaaattccatagatgcgggttccgattttattaccgtggaaatcaaaaacggcgggaagtcgtatatccgggtgacggacaacggctgcggcattccgaaggaagaggtggaactggcgtttaaacgccatgccaccagcaagatcgaaaaaatacgcgatctggattccatcgaaactctgggatttcgcggagaagcgctgtccagcatcgccgccgtctcgaggacggagcttatcacaaaatccccggaggaaccggtggggacgtcggtgatcaacgaaggcggaaacatcctttccgtttccgacaccggctgtcccgacggtatgaccatcgtggtgcgtgatctcttttacaacacgccggcccgtctgaaattcctgaaaaaagacaacacagagagttcactgatcatcgactttatctcaaagatcgcattggcatatccgcagatacgggttcgtctgatcaataacggaaatacgctttttaccacgccgggcaggggagaccgatttctcgccatcgctacggtctatgatcctcatacggcggagaagatgattcgcatcaacgacgcggaagacgatatttttcatctggaaggatacatttccccgccggagcatacgagaatcaatcggaaaaatcagattttctttgtaaacggaaggtatgttcagagcaaagttatcgaaagagccgtctctgacgcttacaggcagagattgttcgaaggccgctatccggtcgtctttctgtttctcagtgtgcgtccggaactcctggatgtcaatattcatccgaacaaaaaagaaatacgattcgacgacgaagatcgggtcagcgattttgtcactgcagccatcaaaaaaggactcaatcagaaagatgcggtgggagaaattacctttcgaaaggacgcttcggaagaaagtccggaaaaaacggcagagatgaagaaaaagactctgtcaggcagcagaaacgatgagcagcagatcgatatccgcgccattctgagagaaaagcgcgcggagcaggagtatggcgcagatctcacagacaaaagaatctccggtccggaacgcttcgatccgtctgacagaaactatgtgcaggaccggagcagattcctgtcatctgccgaatctgcgtcggaggaagaagtttcttatcagatcccgtctgagcgttcggaagcttcaggtatgtataaagctcaggaatctgcagacgttatccgtgcagaatccgaaaagagtattttcgctcctcatatcacgcctccagaacacattccttttcagatttcggaaattcgtccggtaggggctatttttgcagcttacatactgggtgtcagcgatgatactttttatatgatcgaccagcatgcggctcatgaaaggatcttttatgaaaagttaaccagagaattttatggtcaacaaaccgcttctcagacagtcgcccttccgctgaaaatcgacgtgagccacagcgtcaaaaataaagaggcggaatggctgaagtttctgcaaaagatcggttttgagatcgaggagttcggtccgaaaaattatgcggtaaaagcatttcctatgtacatggatttcgaagaggcggaggtatttctcaccgatttctttgacagtctcgatgaaccgggtgcgttccgtgaccggcgcacggcggaaaaaatcattatgagagcctgcaaagcagcggtaaaggcaaacgaccgtcttgacgctgcggaaatcgatcagctgctgcgggatcttgcggcggcggaaaatcctttctcctgtccgcatggccggcctacgatcattaagatgacaaagagagagattgaggcgcttttcaaacgctgaatacattcaaatctttccacatatcgagaaaagattttggtatacgtttctgcctccgcagcagtgatcttttttcataaacagaaaacgggatctgccctccacgggtaagtgaaacagatgcgataccgaaatattcagaaaactgtaagaaaaccttaagaaaacagacttttacaaaagcaaagggtttgataaaatgaagaatagaatcatcccggtcatcgtcggtcccaccgcggtaggaaagacaaaatacgccgtacagatcgcccggaaactgaacggggagatcgtatccgccgattccatgcagatctatcgatttatggatatcggaagcgcgaagcctacggaagaagaacaggccgctgcgcgccatcatctggtggacgcagtggatccccgagaacctttcagcgtagcgcagtaccgtcacatggccaaagaatgcatcgaagatatcttccagcgggataagcttcccgtgatttccggaggaacaggactctacgtcaacgctctgatctatgacatggacttttccgcgccccccgccgacttggagcagagggagaaataccggaggacagcggaagaaaaaggtccgcaatatctgcacgatatcctcaatgacatcgatccggatgctgccgcgcggattcatccgaacaatgtcaggaaagtgatacgggccatcgaggctgcgaaatccggagagaaaattccctctttcgaaacgtctttccgcagtacgccggattaccgatgtattctcatagggcttcagagagatcgggctgaattatatgaccgcatcaaccgcagagtcgatcagatgatcagcgacggtctggaagacgagattcggtctctcatgtccatgggcctgtcctccagcgacatttccatgaaaggaatcggctataaagagatgatcgacgctatgaacggacggatcaccatggaagaagcagcggaactgatcaagagaaacagccggcgatatgccaagaggcagatgacctggttccggagatatccggatattcgctggtttgatctctcggagaattccgagatgacctgcgatgcaggcgccgcttgttccgcggagcggggtggaagtgaggaagaaatactatctctgattctctcctatatcagagaacaatcggaatccttccgttgacgacagtcccgcttttgaaataaccgggaccaccgaagcaacattatacaatcaaacgggtttcaattttaccccttactggtcggagctctgctctgatttatgccgaaacagaggggaatgcgttacatgcagatcgcaaaattccggcagacaggggacctctgtcaaagaatcagccggaatatggaaagaaagcggaaggatggaagaaaaaaacgaagagaaaaacaggggcgcagaaagaaaaacaggcggcccgaaagaaaagacgacaaaaaaagcagtttctgcggaaaaagagaagatccgcctgcagaataaaggaggaaagcctgacaatgtggtgctgaaagagatgcagatcgaagacgaatgcgccagactccagtcggaactgccctcttttatgcgcggtttcttcgcctatatgcgccagtctctgctttcgatgtccaggctggcgtatcttcacgatatccggtttttctgccagtatctcatcgatcacaccgatctcaccgaagcctcggagattagaaagatcaaagcttcggaattcgccgccatcaaaggcgcggacatcaatattttcatcgattactgccgcagataccgtgtggaaaacgaggaaggtgagattctggtctatgaaaacaataataagacgctggcgcggaaaaaatcttctctttccgtactgttcaaatttctctaccgggaagaaatcatccccgtaaatattacagatcagtttgatcccatccggattcagaaggtttccgaccgggaaatcaaggcgcttcaggacaacgaagtgatgatcatgctggatgcggtttccaccggagaacatctcacggaaaaagagaaacaatactggaaaaagacaaaaaaaagagacaaagcgattctcatcctgtttttgacttacggtctccggctctccgaacttcagcagctcaatgtctcttcttttaattttcaaagaggagaattcatcatctaccggaagagaggaaaagagtcggccatgccgctgaacaaccgcactgttctgaaagcgctccacgaatatatcgacgaagagcgaatgagcgaagagaaaatcagaccgggcagcgaggacgcgctgtttctctctctgcagggcagacggatgaccgagcggcagatccgcgaactggtaaaaaaatacacgtccatcgccctgtcaacttcccgttcagcgggttacagtccccataaactgagagctaccgcggcgacatccctcatcggacgaggaaattccatcttcgatgtgcagaaattgctggatcacgagcacgtgaccactacacagctttacgccggacataaactcagtacaaagcgcgatctggtgggcagtttcgaatgggatgacgattttgacaaataataaataatgaataatacacagaaagacaaaaatgaaggaaaaataatgcagaaaaatacataccggctgctgacagaaaaattcggtatttccgagaaagttctggaactgatcggcagagcagaggaaaaggcagcgggaaaattcgccgaactggacgatatccgcgcatacaaccagtataaggtactggatatctttcgaaagaataaaatcagcgaccgtcatttcgcctggaatacgggctacggatatgacgacgcgggcagagaagcgcttgagagcgtgtacgccggtgtcttcggggcggagagcgctatcgttcgcccattgatcgtcaacggcactcatgccctgacgctgacgctgacaggaattctgcggccgggagatgaaatcgtctactgtaccggagcgccttacgatacgctggaagaagtcatcggcatccgcggcgaaggaagaggatcgctgaaagaattcggcatcacttaccgtcaggtagatctgctaaaaaacggcagaatcgatcttgaaggcgtcaaacaagtcatcaatgacaagacgcggatgatgtgtgtccagagagctaccggttacggctggcgcagagctattaccatcgacgaaatcgaagaatgggtcgcagtggtaaaatctgtgagatcggatataatatgtatggcggataactgttacggcgaatttctcgacatcaaagagcctaccgatgtcggcgtcgacgtcatggcaggctcgctgatcaaaaatcccggcggcggcatcgctctggccggcggatatatcgcgggccggcaggatctgatcgagctgatctcctatcggatgacctctccgggaatcggtaaggagtgcggcctgatgttcggtcagacaagaaatatgtttcagggattcttcatggcgcccaatgtggtaaacggagcagtgaaaggggcaatgctctgcgccgcggcttttgaagaactgggtttcgaagtctgtccgacctcagccgaggatcgcagtgatatcatcgaagcggtaaaactcggttctccagaagccgtcatcgcattctgcaggggaatacagagcgctgctcccatcgattcctacgttacgccggaaccgtgggacatgcccggctacagtgatcctgtgatcatggcggcgggagcctttgtacaggggtcctcgatagagctctccgccgatgctcccattcgtgaaccatatatcgtatacttccaagggggaattacatacgaacattcgaaattcggcgtgatcaaagcgcttcaggcgctctgcgacgaaaaactcatcgatctttaattctgtctgccgccgttggccgcggatcagacgtgaagccgaaacgaatacttccggaataccggattttgttttcggcattcggcctgggacaaactaaagcaaaaggggaaataactattcgattcaggggattataagacatgaaaaaaaacaaaacaaaaacggcggcggaagaaccggaatataagatgaaaagaacgaatatgagccgatccaaaaagatcttgtcgctgcttcagtttgcgttactgctggggatcatcatcggaattcctgcggcgctttatttctgcaatccggagatcatcgaaaattttaaatcgatcgataagttcaacgcgtggattgcggattataagggaatcggccttatcatctatctcatctgtcagatcgctcagattgtcatctgtgtactgccggggcaggtaattcagattgcgggaggatatcttttcggatttgtggtgaccttttttatctctatcatcggagccgtcatcggtacagtgatcacgttttatctggcaaaactgctgggaagaaacgcgattatgcttatctgcggagaacagcggttccacaaataccagcgcattatgtccacacagcgcgccagaaaaatcatatttctcatctatctgataccggggcttccgaaagaccttttggcgtacgctgcaggcgtgtccggtatcaacgcgctggaatttacatttttgtcgatcatgggaaggattcccgcgatgacagtttccattctcttcggcgtgagtctgtattctgacaattatctcagcgcagttctgattgcggcggcgatggcggtcgttcttctgatctgttttatcaagagaaaagctctgacagactttatcgaaaaggcggaatcgaaaacatctgaaatttatcgttcaaagtcgcaccgccgccgcgacagctgagcggcggcgatttattatacaagagaaacaggatgacgggtttgctgtttatccgtgctctgtttcgtttttttattcagacgacaacttgcggacgatacaagtctatcaattgataaggagaattcatgcaggcgatattacttaatttattcttgctggcagtgggatttctgctgcttgtaaaaggcgctgattattttatcgacggcgctaccagcatagctttgaaattccacataccgatgatcgtcatcggtctcaccgtagcggcattcggaacatctcttccggaagctgccatcagtatcaatgcggcgtttaaggaaaatgccggtatttccgtcgggaatgtcatcggaagcaatatcctgaatatcctgctgattctcggactctcagcctgtatcacgccgctgacagtgagaaaaaatacgattcggatcgaaattcctctggtgatcggcatcagcgtactgctcaccggcgcaggagctcttttgggagaacttactttcttctgcggcatcttgctatggatactctttatcgcatttcttgtctatctcttctgcctgacgaaaaagggcgacggaaatcccggagcaggcgccgggcaggcaccgctcagcaccggccgttcgctgttctgtgtcatcataggactcacggccatcgtcttaggaagtgacgtagccgtagacagcgctacagtcatcgctaaatacatcggtgtcagcgacagggtgatcggtcttaccgtcgtggcgttcggaaccagtcttcctgagctggtcaccagcacaaaagccgcgctgcgaggcaatgcggatatcgctgtaggcaacatcgtcggcagcaatatcttcaatatcctttttgttctcggcacttccagccttctgactcctatcgcattcagtcagaaatttattatcgacggcatcgtctgtgttgcctccgccgtgctgctgtacctcttctgtgcgaaaaagcaaatgctcacaagaaaacacgggctgatcatgctgctgctgtatgcggtttactttatctatctcgtaatgaggtaaagagatacaaacaaaaaggcagcgtgaacacgaaaaatgacaaaaataaaaaaactccgcgggattacgttttgaatcccatggagtttttttatttaccgctgtcagactgcacccgtcgatgcttctgttttgctccggcggatttctctgttttaatctcattctgtaaattcaatacgcatgccgtccggatccgcgacggtaaaatgtctcggttttgggggagtatcgctgatatccgaaagggagagacccatctcagccaactggccgtgtttttcttctaatcgtccctttgcggaataactcatcacgattccttttgtctctactgtttctatgttcttttcgggctgaataaattccaaagttatgctttcttccgcatccgacataaaaacaatgcggccgatttcaggatgaaaccttctcactacatgcatttccactgcacgctgataaaaatcaatactcttctcgatatccctgaccaacatcgtaatatagttcaatttcatactgacgcctccgtattcgtatttccgcttgcaattattcttttctctccgctgtttgtctgtccatcaagtccgcattgtatcgtttaccgaagccctcattatccggaacttcacgccgacagacagaagtttaataatttattatatcatgaatttttatactgccggcgtacaggtttacatgatgtgacaatttcttctctgctgctgcaccgtattccgctgaaaacaaaaaacagaacaaatgttcatatttttcttgactgcaaacttttgttctgatatattatttttatcaaacaaatgttcgatagggaggaaataactatgctgaaacattatagaattaaatccgcaccgcgttttatcacttttattacaatctgcactctcactgtgatctttgctttcatctctgttactggaataaataatgcagaaggtctttcggacgaaagcgccgctgtgcagtatcagcaagtagaggtccgctgcggtgatactctgtgggaactcgctgcggaatacggtccttcggataatgatatccggaagacggttcatgcgatttgtacgcttaacgatgtggaagcaggcagcatccgggagggagatatacttctgattccttctatgatatgaatatcgaaagctatgatttactgcagatgaaaaagatgcaatatcgtttttctgagaaaagaagttttattgttatcgacgttatcgactgaaacgaattcagctgacggatcattttcccgtaatcactgatttacgccttcaaattttaacatttccgacgggcttctgtgaaaattaccattttcacagaagcccaaaaacggaacctgccgctctgcggcaggcgattcttatactaatataccattataccatcaatacacaatcagaggatcggatcatgaaagatgatccgatcctctgatttttccggcgatcttttcggtctatataagattatgatataattaattcatcatcttatcttattcaatatcgaacaatcgatattgaaacgacagactttatgatcgctggccgatactgcaggaatacaccggcagcagtgtaatttacagcaggcaggcagtcggcggagcggagaaggagcagaaaatgacaaacgcagaattacgcgaagcattaaagagagaaatctccatccctcatgaagagttgaaattcaaacatcctaccgtagatgacatcggtacggaatttgtagattatacggagaacggagaacttactctggcatatcctctgaagcctgagcagcgtaacggctatcagcttcttcaaggaggttatatctccgtatttttcgataataatttcggacttttcggttatgtatctacaggagcacagccgcttcccacagtaaatatgaccctcaattttcataaagccgtactggaagatacagacaaactctggattacgactcgtgtaacctccgcaggcaagcggatattgtccatgtccggtgaagcgagaaacgccgccggtcacctgatcgccacctgtcagacaaatatgctcaatgctacgggagcgcgcatctatatttaaattcctgtaagaacagatacagggcgcagaccgttatgattattgataatgcaaaatccgaaaaatcaggaagttgcgagaagagtttactcaactattcccaaaatttatattttaggaatagttagatttcgaacttctccaattttcctgatatccctttatatctcttttcttttaatttaattaattatgtgattatcttttcgcctatccctatttgatttgccgcccgagtctcgttcagaactgctttcccttacctttttcaattcctctcataaccgtttctccgtccgcgcagtttttccggtaacatgaactataaaactaaagacttttgggaattcgctgaattcctctaaaaaacggaatctcaagccgcgcgcaaaaagaataaaaaataaatttattttattagttataagacgattttcgtcaataaaataaataaatttatttt

SEQ ID NO: 428 - DNA, 13256 bp, Unknown
  16S sequences of unknown bacteria
ctcgctgaagacgatgttgatcagcagcaggacgatcgccgccgccgccataaaatgccgggtttttatgacccgatccaggtctctgagataaagtcccagcgctgtgaacaggagaattccgagaagaatggaaatcgtctgtttgtacatcgcgttctgaagagcggtggccgtgatagccagattgagagaacaggcgaaaaaagccagaatctccggctcgaatccggtctttcccatagaccgggacaccagtacatagatccacatgacggcgcagagaattccgtaagatatcgccgtttcctgccggatttccggtttggaaataaagagctgaatgacggtcaagaactgaaatacagtgatgtatacaaaagaagtccacggcggaagcggtttgctcttgcggatgcgccgggccgtgttctgctggtattccagttctgtaatcgcttcgaagcgcaggtcggcgccgccgatggtaacggtatctccgtgtcgcagcggtctgtcctccgttaactcttctccgttgaggcaggtgatatttttatccgagagattgtgaattctccactccccttcatcgtttcggatcagcgcgcattgtgtttttgaaacggtggccagtttgatccggacgtcgcagtgcttggctctgcccaccgtgcattcccagtggttgatggagaattttcccagatcgggagacagcagatatccccaggtttctttggggttgcgcacccgcagcatgctccgcagcacggtgatgaggatatggagcgccagaagaggcatgacccaacggataatccctgtgtaaatctgcccgaaagacagggagccgtcggtaaaactgctgaaaaaataaccgacgattccggctaactggctgaaaaactgtccgataatgctgcccagctgaggcagaatatcggaaagactgttctgcagactgtcgagcgtttcactcatatggaatgacctcctttcccggtgtcacactgtcgctgttgtcgaaaacgggagcttccgccgcgaacggttcgctttcttttctggaaataatgacggaaaaatattctgccttctccggaaaatcctccagccgggaaaaagtctgctcctcatctctcccgcagtttaccgccatggatgcggtccgtctggaccggcgcagcgcttctgtcacggcggtatagtctccggaaggtttcatcagcacttttgtgccggttcccgagagaatgccggagatatcccgcccgccacgagtcggttccttctctgataaaggaaaagaaggtaaaatttccagagtttctctgtcttcgcagagaatttctccgagactggcagcagcggcgcagaaagatggaatgccgctgacgatgcgcgcatcaaatccccgccgcctgagaatattatgtatataaccataggtggagtagatcgacggatctcctatggtgagaaacgccgcctgttttccttccgagagaattttagctatgatttccgcgtttttctcctgctggattctgcgtttttctctgtctcggaccatgggaaagggcaggcagatcagtcgtttttctctgatctgcggaaaagccctttccacagtctggtaggacgcgcagtctttcggatcgtcggcgggaatgacgattatgtcggattcccttatgattttcagcgctttcagcgtcaggagttccggatcgccgggccctgtgcctacgccgtataaaatgcctttcatcgtttccccctcatttccccctgtgagatttatgatatagcgccgctgtccttgcgcctgtccgcggtttgcggcggcgcagcatgttaggggatcggttcctcccctgaagaccggctgaaacctacaattaataataaggtaaacagacgcccaatgcaaatgatgtttgcgtcgaaaaggcggaaaagacgaaacgccgcgcagagcggtgaaaactcatgtttcggatcgtaaacgcagatcgggcggcgggagctgggcgttgtgcagaagagctgaggaaaagggacagccgtgtatcgggaaaaaattcacgctctgtcagcaggggccgctgtgcggcgggatgggaaaaaagagaaaaggttgatctgtcaagtcgttgctataaatcggaaaacatgttatattgaattctgaacggggttgtccggcccgtaccgggcggaacctcaaaaagagcataatttcaggatcggagaggtggttatggaacctaaatataagcgagttatcttaaagatcagcggggaagcgctggcaggggacaagcacgtcggtctcgacgaggagatgctggacaaagtcgctttggaagtaaagcagatccgcgatatgggcgtacaggtcgccgtcgtcgtgggaggaggcaacttctggagagggcgcaccagcagcagtatggatcgttctaccgcggattatatgggaatgctggcgactgtaatcaattcactggcgctgcaggacgcttttgaacgcaatggtatgccgaccagagtgcagacggcgatcgagatgagagaggtcgcggaaccttacatcagaagaagagccatcaatcagctcaataaaaatatcgtggtgattttcggcgcaggaatcggaaacccgttcttctccacagacaccacagcggccctcagagccgcagagaccgaagcggacgtcattcttctggccaagaaagtggacgccgtatacgacagtgatccggagctcaatccggacgccaaaaagtacgatacgctcacacatcaggaggtcctggagaaagatcttaaagttatggattcgacggcggcttccatctgccgggacaacggcatcgtcatccacgtgttcgccctcgggcagcagggcaacgtcgtcaaagcggtctgcggagagaagatcggaacattgatttattagcgattccaaagagagtaataaaggagtaaatatcatggaaaacgtgaaaaagaattacagcgaaaaaatagaaaagacgctggtggttctcaaagaagatttgaatactgtcagagccggcagagccaaccctgcgattctcgacaagatcagcgccgaatattacggtgttccgactccgctgaaaagtctggcgaatatttccgttcccgatccgagaacactgatgatttcccctttcgatgtgtccagcgtaggagccatcgaaaaggcgatcaacgaagcaaacctcggtctcaatccctccaatgacggcaaggtaatccgtctcatcattcctcagctcacagaagaacgccgtaaagaactgacgaagacggtgaagaagatgggagaagacgcgaagatcgctgtcagaaatctcagaagagatgtcaacgacaaagttaaaaaaatggaaaaagacggagaactcaccgaggacgaactgaagaaagggctggatcacgttcagaaaatgacggatgacgggatcaagaaaatcgatgagatgatctccaagaaagaaaaggaagtgctggaggtataatgcataatatgcgcatcctgcccgatgtagccggtttgaaaatgcctgctgccgccgaaatactcggcgcggcaggcgtatcttatagaatcgaggaattacggcctcacgcggtcagaagaacggaaagtgaaaaagaaggagagatgagagtagtgcggcagcgggagacggcggatcacactctcattttatctatctgcagtatttacgagtaagcgtacgggaggtattatgtcagttccaaatcacatcgccatcatcatggatgggaacggccgctgggcgaaaaagagaggactgccccgggtgatgggacacaatgcgggaatgaagtcgctgaaggagatcgtcagagcctgttctgatctgggagtaaaatatctgacggtctacgccttttccacggaaaactggaaacgtccggaagatgaggtcagcgggatttttaaaatcatggtaaaatatatcgccaaggaactggcggaactgaaccgcgagaacgtgagaatccgtgtcttcgggcagtgggaagccatccctgaggaagccagagagagcatggagctcgccctcgcacagacagaggcgaacacgggtcttcagtttaatatcgcgctcaattacggaggaagaaaagaaattctggatgcggtaaagaagctgtatgcggagaccgaagcatccggcgcgaagatcgatgatcttcgggaagaggatctgcagaggcatctgtccaccggacagatgcccgatccggatttgatcatccgcactggaggagaattgcggctcagtaattttctgctgtggcagtgcgcttacagcgaattcgtattccgtgatatattctggccggatttcgacaaaaaggagctggagggctgtattgaggaattcaatcagcgccacagacgttacgggggcttataattatgaagacgagaattatatccggtctggtgatggcgccgtttctgatattggtgatcatcggcgggccgctgatttctattttatgtctctttatcgctctgatggggatgagagaatttttcaacggatttaaggcgatggagattcacgcctgctatcctgcggcggtaatttccgtactgctgctctatggggtgcactgtctgcagggatggaaaatgctggaagactatcagacggtgcctctctatatggcctggctgttcgtatcggtgctcatgtgtctgctgtatctgtttaaaatcgaggagcgcaggctggaagacgcgctggtgacgattaccggaatcgtatatatcggatttttctcctatcatgcggtgctcaccgaattcagttatagtgagctctgcaaggcttcccccgtatggctcattctgatcacggcgttctgcaccgatatttttgcttatttcggcggattttttctgggccggcataaactgtgtccggtgatcagtccgaagaagaccgtggagggatcggtctgcggaattcttgggagtctgattttttccatgctgttcggctggttttttatggaccgctctttgctctgggcctgcggggtcatcggcatcctcggcggtatcacgtcgcagttcggtgatctgactgcctctattttcaagagaaagatgggaattaaggattacggcaatctcataccgggacacggcgggatcatggaccggttcgacagcgttctcttcaccgcacctaccgtctattactgccttttcttcctttcggaattcgcgaaataggaatttgcggatgcagaatgatttgcagacgcggaatacggattccggcggcaatccgttcccaatgaaaattgaaatcgaatcggcaaaggtgaaacgactggtaaggatacgcagaaggaagtccgttccgcacggaaatcgaaacgttatgagacagatttgacagcacaagataaggcgggaattatgaaaagaatttcgatattggggtctacgggatcgatcggaacgcaggctcttcagattataagggagaatccgcagaaatacagggtctgcgctctgtcctgcagatcgaatacggaacttttgaaagcgcagacggcagaatttcgtccccagtatgcggtggtttctcaccgggctgaggcggagtcgctgcaggaggaaatgaaggagacgggtactcgcttcttgtacggagaggaagggctggtgaccatcgcttccgctgtcgactgcgatgtcgttcttaatgcgctggtaggaatgtcaggcctgaagcccacatataatgctgtactgcggaaaaaaaacgtggctcttgcaaacaaggaaacgctggtggcgggcggagaactgatcatgaagaccgcagcacgcacgggagcggtaattcttcctgtagacagtgaacacagcgcggtttttcagtgcctgaaagggtatgacagaagtcaggcggagaagattatcctcaccgcttccggaggtccgttccgcggaaagaaagcgaaggatctgaaatcagcgacactttctcaggcgctgaatcatccccgctggaaaatggggagcaagatcaccatcgattccgccacactgatgaataaaggatttgaggtaattgaggcaaaatggcttttcggcatggcgccggaggctatcgatgtggtggttcatccggagagcatcgtgcattccctggtggaatactgcgacggagcggtgatggctcagctgggactgccggatatggcgattcccatcagtctggccttcgaatatccgaagcgtctgcctaaccggctgccgcgcctcgatctgaagaaggcgggatcgctgactttcgaagctcccgatatggaaacttttccctgcctgaagttcgcttatgacgctctgaaagcgggaaaaacttactgcgccgctctgaacgcagccaacgaagtggctgtggcggcgtttttagaggaaagaatcgcattctgtgatatttcggactgtctcgatgaagtgctccagagacacgttccttctgagagcggcgatctggaatcgatcatccgcgcggacgaagaagcgcgcagaatggcgagacatatactggaggtttaaaagatgcacatcattgtcggcattatcgctgcattaatcattttcgccatactggttatcgtccacgaaggcgggcatttctttacggccaaagcggtagggatcaaggtcaacgaattcgccatcggcatgggacctctgatttttcagaaagagacgaaagagacaaaatacagtgtccgggcatttcccatcggcggctatgtggctatggagggggaggattccgagtccgacgatgagagagcgttcaacaacaagcctgcatgggcgcgggcgctggtgatcgcagcggggccggtgatgaatttcatcttggcggtggtcgtgctgggcgtgatgatcacgtatatgggcacctccctgagtcctgtgcttgcggatgtgacacagggaatgccggcttatgaagcgggaatccggaaaggagaccgaatcgtttcggtcaacggagaaaatgtttccgacggaacggagacgagagaactgctgtcggaagccatggcggaatccgaccgtgtatccgtaggcgtggagtccggcggagagacaaaaacacttcaggtgggagtggaacaggatgcggacggaaaccgcatgatcggtgtggttttcgatgtaaatcataatattatcgtgggaatggcagatggattgaagagcgctgtggctgcggaaaagctgatgtttgaagcgcttggagatatcatcaccggtcagggtgcggcaggggacgtggtcggtccgatcggaatcgtaaatatcgtggatcagagcgttcaggtgggactgatgaatgtgatctaccttctggctctgctcagtctgaacctggctctcgtcaatatcctgccttttcctgcgctggacggcggcagactgctgtttatcttaattcggaaaattacgggaaaagcggtgagcgatgaactggaagggaaaatacaccttatcggcatggcgattctcttttctctgatgatatttattacactgaaagactttaatatgttcattcttaaaaattaaatttctgcaggaatcggcaccggaacagaaggagctgagattcggggaaaaacaaaagcaaaagtgcagactttgctgcgaggcggggtcctgtgtgtatccggaaagagaaagaagctgtagtgaggaaaggaggcggattatgaggagaatatcgcggaaggtggtttgcggcggcgtcgtcatcggcggcggcgcgccggtggcgattcagtctatgacgaataccgatacccgtgacgtgcgggctaccgcagatcagattcgccggctggaggaagccggatgcgagatcgtccgggtatctgtccccgatcagcaggcggctgacgcgctgaaagagatccgaaaattctgccggctgcccttggtggcggacattcatttcgattatcgtctggccgtggaatccatacgaaacggagcggataaaatccgcatcaatcccggcaatatcggcgcagaagaaaatgtttcagctgtggtgaaagcggcgaaagaacgccggattcccatccggatcggtgtaaattccggatcgatcgaacgggatctgctgaaaaaatacggcggcccatgcgccgaaggactggcggaaagcgctctgcgaaatgtgcagatggtcagaaacatgggctttgaggatatcgttctctctgcaaaagcttcggacgcagtgatgaattatcaggcacatctgctgatcgcggacaagaccgactgccctcttcatatcggcgtcaccgagtcgggaacgccgtctgtgggtattgtcaaatctgcggcgggactgggggctctgctcttagcgggaatcggagatacgatccgggtttctctgacagcggatcctgtaaaggagattccggtggcgagagagattctgaagagcacgggatattttccgggcggcatcgatttcgtatcctgtcccacctgttcccgctgcaagaccgatctgacgagaattgccgacgagatcatggcgcagctgggcggcatcgaaaaggacatgctggaaaaaaaactgccgcgtctgaaagtggctgtcatgggatgtgcagtcaacggtccgggagaagcttcggacgccgatttcggtatcgcctgcggcgatggaaagggcgtttattttcgcggaggaaagatcgtaaagaccgtggcggaagaggaaatcacagatctggtgatatctgagatacgacaattcgtttcagaaatttatcattcttaaggaaaataatacaaccaaaagacggataaaatgatatggtagaagcagaagagttatttcgctgatgcggaaagggggaaccatatggatattagtttgttcggggctgtcgtcggtgtgcctgtgatcgcagtatggctcgccgtcgcggcagttcttgcggcgatcgaggcgtttacacagggacttacgacaatctggtttgccgggggcgccgtcgcggcggccggcatggcgatttttgtggacagttttctgattcagctgctgacagctctgatagtttccgcgctgcttctgtattttacgagaccctgggcggtcaaaaagttcaacagagatatcgtccggaccaatatcgcggcggtcatcggtcagacgggcgtactgcaggatgatctgaaggccggcgaacagggtacggtcaaggcggataataagctctggacggctgttttagcggaaggcgaagaggcggtaaaaaaagaagaacgagtggagatcgtagcggtagagggtgtgaaactcatcgtccgcagaaatatttccgcggatatgcagcggtaacgtccgccttttgcacgggtagggagatattatttcagataaaagaaaaggagagacgatatgtttattttcttaatcattttagcagttatcatcattgcgctggtggttacgaatatcagaatcgtaccgcaggcaaacgcgtatgtcatcgagcgtctcggcgcttatatggggacctgggaagtaggtcttcacatcaagattcctcttatcgacaagatcgcaaaaaaggtttccctgaaagaacacgtgatcgattttccgccgcagccggtgatcaccaaggacaatgtcactatggagatcgataccgtgatttattttcagatcaccgatccgaagctctacacttacggcgtggcgaatccgatggcggctatcgagaatctgacggcgacgacgctcagaaatatcatcggagatctggagctggacgaatccctcaccagccgtgagatcatcaattccaagatccgcatcgttttggacgaggcgacggatgcctggggcatcaaaatcaatcgtgtagaagtgaaaaatatcgttccgccgaaagatattcagaacgctatggaaaaacagatgagagccgaaagagagcgtagagaagcgattctcaaagcggaaggggagaagaaatctgccattctcatcgcagagggtaataaacagtccacgattcttgaggcggaggcctccaaagcggcaacgattctcgaagcgcaggcggcgagagaagcagctgtcgcagaagccgaaggtcaggcggaggcgatccgtctcgttcagcaggctacggcggacggtatccggatgatcgtagattccgatccaaatgagaaagtcatctctctgaagagcctggaagcctttacggcggcggctaacggtcaggcgacgaagattatcattccttcggaaatccagggactggctgggctggcggcttctctgaaaggaattgtagaagaagacagagcttaaaaaaccgaaacgggaacaaacggataaaaggcgattatgaaagagtttatcgaaaatcatatcacctgggagaaactcgccccccatgagaggggcgagtttcttctcagcgtggaacacgcgtcggtcattcgtgagacgcagaaattaaatatcgacatcgcgctcaattttatcattcctcacgatgatctgaaggtggttacagcggcgttctgccgtgaatttcagggtcttgcggatgtatcttaccgttttcggtacgatgatccggtgctcagcgaggaagaactgatccgcatgtatctgccttatatgatggattccatgtccgatctgggccgtctgcggcacaccacagacacgggcagcattctgatcaatggcgatcaggtcatcgtgtatgcgctcggagagcagaccgtgcgcagtctcaacgaaatcgcggctcctgccatggccggcatgtttcagcacgatttcggcatccgcaaaatgttcgtctttcgaaacaaagatgaggaatacgaagaaaaaattcacgagatgcaaaagcagacagaaagtgaattgaaacgcatgcaggaagaagccgagagagcagcgcgggcggcaaaagcggcggaaattgcgtcaggcggttttgcttccggagcttccggcggaggaaacgggaaaaccgcggtcggctggaacggaggcggttcgggaagttccagaaacggagcgccggccggccggaagcgaggctatgaggggccggttgcgggaaatcggatcgtgggcaagccgatcagcggcgaatccgtacatatcagagatctgaccagggacagcggaaacgtgatcatcgaggggagcgtctttcggacggactcccgttctatcaaaaataatcgctgtatcgcctcgatttacatgacggataatacggactccatcctggtgaagatgtttgtgtcgacgcaaaagcaggcggacttcgatgaacatatcaaaacgggcacctatatcagagttcagggaaactgcgagtttgactcttttgagaaaatgaacgtcatcatggcgcagagcatcgaaaaagcggaaaagaaaatgcgggaggataagtctgcgagaaagcgcatcgaacttcacgcgcataccaagatgagtcagatcgacggcgtcatggacgtagcggaactcatcggcacggcgaaagcctgggggcatccggcggtagcggtcacagatcacggcgtggtacaggcctttcctgacgcggtaggcaaggcgaaggggatcaaagtaatctacggcgtggagggctatctggtggaggatattcctctgccggacggaaaactggactataagacgaatccggcccgtcatatcatccttttggcgaagaatcagacgggcatcaaaaatctgtataaactggtttcctattcctatatcgactatcattataaacggccgagaatgccgcgttcggagatcataaaacacagggagggactgatcatcggctccgcctgtgaagcgggagaatttttccgcgcggtaaccgccggcgcatcggacgaagaactgatgaagatcgcggagttttatgattatctggaaattcagccccgctgcaacaatcgctttatgctgagaaaaggcatggtgaacagtgaagaagaccttctgaacttcaaccgcaaagtggtggaaatcggccgccgtatgggcaaaccggtggctgccacctgcgacgctcattatctcaatgaagaagattatatctaccggaatatcatcatggctgcccacggctttaaagaactggatgaggaacccagcctctatctgaagacgacagacgagatgctggcggaattcgcttatctgggtgaaaaagaggccgagcgggtagtgatcgatgatccgcaggctatcgcggatatgatcgatgatgacgtgcggccgatctcggatgagaagtgtccgccgcagatcgaaggctccgaagagcgtctgcggtcccgctgctacgacaaagctcacgagatctatggagatccgctgccggagatcgtggagcagcgtctggaccgtgaactgacatctatcatcggcaacggttacgctgtgatgtacgtagcggcggaactgctggtgcagaaatctcttgccgacggttatctggtgggatcacgtgggtctgtaggctcttctttcgccgcgactatggacggcattacggaggtaaatccccttcagcctcattatatctgtccgaatccggattgcaagcacagtgaatttcctgaagattacgaatcggactgcggcgtagatctgccggataaggtctgccctgtgtgcggtacgccgtatataaaagaaggacacaacattccgtttgaagtctttcttggattcaaaggtgataaagagccagatatcgatctgaacttcgccggtgaatatcagccggtggcgcataagttcgtcgaggagattttcggcgcggaaaatgtattccgcgcgggaaccatcggtacgattaaagacaagacggccttgggttatgtgagacgctatctggaagagcgcggacgggtggccaacaagtgcgagatggagcgtcttgctctgggctgcagcggcgtacgcaagacgacgggacagcatcccggcggtatggtcgtagtaccgcggggcagagaaatctatgagttctgcccggtgatgcatccggcagaaggttctatcaaagacacgatcactacgcat

SEQ ID NO: 429 - DNA, 3161 bp, Unknown
  16S sequences of unknown bacteria
ccgcccccgcgctttgacagtcggttcactccttgtcgttgaggcaggcgatgccgggaagcaccttgccttcgaacagttcgagggaagcgccgccgcccgtggaaatgtgcgtcatcttatccgcgaagccgagctgctgtaccgccgccgcgctgtcgccgccgccgatgatggtcgtcgctttgccgtacgcgtccgcgagagcctgagcgaccgctttggtgccttccgcgagaacggggttttcaaacacgcccatggggccgttccagatgaccgatttcgcgtccgccacgacggcggcgaaaagctttctcgtttcgggaccgatgtcgagtcccatcatgtccgcggggatcgcgttcgcgggaacgacggtcgtttcgagcggtgcgtcgatgggatcggggaacgcttttgccgcgacggtgtccacgggcagcaccagctttttgcccaacgcagccgctttttcgagcatttccttgcagtagcccactttttcctcgtccacgagggaagtgccgatggagccgccctgcgccttgacgaaggtatacgccatgccgccgccgatgacgagggtatcgcatttttcgaggagattggagatgacgttcagcttgtccgccactttggcgccgccgaggatcgctacgaagggacgctgaggattttccagcgtgtccgccatgacggaaagctccttttcgatgaggaagccgcagaccgccgtctttacgagtccttcttcgacgatgcccgccgtggaggcgtgggagcggtgagcggttccgaacgcgtcgttcacgtatacgtcgcagtagcccgcgagcgcctgcatgaagtcgggcgccttcttttcttcgcccttgtggaagcggaggttttcgaggagcacgcattcgccttccttgcacgcggccactttcgctttggcgtcctcgcccacgacgtctttggcaaacgtcaccttgccgccgagcagttcgttgagtcgggctgcgacgggcgcgagcgacagttttttgacgtcctttttcgccttttccagcgcttcctcggtcgcctttgcctgttccgcttcgggcagggcggcgattttcgccttttcctttttattcagttccaccttcgcgtcgaatacgttgtgcggcttgcccatatgcgagcagaggatcaccttcgccccctgttccatcagatattggatggtggggagcgcgcccacgatacggttttcgtcggtgatgaccccgtccttcatgggaacgttgaagtcgcatctcacgagaacttttttgcccttgacgtctacgtcttttacggttttcttgttcataaaaaagagatctccttgatttagtttttcatacggttatataataccccattttttccctgtttgtcaaccttttataaaaataatcccgaaaagtttttgataaatctgttgacaagcgcttttcggtatctttcggtatcttaatatagtaatatcgattcctgacaaaatccgcaaaaattcttttacggacttgacaaaaaaggaaaaatccgctatactgtcaaacgagaaagggcaaaggagataactgccatgaaaaccgttcttttgggaaagacgaaaaatttttttaaagcgaatctgcatatgcacacgacgatttccgacggacagatgacgcccgaggaagtcaaagaggcatatcgaagcaacggatattccatcgtcgcgttcaccgatcacgacgtcatggtgccgcacaacgatctgacggataaagatttcctcgccattacgtcctgcgaaatggagatcaatcagcccaatcccgagaacgatttttcgctcatttccacctatcatcttaactttttttccaaagatcccggggcggaaacgctcccctgcttttcgcagcggtacgtatggcttgcccattctaaaaaatacgtcaccgacgaaatgcggaaaaccgattacatacgggaatattccgtcgaatgtatcaacgatatgatctccaaagccaacgcggcggggtttctcgtttcctacaatcatcccgtgtggtcgctgcaaacccgcgacgactacgcagagttaaagggactttggggcgtggaatgctataatacgggctgcgcccgcgcgggaatgaccgacaacgagcagcccttcgacgacctgttgaaaaaaggcaacagaatttttcctctggctacggacgacgcgcacacccgcagggatcttttcggcgggttcgcgatggtggacgcggagaaattggaatacgccgccgtcatgcgcgcgctggaaaaaggggacttctattcttctacgggacctttgatcctcgaactttgcttcgaagagaatcaattgtccgtccgctgttccaaggcggtgaagatcgttttgaacacggacaggcgcttcgccctgacgatcgcggcggagagcgggaaaactttggagggcggaactttcgatctctcggaatttctgcggggggctttggcgcacgatacgacgcggtatcccttctttttccgcgtcaccgttgtcgacgaacgcggcgacaaggcgtggacgcgcgcgtattttgaagaggatctgcgggagagtctgtaagccccgccgagcagaaaaaggggaaatttccaaataaagccgcgttgtccgccttttagggagccgtttttgtgaaaaagggaaagttttacaaaaattttgctccaaatagttgacaaagcggttttttcgtgttaaaatcagtaatgctgtaatgcggaaagggggtatttcgccctttttgtccgtttttacggcggaaaagaccggggcggacaaacccgccgaaggggccgaaaaagcgcggcgccgttcggaagatcgccgccgcggctcgtcatatcgctttctttaaattgcgtaagggcaatttcgagaaatatattccaaaattcttacaaggaggtcaagtaaatgcctactatcaaccaactcatcaagaaaggcagagaaagacagattttcaagtccaagagtcccattttggacaactgtcctcagaagcgcggcgtatgcctgtccgtcaccacgacttctcccaagaagcccaactccgctttgagaaagattgcccgtgtgc

SEQ ID NO: 430 - DNA, 12935 bp, Unknown
  16S sequences of unknown bacteria
gtgctgtgttttttgggggacagggcttctctgcaatctcgctgcggcggaaaggcggaactgttatgcaaaagacctatgtactggataccaatgtgctgatccaatcccccgaggcactggaggcctttgaggacaatcacatcgtcctgcccctggcagtgctggaggagctggacgggctcaagaatgccgaaggggaaaagggacgcagtgcccggcaggtgatccggttcctggaggaactgcgcagccagggcagtctggtggaaggggtatccctgcccggaggcggcaccctgcggctggaggtcaaccatgtgggggtacgcctgcccgacggcatggaccccaccagccgggacaaccgcattctcaaggtatgccgggggctgtgggaggacgggaccccggcggtgctggtgaccaaggatattgtggcccggatcaaggcacagatgatgggcattccggcggaggatttccgggcggaccgcatccccgaggagcagccctataccgggcggcgggaggtctggctgcccgatgccagcctggacgccttcaagacccagggggcggcgccggaggaggcctacacagtggacgatcagggtgtccggcaggaggtggagctcaccgagaatgagttcctgctgctgcggtcggacaccgacagccgcaagaccatgctgggacggtatgccggcggacggatcacccggctgcggtacggacaggtgcggcccttcggggtgcggccccggagcgtgggacagcagttcctccaggaggcgctgctgcttccggcagaggaggcaccgctggtgattgtccagggcccggcaggcactgccaagaccttctattccctggcagcgggactggaacaggtgctggagcagtcgccgccggcctaccgcaagatcctcatctgccgccccaatgcccagttcgaccaggacatcggcttcctgcccggggacgaacaggagaagatctccccgctgctgcgtccggtgatggacaatctggaaaacctgttcggcggggacgccggggaacaggagcgccggagccggatcagctacctctttgatgccggggtgctcaccgccgaggccatgaacttcatgcgggggcgttccatcaccgatacctggctcatcattgacgaggcccagaacctctcgccccggcaggccaaggggatcatcacccgggtgggacagggcaccaaggtgatcctgctcggcgaccccgaacagatcgacaaccccctgctgggccggcgcaccaacgggctctcctatgccgcggcccgcatgaagggcagtcccctgtgcgtacagctcaccatgcagcccgatgagtgcgagcgttcggccctggccctggacgctgcccgccggatgtaagcgatatttcccccgggagccggttcccacgccggtgcccgggggatttctgggagaaaaagtgaccgttcggtcaatccgtgttacaatggagccaaaatcagtgggaaaagggggaatttccatgcggcgggaacttcagaccgagcagatgcgccgccggattctggacagtgctctggaggtattcggggccgaggggtatgacggcgcgtcgatgaatgccatctgcacccgggcggggatctccaaggggatcatctaccactactttgcgggcaaggaggatctgtacctcagctgctgccgggagagcacccagaagatggcggactatctccgggagcatccggtgtccggggggacgctccggcagcaggtcggggaattcctggcactgcgccaccgctttttcggggagtatccccggtatgaggcggtgttctatgaggtgttgttcgggcatccgctttatctgcgtccccagctcggggagatccgttcccagctggaacaggtgaacctggacttcttccggcagactgcccggcgtcagctgggaacggtgccggaggatctggacgcctgttcccagatcctgctccaggggatctggctggcggctgaacagatcagcgaacccgatgctgaaaagatccgtctgcatgaacagcaggtgatccggctgatggagattttcttccggggactggaatgccccgatgccgctgaaaaacaagaggtaattctatgaagcagatgaaaaaactgctggcagcgctgctggcatcggctctgctcctgaccggctgtgccggcggcacctcttcggaggggagcagcaccgcttccggagaggagagcagtactgtatcccaggcgccgctcaccgatgaggatattctggcagaagtggaaccctatctggaagataccgtatggcaggacccgtcggcctatgctggcatggacgaattcctgagcgccaatctggctctggacagcacccaggtggcagcggtgaccatttatatgggcgcgcccaatcagaacaccagctttttcctgatgctgacccccacggaggaggcagaccccgaagtgatccgggagaagctggaaaacaaggcggaaggcatggtgaataccgctgagatgggttatacccagggctatgcggattataagatcattgagaatgtgggacggtacttcctcgtcatgcaggcagacaccacagatttccaggagctggtacagcttctggaggggctggaggactgaggaaatttactccgtgtccggtcctgacccagcccgatgcccggggtacagacccaagcagtctgtgctccgggtatttttctgtgccgggggctttgacagaccgggatacatcgcttatactggatagcagaatcacgccgggccggacccggcaggaaaaaaggagaaataacgatgcatcaggtactcaatgaaaaaatcccctacttcagtgacgacggcctctcctgtgcggagagcaccctgcggtatcttattgagcatggctatgcggatctgccgctggacaccgtgcgcattatgaccggactgcatggcaatatgggccggtgtgccaactgcggcgcggtcaacggcagcgtggcagccatcggcgccaacttcggacgccgggaagtgggcgaggatatgaccctgctctatgagctcaccgagcggttcatgcgggagtttgagcagacctttggttcggtgaagtgcgcggagctcatggagggcaaggacccggccctgatggagcagcagcacaagtgcgcggatattgtagcgggcgcggtggacatcgcggcccggatcattgaggaaggccgggcagccgcgaagaagtaaggcggcagaagcaggcagccggccgggtgaaaaataaatcccatgggggactgcggcggtgcttgacagaccgccgggggatattgtacactcgaaccagtgggataaaaaggaaaccgagagccggcgccggaagcagtggcgcagaaaggaatgtatatggacaagatccgtgagaaaaagggttatatctgtgatatggatggtgtaatctaccatggaaaccggattctgccgggtgtggtggagtttgtcaactggctgtatgagaaggagaaaaagttcctgttcctcaccaacaacagcggcaagacaccccgtcagctccatgaaaagctggcctggatgggtctgcaggtggacgagagccatttctataccagtgcccaggccactgcggatttcattgcccgtcagatgccgggggcgcatgtgtttgtcatcggcgaacccgggctgtacaatgccctgtatgagcggggcatcaccctcactgataccaatcccgactatgtggtagtcggcgaggccaccagctataattacgataatatctgccgtgcggtacaccatgtattccgtggggcacggctcattgccaccaatccggacctcaccggccccaccgaacagggcatagttccggcctgccgggcactggtcaagcccattgagatggtcaccggacaggaggcctattacatcggcaagcccaatcccctgatgatgcgcaccggactgaatatgctgggcgtacactccaatgaagcagccattatcggcgaccgtatggataccgatatggtagcgggcattgagagcggcctggataccgttctggtgctgtccggcgtcacttcccgggaggaagtggaccggttcccctatcgtccccgtgtgatcctcggcggcgtgggagaaatccccggctgatgatcgcgccggaatctttgattatcttctgactgaaacgagcggcaaaggggaaatcctctgccgcccgtattttattttcaccgccctcactgtgagggagaaggaggtttttatgaatacgccgggtatttcccgggaattttccaccggggaactgctgcggttcgcagcgccatccattgtgatgatgctgttcttatccatgtataccattgtggacgggttctttatctcccggtatgtgggaacagcggccctgtccgctaccaacatcgtctatccgctcatcggcttcttcctggcggtgggcattatgtttgccaccggcggcagtgccgtggtcgcctcggaaatgggccggggagaacatcaggaggccagcggacatttcaccgccgtggtactgactgccgtggccttcagcgttctggccggcgtgatctgcctggccttcaccgatcaggtgctcaccttcctgggcgccggtgccgacacctgggaccacgcccggcagtacatcaccgtgctgctctgcttcatgcccatgtccatgctccagtgcctgttccagagctttctggtcaccgcggggcgtcccggcctgggcctggggctcacagtgggcgccggctttgccaatatggtgctggactatgtctttatcgtcccgctgggcatgggaatcgccggagctgccctggcaactgccatcggctactgtatcccggcactgggcggactctggttcttctcccggaaccgctccggcctgtgctttacccgtccccgctgggacttcactgtcctgctcaaaagctgtgccaacggcgcttcggagatggtcaccaatctggcttccagcatcatcaccgtcatcttcaacctgatcctcatggcctggatcggcactgacggtgtggctgccatcaccgtcattatgtatgcccagttcctgatggtggcctttttcatgggcttttccatcggagtggcgccggtgttcggcttccattacggcgccggcaaccatcagtacctgctgcgtatccgggatcactgcatccgctttgtgctgggcgcatcggtggtggtgtgcgtggtgtccttcctcagttcggggctcatcgctgtgatcttcgccccggagggctccctctccgcccagctggtgaaccgcggcatgcggcttttctcgctgtccttcctctttgcggggtacaatatctttgcctcagcgctgttcaccgccctctcggacggacgcacctcggcactcatctcctttgcccggaccttcttctttatcctggtgggcatctggctgatgactaccctgctgggtctggacggactctggctggcgatcccctttgcggaactggtgaccgccgggctttccttctatatgatccggacccggttcctggcagacgcacagaaaatggacgaatgaaatttgccgcaggcgtgtaaaaccctgcggctttgtgctatactgaaagcaaaagcatgacccccgggaacattccggggaaaaataccggaccctcccgggcggagcgccggagaaggccgggtaaggaggcttcagatacccatggaaaagatactctataaccgcctgctgcgtccggtgctggctgtggtgatggtggtttcgctggcattgggcgttgcgtcgtcggcctggcccgcggcccggcagagtgcccggatcgaagtcctggcagaggcgggcatcaccaatctgcgcaccctgtccattgcagtcacggaactgggagaggaccggctcgcggcgctgatcaagacccctatgcagggcaatgatttcaagaagatgagcggcctgctcaccgaagtacgggacgcagccggatatgaccgcatctggctgacagcccagaaagatggcaagaccatcgtactgtgcgacagcagctaccgggataccggcactgccggggtgacctatctggcgccgggcagcgagtggaccggcccgttggcagagaagctggattccggcgtgagcggactgctgagcggcaagaccgaggacgcctataccaagtccccggtggaaacgggatcggatacccccatgctgggaattgcggcagtggtgcgggataagaacggcgcccccgcggcagccctggtggcccagttcccggcagcggatattgacttcacccagctgggctttgtggatctcggcctggtgagctggctgggcttcctgctctttgccctgtcgctggctttgctggtgctcatctcccggctgcgcaagaagttcccgaagcccacaccgcctgagcccaccgaaccggagccggcggacttcaccgctgagggctttgaatcagctcccgccccggaactgcccgaggctccggcagcggatcagccctccggcgcgaattttgaccccatgaccggggagcctatcaataaggacccccagcccccggtaaaccccgaggcataacctgaaaccgaacagcgtctgctcccatacggcaggcgctgtttttatgcccttggcgggggcggaatggcgggaaagcccggtgctgcctgagaccgcccgctgacccgcagcacgccgtccgctctctggcactggctcaccctttgcggtaagcgatccggcgaacatgccgtctgtgcggcggcatggggagtgcctttctcgcccgtggctttttgcaccctcccacgcatcgggcagagccgttcccgcacagcaaaaaacagggcacacctgagggtgtgtcctgtttttctatgggatcagaaagggttatgccttggcagaacggatctgatcgtaatatttctcggtatagcggcggaactgttcgttgtaatgtcccacctgaccggcatgcagctgcatgatgtaggtgtggtgatccacctcatcgctgccccggacatagctgatcatatacacgccgatgttggagcagtggtcggagatccgctccaggcaggagagggattccacaaacgggaaggcggcgtccacggtgcactgaccgttgcgcagacggttgatatggcggtccttgagggtctcctgcatctggtccaccacctcttccaggggttcgatggtctcagccagggccagatcctgcttttcaaagcagcccagtgccatatcaatggcttccttgacggcttctccaatggtggtcagctcaaactgtgcctggggcgagaattccgcgccggtggattccatattttccgcgaattccaccaggttgatggaatagtcgccgatgcgttcaaattcactgaggatatgcagcagtgccgaaatggtggcgctggactgttcgctcaggttgtcctgggggatcttgagcatatagttgcccagacggtcctccagacggtcgatggtatcttcccgttcccggatcttttctgcttccttgtggttgtactgttccagctgacgcacactggcagagaagttcttccgggccagcttgcccatctgcagcacagcgtcccggcagtgctggatggccagaccaggcgaggtgagcagacggtcatccagggcaatggcaggatcgtccacctcgtcggcagtctgctggtcggggatcaggtgtattaccagcttttccagcaaacctacaaagggcaggaacatcagagtgacgcagacattgaaggtggtgtggaagtttgcgatgccgcccttatcaatgggaagatcccagaaggagaagggggaaaaggactggatggtgtagataacaatcaggaaaacacaggtgccgatgatgttgaaggacaaatgcaccgcagcggtgcgcttggcgtttttggaggcgccgatggaggcaaggataggggtaatgcaggtgccgatgttctgaccgagaatgatcggaattgccgacgaccaggtgatgatgccggtggagctcagtgcctgcaggataccgatggaagccgaagaggactggataatggcagtgacgccggcacccaccagaacaccgatgacaggattggagaaggaagcgaacaggttggcaaactccggcgattcgctcagcgggctgacagcggcttccatattgaacataccggtgaagaggatacagaagcccaggaggatttcacccagggtcttgtacttctgttttttgcccgccatgaccatgaggataccgatgatgccgaccaccggagccagggttgtgggcttgaggagcatgaggaagaagttatccgagctcagatccgagagccggaggatatgggcggtgacggtagtaccgatattggcgcccatgatgatgccgatggcctgccggagcttgagaatccgggcattgaccaggccgaccacgataaccgtggtggcagaggaggactgaatggcgccggtaaccagagcacccagcagaactcccttgaatacattgttggtcagtttttccagagtctgttccagacggccgctggagagcttttccaggccactgcccagcatggacataccatacagaaacagggcaagtccacccagcagggaaacgatcatgaagaaatccatggtgactgttccttccttttttacatggtttgatataattctcatgtatcagtataccatgttccggcgggccggtgtgtaaaactctggtaaagaggctgtaatatccctgttacatacaaaaaccgcagaaatgccgcaccaggacggaatggatgggaaaaagctgtacacaatagcagagagggactgcacgaaaatcccgaaatatgctatactaataagacgaaacccatcaaaaaaccgcacacggacgggaaaaactgccatttatggaaagtttgtccggattgtgcccgacataaaaacgggaggaaggaaaaacaatgaaaaaccgttggatcagtattctgctggcattggttctgactgtgggactgactgcctgcaccaccgaccggggagaggagcattcttcctcctcggaaacggaacaggagccggtatcggtttcctcgtcggaaccggaaccggaatccgagccggaggaaccggagtgggaatcgggtgatccctatccttacgcggaacctgccatgggatcgaatttcccggtggtggcacagctttcaggagaggctgtcacctggggcccggccaccaatatggacgaggagaaccgtcccatcgcctgtctgcagctgcaggaacagtacggggactacaatgtcaacttcatcggcccggatgaaaagcgcatctatctcacctttgacgagggctatgaaaacggcaataccgccgatatcctggatatcctcaaggagaagaatgtcaaggcggtattctttgtcaccgggcattactgcaagaccaaccccgaactggtacagcgcatgatcgatgaagggcatattgtgggcaaccacagcatgaaccatccgaacttcaccaccatcacccccgaggagatgtatgaggaggtcaaggaactgcatgactatgtgcaggagaactttgactacaccatgttcctgttccggtatcctgagggtgtgttcagtgagcagagcctggctgtgctgcaggacgccggctaccagacctctttctggagctatgcctataacgactgggatcagaacaaccagcccgatccggatactgcctatcagaaggtgaccggtgcgctgcatccgggtgccatctatctgctgcatgccgtatccgagaccaacagcgagatcctcggcgacttcattgatgaggcccgcagccagggatatgaggtgtcggtctataatatcccgccggtggaaaatccccgggagggcgcatctgccagctcgcagacagagtcctcgtctgagtcccagacagaatcgcagtccgaatccgggacagaggcagagtaatccctgccccggcagcatgaaaaaacgggtatcccccgaaagagggatacccgttctttttatgcagtgatacagcagatcgatcagttctggaagtccacagtggcattgccgtgctcatcgtactgaacagcgtccttatccaggaacagttcgttgatggcatccaggtaggccttgatggacggatactgcggcttgtaatcagcaatgatcttccgggcggcagcggcgtcgtcccggagcagggcgtctgctacaaagagctgtgccttgacggcattgacgcacatccggttggggtccttgacatagtagtcgatgccgtgaccggtaccgatggcgccggcagcaaagaactgtacgccgggcattacgcaggtgacatcaccgaagtcggaggaaccggtgctccagctctcatagtcgaacttcacacgatccttgcccacgaggtcacagcagcagtcctcgaccagcttcatgaaggccggatcatggtactcgggggagtaaccgggacggtcgctgagctctacaccggcgcccatcgccagggcagcaccggtcagggcacggttgaccttgatgttttcccgcttgatggcttccaggcttctgccgcggacatagctttcaatcttcatctcatcgggaatgatgtttacagcgcagttgacgcccatcataatgggatggaagcggatggtatccttttcctggaaggtttcgcggaggtcgttgcaggcctgcagacccagcatggcagcatactgggcattgatgcccagatggggagcgccgcctgcatgggcggacttgcccttatagcggatggtctttgccatgcagccattcatacccagaccgccggagaagtcgaaggcctcatccggaccggcagcgctgccatgtaccatcatggcgatgtccacgccgtccagcatgccgcgggccatgaattccaccttgccgcccatgtactggatcacgcccttcttgcgcagatcctcacggaaggccagctggatcatctcctcagcgggcacggcaaccagacggatggtgccgcacaggccatccagtgcgccgggttccttcagggcagcagcgatgcccagcagggcagcagactgaccgttgtgaccgcagcaatgggccatgccattgaccgattcggggtgattggcgatgtccagggcatccagctcaccgaagattgccagcttggggccggggcgtccggtatccacttcggtatagaaaccggggatattgccagccagggtgagggaataacccagagcctcatacttttccaccagatagttgtgtgcttcccactcggtgtagccggtctgggggtgagcccagagccagcgctccgcatccaggatcatctggcggtgcttctctacattctgtaccagttgctgctgtctttcagtcattataattgtctcctttcaaaaggcatttgtacgccataacgatacaatcactattataacaccaatctgccggataggaaagccaaaaatgcaaaattgtgcatcaatttttcactttccctggaattctttacactgggctgaaagtgcggtataatagccgcatgtcggctattatacttatttttacggtcggacgattcgtcccaatggccaatgattccatttcgctttgctccatggtataatagcccgcatgcgtctgctgtaccattggggacgggaatcagagggcagcaaagcccggttctgtcccggcaggccaattctgccgcttggctgacgcatcactgcacagaagccgcagaacagcagtccggttctgtccgggagctgcccgttcatacagtgcagtgaacggatctgatatgacaggggtaaaagaatatgggtttgattgagctgtttttcattgcggtggggctttccatggatgcctttgccgtatccatctgcaagggtctggcctgccgggaacagaacctccggcataatctgctggctgggctctacttcggcggattccagggcctgatgcctgccatcggctggctgctgggcgtgcggttttcggctgccatcaccagcatcgaccactggatcgcctttgtgctgctctgcttcatcggcggcagcatgatccgggagtcccgcagtgaggaggacgaggaggagatggacgcctccttccgtcccaaggagatgctcaccatggcagtggccaccagcattgatgccctggctgtgggtgtgagctttgccttcctgggcatgggccagggggagatcctctcggcagcgggccttattgccgccaccacctttgtgttctcggcagtgggcgtgagcgtgggcagcgtattcggcagccgcttcaagtccaaggcggaactgtgtggcggtgtgatcctgatcctcatcggcctgaagatcctcctggaacatctgggaatcctgggctgatccttctatcgaaaaatccgtgggacaagagaactgtcccacggatttttttgcgtttccgggaataccaagggtataacagccccagttttccacggtgtgtattctgatatgtttacaacctgttgaaagtgttgaaaactcaactcatggtagaccgatccgggttccaggaaaccagccggaccaggtcatcgtcctggcgcaggacggtgaggctgccccgtacccgggtgccctcggcattggctccggagagcag

SEQ ID NO: 431 - DNA, 15157 bp, Unknown
  16S sequences of unknown bacteria
ccggggatattttcagcatttcttcgtcgtccgaaatgactatcgccgtgccctcttcaatgcggtcgaggacatatatctttttcaaatgttatttcctccgggagtttatcagtacaattcaatactattgtaccaaagaatgcccggattgtcaaccgttttttcgttattttctcaaactttgtaggatgcgtgcgcaaattcacatcctgatgtgtagttcacatatcatgattgttaattaagcacatttctgacaagaaaataacatttatcccgaaacggaaaatttgcgaaaaccccttttatttgtcgcgaaagtatggtataatatagtacagaaaagtatggacggaagaaaggaagacctgaaatgaccgaaaaggaagccgcagcgcggatgaaacacctcgcggcggagatcacgaagaactcgagactctactatgacctcgacgcgccggtgatctccgactacgactatgatatgatgttcaaggaactgaaagagctcgaggaaaaatacccgtcgctcgccgacccgaattcgcccacaaagcgcgtcggaggagaggcggcgaccggatttgagccggtcacgcacacggtgccgctcggaagtctctcagatgtgttcgatttcgatgagatcagggcgttcgtcgagcgcaccaaggcgttcgacgcggagtgcggatactctgttgagtgcaagatcgacggattgtcggtcgcgctgagatatgagaacggcgtgctcgtgcgcggagcgacgcgcggcgacggacgggtcggcgagaatgtcaccggaaatctccggactgtccgctcgattccactgacgctcaatacggaaaagctcgccggaatggacacttccgtcgtcgaggtgcgcggagaggtctatatgccgcacagttcgtttgagagactgaacgcggagcgggagaagcgcggcgaggctcttttcgcgaacccgagaaacgccgccgccgggacgctgagacagctcgacccgaaggtctgcgcgtcgagggggcttgatatattcgtcttcaattaccagaccggaacgcttgatttcaaggaacacgacgagagcctgctggcgcttgaaaagctcgggttcaggataattccttatctcaaggtcgtgaagacggcggacgaggtcatctctcagatcgaggagatcgggaagatgcgcgggacgcttccgttcgatatcgacggggtggtcataaaggtgaacgacctcgcgctgagacggactataggtgagaattccgcgacgccgaagtgggcggtcgcctataagttcccgccggaggagaaagagacgaagctcacagatatcgtcatacaggtgggacggacgggaatcctgacgccgaacgctgtgcttgagccggtgaagctcgccggaacgacagtctcgagggctacgctccataatctcgatttcatccgcgagcgggatataatgatcggagacacggtcgtcctcagaaaggcaggggatataatccctgaggtcgtgagggcggttccggagaagcgcgacggtacgcagacgccgtttgagatgccggagaggtgcccttcctgcggcgagccggtcgagcttgacgaggagagcgaggggagcgcgtattactgcacgaattctgactgcccggcgcagataatgcggaatctgatacatttcgcgtcgaagggcgcgatggatatcgacgggcttggtccggctctgctcgagaagctgcacgatacggggcttgtgaagagcatcgcggatatttacagtctgacggcggaacagcttgccgggcttgagcggatgggtgagaagagcgcggcgaagctgatttcgtcgattgagaagtcgaagtcggcggggctcgcgagacttttgtcggcgctcgggatacgtcaggtcggcgataaggcggcggctgttatcgcggcgcggttcggggatatcgaggagttgtttaaggcgacgccggagacgctttgtgagatagatgacgtcggggagattacggcggagaatattgtcagtttcttttcgcacccgcagacgcggcggatgattgaccggctgaaggacgccggggttgtgatgacggcggagaaggcggttgccggggacgacaggtttgccgggatgacgttcgttcttaccggtactttgccggatatgacgagggacgaggcgtcggcgcttataacgtcgcatggcggaaaggtgtccggttcggtctcaaagaagacgagctatgtggtcgctggcgctgaggctggctctaagctcgcgaaggcggagtctctcggcgtacctgtcatagatgaggcggagctgcttcgtatgaccagtgtataaagctttagaaaagaatggggtgtggggaagggaaaacctttctcgaaaggttttctcttccccacgaaactaacagttaaggagaatttcatgtttatagataaagtagagatccacattaaagccggcaacggcggcaatggctgtgttgctttccatcgtgagaagtatgtcgcggagggcggaccgtccggcggcgacggcgggcgcggcggagatattgtttttaaggttgacgaggggactaatacgctgctggcgttcaggtacaggcggaagtttgttgcggcgaacggcggggacgggatgactgagaagttccacgggaagaacgcggaggatctggtcattatggtgccgcccggaactataataaaggacgcggctaccgggcgggtgcttaaggatatgtcggctaccgttcatactgagccggggatgagcgaggaggaggtcgcggagatacacgcggggtctgacgatgagctgcttgtccgcgagaagcctgagagcaggacccgggtgacttatgagccttatgtctgcctgaagggcgggcgcgggggctgggggaatcagcatttcgcgactccgacgagacagattccgcggttcgcgaagcccggtcagaagggcgaggagatggacgttgtgctggagcttaagatgctggcggacgtcgggctgatcgggttcccgaatgttggtaagtcgtcgcttttgtcggtgatttcctcggcgagaccgcgtatcgctaattatcacttcacgactcttgagccgcagctcggcgttgtgtcaaccggcgaggggcgcgggtttacctgcgcggatatcccggggcttattgagggcgcggctgagggcgcggggctcgggcatgatttcctgagacatgtcgacaggtgcaggctgcttgttcatgtggtcgatgtgtcgggctctgaggggcgcgacccgattgacgatataaagaagataaattcggagcttgagaggtacagtccggagcttgcctcgcgtccgcagattgtcgcggcgaataaggtcgatatactgccggacgacgctgatctttcggtgtttgagagctttgtgaaggacgagctcgggtgcgagctgttctatatctccgcggcgacgagaaagggcgtcgatgagttgattcaccgcgtcgccgagaggcttgaggagctgcctccgatgaagatctacgagactgaggaggcgccggagccggagataaggacgaagagccgcgatttcacggtgaagaacgtgaacggtgagtatgtggtcgagggcgagtggctcgaggagctgatcgagtcgatcaatttctcggattacgagtcgacgagctatttccagagaatgctcaggcagtacggggtcatcgacgcgctcaccgagaaggggtgcgaggacggcgataccgttcatatctatgacgtcgagtttgatttcataagataatttttgcgtgttgaccgccggataccgaaaatatgacgaaaaatcaagatttctcggaaaaatcggtgaaagcggttgacaaccttccggatttgtattataatggatagtataatataatgagataatatgatgaagcgctgtgcttcaccaggaaaggttttttgatgttctggcagaaagatattgaaacaatgccgcgcgcggacctcgaggcgcttcagctcgagagactgaagaggattgtccgctatgtttacgagagggttccgttttacaggaagaggctcgacgacgccggggttaatccggataagataaagacactcagcgatatacagtatattccttacacgacaaaggcggatatacgcgatacctatcccttcggacttttcgctgtcccgcagaaggagatcgtccgcatacacgcgtcctccggcactaccggaaacccgacagtcgtcggatacacgaagaacgacctcgagaactggagcgagtgcgtcgcgagacttgtcaccgcggcgggagccaccagcgacgatatcgtgcagatagcgttcggttacggcttgttcaccggcgctctcgggcttcattacgggcttgagaaggtcggcgcgaccgtcgtcccgacctcgaccggaaataccgagaagcagctgaagctcatgcgtgacttcggcacgagcgcgctcgtcgcgacgccgtcctacgcgctctatatcgcggagaccgcgagggatctcggcattgactgccgcgacctcaaggtaaggctcggtctcttcggctcggagggctgctcgatagagatgcgctccaaggtcgaggaggcttggaatctgttcgcgaccgataactacggcatgagcgagcttatgggtccgggcgtctccggagagtgccgttacagatgtggtatgcactttgccgaggatcacttcctgcccgagataatcgacccgcagaccggcgaggtgaagccgcgcggcgaggagggcgagcttgtcgtcacgaccctcacgaaggaaggcataccgcttctcagataccgcacaaaggacatcacccggattcactatgagcagtgcgaatgcggacgcacccacgcgagaatggacaaaccgctcggcagaagcgacgatatgctcaagatcaagggtgtcaacgtcttcccgacgcagatcgagtcggttctcgtcagcatccccgaggtcggaccgcagtatcagattgtcctcggacagaagaactacatggataccttcgagataaacatcgaggtctccgacgggaagctgctcgagagcttctccgaccttgagaacctccagcagaaggtcagacacaagctccagaccgttctcggtctcgacgccaagataaaccttgtagaaccgcgctctctcgagaggttcgtcggcaaggcaaagcgcgtcatagataaccggcataaataatatcacggagagtttacatatgaaaaagataatgttaggaaacgaagcggtcgcgcgcggactctatgaagccggtgtgcgtctcgtttcgagctaccccggaaccccgagcaccgaggtcaccgaggcggcggcaaagtacgacgagatctacgccgagtgggcgccgaacgaaaaggtcgcgctcgaggtcgctctcggagccgctattggcggcggacgctcatttgtcggaatgaagcacgtcggactcaacgtcgcggctgacccgctcttcatcacctcctacaccggagtgaacggcggaatggtcattggcgtcgcggacgaccccggaatgcactcgtcgcagaacgagcaggattcgcgccactacgcgatcgcggctaagctcccgatggtcgagccgtcggattccggcgaatgtcttgagttcacgaagctggcgtatgagttctctgagaagttcgacactccgttcatcttaaggctcaacacccgcgtctctcactcacagtcgatagttgagacctccgaccgcgtcgaggttgaggtgaagccctatgaaaaggacgccgcgaagcacgtcatgatgcccggcaacgcccgtccgcgccacatagaggtcgaaaagcgtctgaatacgctccgcgagttcgccgagaactgtcctttcaacaaggtcatcgagaatcccggcgcgaagatcggcatcatcacctccggaccgtcgttcaattacgcgctcgaggctttcggtgacaccgcgtcgtatcttaagctcggactcgtcaatccgcttcccgaaaagctcctgaaggacttcacggcgaaatatgagacggtctatgtgatcgaagagctcgacccggtcatcgagagccactgcaaggcgctcggactgaatgttcacggcaaggacatcctcccgctctgtggcgagttctctcaggagcttctttcaaagcttcttctcggaaaagaaccggaatgctacacgctcgacgagaatatcccggtgcgcccgcctgtgctctgccccggatgcccgcacagaggcgtcttctacctcttcaataagctgaaattatacgtcagcggcgatatcggctgctacacgctcggcgcggctaaaccgctgggcggaatggatacgacgctctgcatgggcgcgtcggtctcggctctccacggcttcaacaagatacgccacgaggagcacaaatctgtcgcggtcatcggagactcgaccttcatgcactcgggaatcaccggacttgtcgacatcgtttacaacaagggcttctcgacggttgtcgttgttgacaacagcattaccggcatgaccggacaccagcagaacccctgcacgggattcacgcttaagggcgagaaggtctacggaatcctcatcgagaacatcgcgaaggcggtcggagtgcctgaagagcacatccgcatcgtcgacccgaacgatctcgccgagaccgagaaggttctgagagaggagctcgcgtcggatacaccgtcggtcgtcatctgccgccgtccctgcgcgctgctcaagtatgtcaagcacaatccgccgctcgtcatcgaccacgacaagtgtgtcggctgcaaagcctgcatgaagatcggctgcccctgcatctcggtcaaggacggaaaggcgtcgatcgaccagacgctctgcaacggctgcggtctctgcacgcagatgtgcaggctcggcgccataggcagcagataagtcccgctttaaagacaaacttattcccgaaaaaggagttcagttatgagaaagatagccgattcccatgtccacataagattcacccgcgatgaggatatcgcgcggatgctcgacgatatcgcatcggtcggcgtcacggcggtgaatattctctcgctgtcataccgcggagtcgctgaggatctggcggcgctctggcagaagatgacacgtaaggatctcgatatccgcgcgttcggcggtctgcacgtaaacgaccgctacatgaacgttccgcccgaggttcaggtcgagaagctgtcagacctcggctgcgacggcttcaagatgatgtacgccccggcgctcagacgcttcatgcccgaggggcttgactcgccgaagtactcgaagatgttcagcctgcttgaggagcgggggattccgacgacaatacacgtcgccgaccctgaggacttctgggacgagggacgtcagtacggcgataagagcttcccgtccaaaaaacagctctacgacgagatattccgggtgcttgacgctcacccgcgtctccgtgtctctttcccgcacttcttcttcctctcgaacttcccggacgaggcagagagggtcatggaaacctacccgaatgtccgtttcgacctgacgcccggcgttgagatgtactataatttcgacaaaaatatcgacgtctggcacgacttcttcacgaagtacagcgaccggatactcttcggcactgactcgaacacggtaaagagcaataacttcgagctggtcgagctcgtcagacgcaagctctgcgagagccgtgagatcttctcacagcactgctacggcaaggatttcatcgtccgcgggctttatctggacgaggacacggtcgataagatctgctaccggaacttcttcgactatgacggagagaagaaaaaggtcgatgagaacaagttctacgagtactgcgagataatgaagaagagcatcgaggctgatccgaccgagccgatcgtcatccccggcgaggagctgaacctcggtggaaagaccgaaaactcgatagcgctcgagttccttgacaggcgtctttcggggagataatccgcacacatattttctgaaaggaaaaacacaatgaacataatgatagtcggcgtcggcggacagggttcgctgctcgccagccgcattctcggaaacgccgtgctccttaaaggctacgacgtcaaggtctccgaggtgcacggaatgagtcagcgcggcggctctgtcgtcacatacgtgaagtacggcgacaaggtcgcgtccccggtgatctgccgcggcgaggctgacataataatgtccttcgagctgcttgaggcggcaaggtggctgccatacctgaaaaagggcggggtcgtcatcacgaacacacagcagataaacccgatgccggtaatcaccggagcggctgaataccccgaggatctcgcggataagatgagagcggcaggcgcgaaggtgatcgccgcggacgccctcgcgatagcgagagaagccggaagcgagaaggcagtcaacgtcgcgctgatcggactcatggcacacgcgctcggatttgaccgcgagacgctgatcgaggcgataaggatgtcggtgccgccgaagttccttgagctgaatctgaaagccttcgagctcggcgacagagccagagcctgagaacaggggaaacgcatgacaagatatttcaatgaggcaatggagaccgcgccgcgccagcagctgttccatctccagtcgtataacctttcacgcacagtgtatcacgcgtacaagaacgtcccgatgtacagaaagcgcatggacgaggcgggtgtgaagccggaggacattctctcggtgaacgacctgaagaagctcccgttcacatataagcaggatctccgcgacaactacccgtatggtatgttcgccgtaccgccgtccgagcttcagcgcatacacgcgtcctccggcaccaccggaaagcagacagtcgtcgggtacacgcatcatgacatagagatatggtcggaatgcgccgcgcgggctcttgtggcggcgggagcgacaaaggacgatttcgttcacgtctcctacggctacggactgttcaccggcggtctcggcatacacaacggcgccgagatgatgggcgcgacggtcattcccgcgtctaccggaaataccgcgagacagctcacgataatgcaggacttccattcgtcgatactctgctgcacgccgtcctacgcgctctatctcgccgacgcgatgaagcagcacggaatcgacccggagtcgctgaacctcaaggcgggcatcttcggcgccgagccgtggaccgaggaaatgcgccgtgagatcgagagccgcctgcacataaaggcgtatgacatatacggtctgtccgagatctccggacccggtgtcgcgttcgactgcgagtgccagaacggtctgcacgtcaacgaggacaacttcataatcgaaataatcgacccgatcacgggcgagtcgaagccggacggagagcagggcgagatcgtcttcacctgcatcacgaaggaagctcttccgctgatcagataccgcacgcacgatatcgcgagtatcactcatgagaagtgcgggtgcggaaggaccttcgtcagaatgtcgaagccgtgcggcagaagcgacgatatgctgataatccgcggggtgaacgtcttcccgtcccagatcgagagcgtgcttctctcctgtggaaatatcgacccgcactatatgatcatcgtcgaccgcgtgaacaaccttgacacgatggagatacaggtcgaggtgtcggcggaaaacttcaccgaccaggtcaggggctttgaggcgatggcggcaaagatatcggcggcaatgcagtcggtgctcggcatcgccgcgaaaatcaccttcgtcgagccgaacactctcgcgcggagcgagggcaaggcaaagcacgtcgtagataagcgcaatcttcactgagaataaaggaggttctaccatgataatcaagcagatatccattttcgttgagaacaagccgggaagactcgcggagatcaccgagatcatcgcgaagaacgacatcaacatccgcgcgctttcggtggcggacacgactcacttcggtatcctcagaataatcgtcgatgatccggagatggtgcagagggtgctcaaggaggcgggtctgaccgtctcgataacgagcgtaatcaccgccgcgataaacgacagaccgggcggacttgcggaggttctgaagctcttcgccgctcacgacatccagatcgagtatatgtacgcgttcatcgcgaagagcgagaacgaggcatatgtcgtcatgcgcatcgagaacgaggatgaggctgttaagctcctgaaggagaacggcttcaccggaatgaacgactgaacagcataaataccgcagtgccggatgtgctccgataaggaatgcgtccggtgctttttttgcgaatttacacaccgtgaataatatgttcatgcgctgttaacgcatatctgatataatatatacggtcagatgaacgttaaatgagttgcggtgactgtaattacatcgtgaccatcgcgctgattcccattcagcgggaagaaaggaacaaaatgaacggaaatttcacacagagcggaaacaccttctatcagaagcctccgcggaaattcgacacgaagaagctgcggacggtgataatcgccgcggtggtcgtgattatcgcgctttcgatcggcgcgacctcgtggtatacggtcgacgaaaagcagcaggcggttgtcacgacctttggaaaggtgacggatataaccggcgccggatttcacttcaagctgccgttcggaattcagagtgtcgataaggtcgacgtcaacgtctaccagaagatcgagctcggataccgcagcgacgagaggagtaccgaggggtatgacgtgatcgagaaggaatcgaagatgataaccggggattacaatatcgtcaatgtcgatttctttattgagttcaagatatccgacccggtgaagtatctctataattcgcggcagccggagactatactcaagaacctgattcagtcacagatacgcgcggtggtcggttcggcgtcggttgacgcggtgctgaccgacgggaagacggacatacagcagagggtcaaggagcttgtgaccgggatactcgaggattatgacatcgggcttaccctgaccgacgtgaagattcaggattccgagcctccgacagaatcggtcatcgaggcgttcaaggcggtcgagacggcgaagcagggagcggagaccgcgataaaccaggcgaaagcgtattcgaacagcgagctcccgaacgcgcaggcaaaggcggataagctgatccagaacgcggagtacctgaagcggaaccggataaacgacgcggtgaagcagatcgcgctctttgaggctatgtacgacgagtactcgaagaacccggatatcacgaagatacgtatgtactatgagatgatagagcagaccctgccgggcgtgaagctctatatcgacgtgtcggacggctcaaccgagaagttactcccgctcgaggatttcggcgggaataagtaactttgattattcagaaaggaacaaaatgaagaagataatcattacggcggcgataatcgtcgttctgctgataactctctccggcgcgttctacacggtcgcggagaatgagtacgcgtacactctgcgcttctcggagatcgtcaacgtcacgaacgaggcggggctgcatttcaagctgccgttcatcgacgaggtgcggcggttcccggacactacgctgatatatgacatacctccgtccgaggtgctgacctcagacaagaagaacatgacggtcgacagctacattatctgggagatctccgacccgaagacgttctaccgtacactcggcactacaaatgaggctgaggcgagactcaacgctgtgacctacaactctctgaagaacctgatgggcaagctcgagcagaacgacatcataaacatggacgacgcgtctgagagaaacgatatctacgccggaatcacgaccgaggtcgcggagatatgctcgacctacgggataaacgtccttgacgtgcgcatcaagcgcttcgacctcccgggcaacaacgagcaggcggtgtatgagaggatgatctccgaccgcagccagatcgctgagaagtataccgcggacggaaactacgaggcgtcgataatccgcaacgacgtcgacaagcaggtcaacatcatcgtctcgaacgcggaggctgaggcggcgcgccttgaggctgagggcgagcaggaatatatgcggcttctcgccgaggcgtacaacacggctgacaagaaggatttctacgagttcacgcgcgctctcgacgcgctgaaggcgtctctcaccggaaacgacaagacggtcataatcgaccgcgactcgaggcttgggcagattcttatgaaccctgagtcggtgaaataaatataataacgcggaggctccggatgatggggtctccgcttattttcgcggaaaagccgctttatggccgtttagttcacaaaaattaataaaatgtatgatgaaataatttcccggatatgatataataattacgttaattttttgtctggagttgatgtgatgtttgcgccgcttgtttcggggctgtctttttatgacatcgttatctatttcgtgcttttcgcgattgccgggtatatatgtgaggtcatcttcgcggctatcgtgctcggaaagttcgtcaaccgcggatttctgaacggtccttggtgtcctatatacggctttggcgtcgttatcgtggcgatatgcctgaaacctctgtcgaaaagtctgcttgtgctgttcatcggctcggtgcttctgacatctgtgctcgagtatttcaccgggttcatactcgaaaaggtttttgaccagaagtggtgggactattcggacgataagttcaatctcggcgggtatatctgcctcaggttctcgcttctctggggtgtcgcttgtacggctgttgtcaagctcgttctgccggctgtcgacgcggtgatacgggttgtgccgcattttgtcgggctgatcgtcaccggggtgattgtcgctctgatgctgatcgatctgtcggctaccgtcatcactatcatgggaatcaagaagaagatacggctcatagattcgaccgtggcgaagctgaaggcgggaaccgaggacatgggcggcttcatctcgaaggaaaccctcatcgtcaaggacaaatacgaggagatagcgaagaccgccggagagaagaaagccgaattcaccgggaagaaggacgccctcgcgaaggctgtcgccgaaaagcgcgaagcgaacgcggagagacgcgaagagatagcgaagtctgtcgaggagaagtacgccgccttcctgaagagcgtcggcgagaagcgcggcgagagacgactcatgaaagcttttccgtccctgcgtgaaaagcgtgtcgacagctcgctcggaaggctccgcgagcagctgaggctcatctccgaaaagagcgaggagcgcgccgccgagagacagaagcgcgtcgaagaacagtacgaggagaaaattcccgagggcgcggagaagccgttcggctgcgggctgtgcttcactaagctgttctggctcttcatgatcggaaatgtcgccgggtttttgatggagaccttctgggcgttctttgtacagcggcgggttgagctgcgtgtcgggcttgtctggggaccgttcataccggtctacgggttcggagcggtaattatgacgctgctgctctacaggttctacaagaagcgtgatctcgttaccttcgcggcggcggcggtcgtcggagcggcgttcgagtatttttgcagtttgttccaggaattggcgtttggcacggtttcgtgggagtacagcggaaccaccgctaatatcggcgggcgcacgaacctcatgtacgcgctgatctggggcgtgctcggtcttctctgggtcaaggatctctatccgcgcatttcgaagctgatcgagaagataccgaaaaagatcggctcgccgctgaccgtcatactctgcgtcttcatgatcgcggatatgtttgtctccggcacggcggtgatacgccgcggacagcggatgaagggaataccggcgaacggcgggtacgaaatgtggctcgacaagcacttcgacgacaagtaccttgatttcgtttatccgaatatgatatatgtagacgaaaagaacgaaaccgcagcggacggtgaaacgccggaaaccgcggatgttccggaagagacttcctcatctgacgaataatatactgaaaaaagggagcacggcgcgttcgcgtacggctccttttccggtgcttacaggcatttccggagtttacagaaattttgtgtttcattttccgccgatatggattataatataatatgggcaagaaatcagaaaggcagaagaattgatggaacacatactgataaactcaggcaagctcaagctgatgctctctcgcgaggacatcgagcgttatgagctgtcggacgtcgtcggaaacgggaacaattatccggagggaacctcggagcagagaatggcgctgcgcaagctgctcgacgacgcggagcgcatacccggcttcgacggcggacagggaagactgttcgttcagctctacccgtcaagggacggcggagcggaggtttacataacgagactgacaaaggaaccctgcgcggcggtcggtttcaggaaagacggcgatgtcatgaaaatcacgaaaaccggtgtcttcgatgagctctctgacctcatcggctgctgccgggcgctttccggtctcggcgcggagcacggcgggcggataatgtcggacagttcggcgttctcggacggaaggcggtattttctcgttctctcggggaccataa

SEQ ID NO: 432 - DNA, 12494 bp, Unknown
  16S sequences of unknown bacteria
caagggagggaaatcctacttatacattctatgatggacctcctactgcaaatggtaagccgcacatcggtcatgtgctgacccgtgttatcaaggatatgattccgagataccgtaccatgaaaggctactatgttccgagaaaagcaggctgggatacccacggactgccggtagagctggaggttgagaagcttctgggcctggatggaaaagagcagatcgagcagtatggtctggatccgttcatcaccaaatgtaaagagagtgtctggaaatacaagggaatgtgggaggatttctccggtaccgttggtttctgggctgatatggataatccgtatgttacctatgatgacaacttcatcgagtccgagtggtgggcactgaagacgatctgggacaaaggactcctgtacaaaggattcaagatcgttccgtactgcccgcgttgtggaactcctctgtcttcccatgaggtggcacagggatacaaagatgtaaaagagcgttccgcagtggtacgtttcaaagtaaaaggtgaggatgcatatatcctggcatggaccactacaccgtggactctgccgtccaacgtggcactttgtgtaaacccgaacgaggagtatgcaaaagtaaaagctgctgacggatatgtatattatatggcatccgcacttctggataccgtacttggcaaactggcaaaagacggtgaggctgcttacgaagtactggagacctacaaaggtaaggatctggaaggcaaagaatatgaggcactgtatcagtgtgcagcagatctggctgcaaagcagcacaagaaaggtcattatgtagtatgtgatacctacgtaactctgaccgatggtactggtgttgttcatattgctccggcatttggtgaagacgatgctcaggttggccgtaaatatgatcttccgtttgtacagttcgtagatgaaaaaggtgatatgacaaaagagactccgtttgcaggtctgtttgtaaagaaagcagatccggaggtgctcaaagatctggatgcaaagggacttctgttcgatgcgccaaaatttgagcatagctatccgcactgctggagatgtgatactccgctgatctactatgcacgtgaatcctggttcatcaagatgacggcagtgcgtgatgatctggtacgcaataacgagactgtaaactggatcccgcagagcattggtaaaggtcggtttggaaactggctggagaacattcaggactggggtgtatcccgtaaccgttactggggaactccgctgaacgtatggcagtgtgaagactgcggacatcaggaagcaattggttcccgtgagcagttaaaagagctgagcggcaatgagaaagctctgactgttgagcttcatcgtccgtacattgatgagatcacttgcacttgcccgaagtgtggcaagactatgaagagagtaccggaggttatcgactgctggtttgactcaggagcaatgccatttgctcagcatcattatccgtttgagaacaaagacctgtttgaacagcagttccctgctcagtttatttccgaggctgttgaccagacccgtggatggttctattctctgatggcagagtctaccctgctcttcaacaagagcccgtatgaaaatgttatcgtgctcggacatgttcaggatgagaacggtcagaagatgagcaaatccaaaggaaatgcagtagatccgtttgatgcattgcagacctacggtgctgatgcgatccgctggtacttctacatcaatagtgcaccgtggctgccgaaccgcttccatggcaaagctgtacaggaaggtcagagaaaattcatgggtaccctgtggaatacctatgcattctttgtactgtatgcaaatattgataattttgatgcaaccaaatatacattagataagaaatccctgacggttatggatcgttggatcctgtccaaactgaattccaccgttggagcagttgatgacaatctggcaaattaccgcattccggaagctgcaaaagcactgcaggagtttgtagatgatttaagtaactggtatgtaagaagaagccgtgaacgtttctgggcaaagggaatggagcaggataagatcaatgcttatatgactctgtatactgcgttggtaaccatctgtaaagcagcagctccgatgatcccgttcatgacagaggagatctaccgcaacctggtatgcagcatcgataagaccgctccggagagcatccatctgtgtgacttcccgacagtagatgctgagatgatcgacaaagatctggaggcttctatggaagaggttcttgatatcgttgttatgggccgtgctgcaagaaatactgctaacatcaagaaccgtcagccaatcggaaccatgtatgtacgtgcagagcgtccgctggatgcaatgttccaggaagttgttgcagatgagctgaatgtaaagaatgtagagttcaaagaggacttaagtgatttcaccagctacaccttcaaaccgcagctgaagactgtcggaccgaaatacggaaaacttctcaatggtatccgtgcacacctggctgagatcaatggccgcgaggctatgaaagagctggacaacagcggaagcctgtcatttgacattgacggacagaaagtggtattatcaaaagaggatctgctcattgataccgcacagatggaggggtacgtgacagaggaagacagcactgtaacagtcgttcttgatacaaatctgagtgaggaactcattgaggagggatttgtaagagagatcatcagtaagatccagaccatgcgtaaagaagctggatttgaagtgatggacaagatcgtggtatacagcatgggcaatcagaagattgaaggctacatgaaggaataccgtgaggaaatcttaagcgacgttatggcatcagatatccgttttgacgaggtaaaaggatatacaaaagagtggagcatcaatggtgaatccgtaacacttggagtggaaaaacagtaattaacatgggaggcataacatggccaaaagactttttaacaaagagttcttcatcagaagcgtgaagtacaatgttcgtacacttttccgtaaggagatcgaagaagcaaccgaacagcagatctttcaggcagtcggatacgctgtaaaagatgcgattatggatgcatggatcgcaacgcagaaggaatatgagaaatccgatccgaagatcgtatactacatgtccatggagttcctgatgggacgtgcgctgggcaacaacctgatcaaccttactttctatgatgaagtaaaggaagcacttgaagagatcggactggatctcaataccatcgaggatcaggagccggacgcagcacttggtaatggtggtctgggaagactggcagcatgtttccttgattctctggcaacattgggatacgcagcttatggctgcggtatccgttaccgttatggtatgttcaaacagcagatcgttgacggatatcaggtagaagtaccggatatgtggctgaagaacggcaacccgttcgagcttcgccgtccggagtatgcaaagactgtaaaattcggcggatatgttcgtgtggagaaccgcaacggcagaaacatgttcatccaggaaggttatcagtccgtacttgcagtcccggttgacctgccgatcgtcggatatggcaacaacgtaatcaacaccctaagaatctgggatgcagaggcaatcaattccttcgagcttgaccgttttgacaagggtgagtatgagaaggctgttgagcaggagaacctggcacgtaacctggtagaggtgctgtacccgaatgacaaccatatggcaggtaaagagcttcgtctgaaacagcagtatttcttcgtatctgcaagtgttcaggaagcgatcgcaaaatataagaagaaacattccgatatccgtaagttctatgagaaggcaaccttccagctgaacgatacccacccgaccgtggctgtcgcagagcttatgagaatcctgatggatgaggaaggtctggaatgggatgaggcatgggatgtaacgactaagacctgtgcatatactaaccatacgatcatggcagaggcactggagaaatggccgatcgagttgttctcaagactgcttccgcgtatttaccagatcgtagaggagatcaaccgcagatttgtaaaccagattcaggagcagtatccgggcaactatgagaaagtcaagaaaatggcgattatcatggacggtcaggttaagatggctcatcttgcaattgtcgcaggatattctgtaaatggtgttgcaagacttcatacagagatcctgaagaaacaggagctgaaagatttctacgagatgatgccgcagaagttcaacaacaagaccaacggtattacccagagacgtttcctgcttcacggcaatccgctgctggcaaaatgggtaactgctcatgttggtgacgagtggatcactgatctgccgaagatcaaagagctgactctgtacgtggatgatgagaaagcacagcatgagttcatgaatatcaaataccagaacaaagtgcgtctggcaaaatatatcaaagagcacaataacattgatgtcgatccgcgttccatctttgatgtacaggttaagagacttcatgagtataagagacagctgatgaatatccttcatgtaatgtacctgtataaccagatcaaagagcatccggatatggatttctatccgagaacctttatcttcggtgcaaaagcagctgccggatatatgagagcaaaactgaccatcaaactgatcaactctgtggctgatgtgatcaataatgatgcttctatcaatggaaaactgaaagtagtatttatcgaagattatcgtgtatccaacgcagagtggatctttgcagcagcagatgtatctgagcagatctccacagcttccaaagaagcttctggaaccggtaacatgaagttcatgctgaacggtgctgtaactctgggaaccatggatggagcaaatgttgagatcgttgaagaagttggcgaagaaaacgcatttatctttggtatgagtgcagaggaagttatcgcactggagaaccagggcggctatgatccgtctcagctgttcaataccgatcaggatatccgtcatgtactgatgcagctgatcaacggtgagtactcaccgaatgatccggagcgtttccgcgagctgtacaatgctctgctgatagacggtggatacaaccgtccggatccatatttcatcctgaaggatttccgttcctatgcagaggcacagaagcgtgtagaagctgcataccgcgatgagaagggctgggcaagaatggcaatgctcaatgtggcacatgctggaaaattcacctcagaccgtaccatccaggagtatgtagatgatatctggaagcttgataaagtaacagttgagttaccggaagaagcaaaataaataacaacagattcgtctgtatatgcaggcacctcttttcatacaatgggaagaggtgctttttgtatgaaaaattatgtaaaaatgtttctggcaggaatatttctggcaacagcatttccatttaccatggtgcttctgctcaatggcagacagggaatccataaggaaaaacagctggatccggtggattatcaggtactgcagcagatgctcacggaagatctgtcctggatgagcgacgatacattgaaattgctggcagtgctgtatcggacggaagcgttttgtgtgggggaatcgtcggctatagaacagctctcattgtctgaactttatggagaaccatatgggcgaatctatcaggcaatagagagcacatcaggaatggcagtgaccattgatggagaatatcgggaacttccatttcataagttaagtgttggacatacaagagatgggaagcttcttggagacagctatgactatgtgctctctgtggagtgcagggaagataaagaagcctctgattatgtgcggatctgcaccctgagtatggaggaaatactgcgggcactgggcatggattacacagaaatggtagacaaagatattgctgggaaagacgacgcggatagtgcggatgggcagacgaagcagcagaaaatcaccttagacgattttgagtttcaacgggattcggaaggctatgtagaatccgtaagcctgggtgatcagacctggaccggggaagccttccggtctttgttgcattttccgtccagctgcttctggatgaaggcagatggtacaacgaagacggataaagcgggagcaggcggcaataccgacaacaggcttaccatcaccatcaaaggtgtgggacatggatttggaatcagtctctatacggcagaccgcaggatccgggaaggaacgccctggcaggatattttttcttgtttttataaaaatgcacagtgtataaccattccctgaactggtaaaaatatgaccagaggtgatggtatgcgtaaaaaaaatcagaaaggttttctgatcgcactgtgcctttgcatgctttccttatccggaatctatggggtgtatcagtaccagaagagtgcggctccgacaccggaggaacagtccgctcagcttgagcaggatcagaaggaaacagcaaattccagaggtgcagcaggacagacagaagcaaaaattgaaaccgaagaggatgtggagcagatcggtcagacagaactggcagagacagagcaggaagatacgcagatcgagattgcacagattgaaaatggtcaggcagaggaagtgcagtcctctgatgaactggccgatggcggggaactggcagcggaggaagaatccgtggctgcaggttctgatctggtagaaggcaaggcactgacattttcagcagataatcatctgcgatggccagtggatggagatgtacttctgaactacagcatggataaaagcatctatttctccacgctgaatcagtacaaatatcacccggcagtggtgatcgcagcggagcttggaagtgaagtgcgaagcgcagcaagaggaaaggtaagccagatccggaatgatgaagagaccggaaccacgctgaccatggaacttggaaatggatacgaagctatctacggacagcttgcagacctgactgttgaggaaggggataccattgaagctggtacactgatcggctatgtgggagaaccaacgaaatactatacgttagaaggcagtaacctgtattttcagcttctgaaagatgatgatccggtgaatccgatggattttctggagtaagtaacgaaataaaaatgacaccagaagaataaagctatgaattcgctcatgtgcaagcacatcgcgggattcatagcttcttctggtatcactacatggtagcaatatagaacatggtcacatagtgacacaggctgccagccatgacaaatacatggaagatctcatgagatccaaaatactgatgctttgcattgaacagcggaagcttcagtgcgtagatcacaccgccgatggtgtagatcacgccaccagccaccagccatataaaagcggcggtgggaagggtctgtaccagtggaaccatagcaagcacacacagccagcccatggcaatgtagatggtggaagagaaccattttggacaggtgatccagaatgccttgatcagcatgcctgcaatggcaacagcccacacaaggatcagaagggggattcctacggtgtctctcagcgggatcacacaaataggggtgtagcttccagcaatcagaataaagatcatcatatgatcgatcttacgtaatactttatttactttttcagaaatattaaatgtatgataagtagtgctggcgccgtagagaagaatcatgcttgcggcaaagattgccagagcaggtaccgcatatcggccgccgtccttggctgccagaaccagaagaggggtagctgccaagccggccaggaccataccaataaaatgagtcaatgcgcttccaggatctttaatagataatgtcataataaattcctccttgttaatctatattatgatatgtagtattaaaaactatgtcttgatttattcatattataacctataaaaaagaaaatgcaagaggaatttaaaaaagatattacggaacagtaacaaaaaggcagttccctttcggaaactgccttctattatacttttatgtaattagaagattctacgtactgcaaggacattcttgtagtttaccggagaagtgaacttgattccggtagaagcggtgctggcatgtacgatggtgtttccaccaacatagatagcaacgtgaccactgtagcagatgatgtcgcctggctgtgcatctgcaaggcttacgccatatccaacgcttctcatagcactggagctgtgcggaagaccgataccgaagtttgcatatacactcataacgaatccggagcagtcagcaccgtttgtaaggcttgtaccgccatatacatatggattaccaacgaactgggatgcaaagcttgcaatggaactgccgcctgcacttccactgcctccgccgatcacaacagactcagaagaagactccttcttggagctcttgctcttcttggcttctgctgctgcagctgctttctgtgctgcttcacgctctgctttttccttggcaagacgagcttcctcttcctccttggactccgcatatacataatctgttctcagatctacaaaatctgtggatacccaaccatcaccttcttcgatggatacctttacgaaaccatcctgttcatccagaactgtcagctcctcacccatgggaatgagacccaggatagaagaatctgtggtagcttcctggcgaactcttaaagtctcggtagtaacagtagcaactctggtgcctacctgttcagccagtgcctcagcatcatcaccggtcactacatattcgctttttacataaccgtgtacattaccggaattgatcaaataccaaccgtcttcggatgcctctacatcaccgacagaattattgaacagtttaccaacgatctccccctcttcgctggcttcgctgcggacattaacataatcattgacctgagcaatgcaaaggccggtataattttcttttgccgtctgtgcgacaactgcttctacatcttcatccgtagcagatgaatcatctagtgaagatgagattccgcctgcaagtgccaatgaaatagaagatgcatccgctgtcataggatgaaccagaaatacaccggcaactgccagaagtaagagtgatttcttgaatgccataatagaccccctgatacaagattttacaattctattcaaaatattacaaaattattacaaaaactagggtaagtataacaaggttgtagtaatttgtcaactaaacggggatttgtttacgaaatgttaataattaaggacagcccggagccatgcggatttatgaaaagaagcagatgcaagcttgcttgcaggctgcttcttttataaatccatagggcgagagccctaaatgagcaaaagtaaagcctcgtagaggcgattttgcgaatggctccgggtgttaaaatggcgcgggtgaactttagtaattcccttgacatttataatggtaaatactataatgatgtcagtaacaattattgatatcgttaaaggagggatgcaaatggcagttctgagatacagtaaacagcgggaatccattaagaactacctgtgcggacgtgaggatcatccgactgcggatatgatctacaccagcatccgtgaggaatatccgaatatcagtctgggaacaatatatcggaatctttctttattagtagagatcggtgagattcagaagatcacgacagacggagcggaccggttcgatgccagggtcacaccgcacaatcattttgtctgccgcagatgtggacgggtcatggatatgatggtaccggtggatagcccggtcattgaagcgaacaagctgtgggatggcggagagatccacgaatgcaggatggaattctatggaatctgcaaggattgtaaaaaaacagagaattaaaaaatatctattgacaaaaggcaatcaactaggtataataacggtaacagtaatgattactgttaagaaagaaaacaataaagcaatataaatcaaaaaaagaaaaggagaacaaaatcatggcaaaatgggtatgtacagtatgcggttacatttatgaaggagagcaggcaccggagaaatgtccacagtgcggagttccggcaagcaagtttaaaaagcaggaagagggaatgacctgggcagcagagcatgttgtaggtgttgcaaagggcgttagcgaggacatccttgaggatctgagagcaaacttcaacggcgaatgttctgaggttggtatgtatctggcaatggctcgtgtagctcacagagagggatatccggagatcggtctgtactgggagaaagcagcttacgaagaggctgagcatgcagctaagtttgcagagcttctgggcgaggttgttaccgacagcaccaagaagaacctggagctgagagttgcagcagagcatggtgcaaccgaaggtaaatttgatcttgcaaaacgtgcaaaagcagctaacctggatgcaattcatgataccgttcatgagatggcaaaagacgaggctcgtcacggaaaagcattcgagggtcttctgaagagatacttcggttaattcaaaacgataataagaaaatagcttcctatataaagggttgtcgcagtcatgcggcagcccttttttcgacggcgttgtaactcggcttacatggatgaatggtggatggaagaattgacgtaaaattcatgtaaattatctgcaaatatatttttatgaaaaaagaattgacaaattcatggatagacattatgcacaaaaaaatgaaagaataaaaaacttattcctgatttccccacacttcccacaataatatccacattttgcaccctgaaaaataaggtaaaatcgagttattcacaaagttatccacattatccacattttttggggaaaatggagggtttctaaaaagaggcaaacaaaacagatgttttgtaatttattgataaaacagacaggtttcggaaaaagttgtgtaaaacgcttgacacttaaaatatcaaaaatatgtagatattttcagataaatataatatttttgcgaaaaaaatccttttcagacacgttacaatcgtgtacaataaatgctgtttgaaaaagactgaaaagaggaaagggaggaacatatgcgccttagaaatgtaaagggatcccgtgaggcgattcaggagagtatctatgtagtacacgaagaagagacgcgtgcaggaagctggcatgacatattcggaaacgatcatccgattcatatagagataggaatggggaagggccgttttctgatggaactggcggcaaagaacccggatatcaattatgttggaattgagaaatactcaagtgtgctgatccgtgcactggagaagatgtcggagatggagacaccgcttgccaatatccgttttgtgagaatggacgcagaagccatcacaaaggtattcggggcaggagaggtagaccggatctatctgaatttctccgatccgtggccgaaggatcgccatgccaagagaagactgaccagcaaggagttctttgcaagatacaatgtgatcctgaaagcagatggcagagtggaattcaagacggacaaccgtcccctgttcgatttctcagtggaatctgtgaaggaggctggctggaagctggatgcggtaacctacgaccttcatcatgatgaggaactgtgtcaggggaatgttatgacagaatatgaggagaaattctcttctaaagacaatccgatccataagctgattgcggtcagataagaaatctgaagaaaaagtaaaaaaattataaaaaaagggttgcattttttgtaaccataccgtataatatgttttgttcgctgaacaacacaaatttataccgtatgcgcttctagctcagttggtagagcacctgactcttaatcagggtgtccagggttcgagcccctggaggcgcattgcagagcactgtttttgggatgtagagcccgggggcggtgttcttttttgttatctattcagagccatgcacatgcccgtaaatatgcgcctcatgcttgcatgatggcacatatttcggtgcatgtatatggcgagaagccatacatgagcaaaagtcgctagatgtccgggggacatctgcttagcgaggaccgtagtgaaacggagacagcctcgtagaggcg

SEQ ID NO: 433 - DNA, 32759 bp, Unknown
  16S sequences of unknown bacteria
aacagcatctgcgggaagtccgcctggataacctcatggactcggggtatctgcggccctttctggaaagcgggccgttttccctgttctcgggcaccggggtcaccgaacgcccggataccctctgtgccaaggtcagtgaggggcgcattgccatcctggtggacggcagcccctatgccattctgctgccctgcctgttctcggagaacttccagagcatggacgactatgcggagcgcccctattatgcggtgtttatccggctcatcaagtatctggccttctttttgaccatcctgctgcccggctgctatgtggcggcagtgaacttccatccggaactgatccccgaccagctgctcttccgcattgccgaagccgaacagggcatggcatttccgctcatgttccaggcgctgctgatccactttatctatgagctgatgcgggaggccggactgcgcctgccccgaccggtgggacatgccgtgagcatcatcggggcactggtgatcggcgatgcggcagtcaccgccgggctcatcagcaccccgatggtgatggtggtggctctgaccaccatcagttcctttgtgatcccctcgctgtatgagccggtgacgctattgcgtctgctgtttatcctgctgggtgggacactgggactgtacggcgtggtgctggggctggcctttgtgggggtgaacctctgctcagtgacggtgctgggcgttccggctacctcgccggagaccccgctgtccctctattctctgcgggataccctgatccgggtgggatggcggcagctgggacaggagcagttcatcatctcccgcaccgccggagcggatcagaacggagaaccagccgaccagaacggggagggacagccatgacgaaaaaccatatcggagcgcttccggcttcggcgctgatcttctgctgccggatcttctacctgctcacctattcgccccggggactggagtacggcggctctgccagcatggccgccttcctggcggcaggactggtctccatcgggctgtgcgccgtgttctggggtctgctgcgccggtgcggtgcctcgggcctgcccgaactgttccaccggcagggcagggtgtttgccgctttctgtgagctggcagtcctgctggtgctcaccggctcggcgctcagcactgtgatgaatgcctcaggcttcctcacctcggcggtttatcctggggcaggcgcccagatcacggcggctgccgccatgctggtctgcgcctatggggcgtactcgggcatcgaagcggtctcccgcatggcactgccggtggcggcggtgtttgtagcgggcctggcggtagctgccgccgggatcgcccgggagatccagcctgcctatttcacctttgccggggcagaggcagtcccccaggtgctggagctgtttttccaggcactgtaccacaataccgaagttctgctcttcctgctcctcaccgataaggtccggggggcgggcacggcagtctatgcccggggcgtgctgggctccatgaccttttaccagctgagcatcctgctggtcaccgtgacgctgggaccgtttgcctatgtgcgcagctatcccgtctattccatgctggcagcggcggagctctcggtggttacccggctggacatcatcaacctgctggtgtggattctggtggcctttgtccggggcgcagcctacctctactgcatggtgggctgtgtgcgccgtctggcacccggactgcgtcgaagtcacgccgctgccggggtagggattggcatgacggccctggcctggcacctctgcggcagtctggatcgtgggctggagctgtgggaactgtggagcggcgcggcgcccttcctgctctcggcggcaattatcctgctgagcgtactggcggcgctggcagctggaaagaaggtgaaatcatgcgaaaatggctgattctgatggcagcgggagccctttctgtcctgctgaccggctgtatgggcgcagtgcccatcgatcagcggatgctggtgcaggcggtgggcattgactggcaggaagggcagtatcgggtgacgctgcagatcttctccccggcccggaaggagggggagagcgcgggacaggaggtctgttccgcagccggcgaggacctggcagagtgtatgcggggtattcgtctggaaacggggcaggagctgtttctgggaaattgccggctggtgattctcagtgaaccggcggcatcggagcggacggcggaggtggtggactacctgctcagcgaccatgagctgcgtccgggcaccccgctctatctcaccgaaggggaggcggcagagctgctggaatccccggagcttccggcagagcagctcagtgagatgatacgctcggcagcggaggcagggttgtgtccggacagcacgctgctcacagtggtgcgcagtctggaaagcctgggcagcacggcggcactgggacggatcgaagccgatgaaaccggcggagtacaggcttccggtgcggtgctgctcggccctgtggggacagcagagctgaccccggaacagtggcggggcgtcagctatttcagcggagattcccagcagctggagtacacgctggactataaaggcggaaagctttacaccaacatcgcaccggtgcagagccgtctgaccggcggcgaaaaccccggagaactggcgttttatctcagtgtggagtgcaccatccaggagtactccggcggcacgctgaactgggacagcgctgaagtggcatcggtgcgtgcggtggcagagcaggcggtgcgccgggagctggaacagggctttgcggcactgcggacagcgggggcggatgtgatctgcgctctggagaccatggagaagttccagccggacttctgccgggggcgcacgccggaggcaattttcgggagcctggtgctgcgcccggaggtgcaggtgaacatcacagcgctgggggcaggcgcgcaggcatcggcctgagccgggggtcatgaatcaatgaacgaaaatttgccagacagaagccgcggaaatccggatataataaaaacgagtgcgtgagaacgcactcaggaatgaagctgttttaagtcgatgacttttacgggaatccgacggcggatgcattcagtgatggtatgcgcggtgccgtgggaactcatgtcccagaaggccagcaccagatcggcctctgcgatgatctggctgttccggaccagcggagccctccgtccgtatgtttcataatcgggcagatattcggtcagggggattcccagggtttcggcagcctgccgtgccagctgatccactccttccgcaccgccgctgatcagccgggtacagttgagagggatcatctggatgagatcgtccacagtaagctcccgggaatcccgggaaccgacgattgctacctgcatggcagtttccacctccgcaaacctgattctggtaaagattgtatcacattcctgattcgctgaaaatgacaaatcgcataaaacagtggattttcgcataaatcctggtgcctggcatcaggatcggaggaaacaaagcagatgaagaaattataccaggtctttgccggggcagtcagtctggcaatggcagccgtcatgggggtagttgcctattacagcactgccctgcccgatcacttctatgtggcggcaggagcggcggcagaggggatctccatcggcactgccctggagatccagggagagatccagcccatttccgcggaaaacggaactgcctccctgactgttctgggcggcatagccgtcaaacaggtggatgtgcagtttgtggaccgtgagatggtgatcccctgcggataccccttcggcatcaagatgttcaccgagggggtggtcgtggtagggctcaccgatgtggaagagaacgggattttccgcaatccggctcaggaagccgggattcgggtgggggatgtgctgactgaactggatggccagccggtcagcctgaatgaggatgtggcggcgatcattacctccagcgggggacgggagatctcctataccctgaagcggaaggaccagaccctcaccggtatgctgcagcccatccgggctgacagcggcgagtacaaagccggcatctgggtccgggacagttctgccggcatcggcaccatgacctactatgacccgtccaccatgatctttgccgggctgggccatgcggtctgcgatgtggataccggggaaaccctgccgctgggcaagggtgagatcgtggatgtcaccatcaccggcgtggagaagggaatctcgggccagccgggttcactgcagggcagctttgagggcagccgtctggctggattcatggcagtgaacagcgaaaccggtgtctacggtcagctgacctctctgccggtttccacgctaaaaccggtccccattgctatgaagcaggaggtccgggagggagcagcccagatctacaccactatttccggacgcactccgcagtgctatgacattgtcatcgaatcggtgaacctgagctccactgccaagaccaagagcatggtgatccgtgtcaccgatccggaactgctggaggccaccggcggtatcctgcagggaatgagcggcagcccgatcctgcaggacggcaagctggtgggagctgtgacccatgtgtttgtcaatgaccagacacggggatatggcatctttgccgagaatatgcaggaaactgccttgagtcttgagatccgttccgcagcctgatcagagcgatccggagggggggtttccctctccggatgctacataaaaatccggatttccatattgacaagagaggagaagccgccggttcgggagagggagatccgggaggacggaataaagcgtctcccgggatacgggaatccgccggtggcagaattccgggattccacaaaagctgtcaggcagaagagggcaggttttgtcggcacttccggggtgatttgtcgaactttgtcgaatcatgtcgaaaagcacataaaaagagagattaaatcgaatttatttatgcaacttcaataatattccgatgcgaatttatccggatttgatgtcgagtaaaaaagggatttctattgtaagttttggaaatatatgttaaaatatgtttgtcgatacagcaaaaacaaaaaacgactggaggaagacgaatgttggttaaaaccaaagtgcttatagcggaagaaaatcaggactttctggacaaaatgtgcagcttgctggcagaatgtggctttgagatggtttctgcgccgaaagatggccttcagctggtggaccgcatccagacagaacgcccgggaattgtactgatggatgtattccttcccggactggatgcactgggtgttatgaagcggatcaatcagctcatggaaggggatacacccaaattcatgctgatgtccacctttgagagcagcactctcgaacgggaactcatcgcagccggcgcgctctactatttccttaagcccttctcgccggaaacagcggtggaacgcattgtccagctcactggcggcagtcagccggagatccgtcctgacccggcagacctcgatctcaccgtcactgagatcctgcatcagatcggtgttcctgcccatatcaagggatactactatctgcgttcttccatcaaaatggtggtagaggatcagagtatcctgtccgctattaccaagcggctgtatcccgatgttgccaaggaaaacggcaccacggcttccagggtggaacgggcgatccgccatgccatcgaagtggcctgggaccggggcaatgtggaagttctggaacagtattttggctataccatcaattcctcacgcggcaagcctaccaacagtgaattcatcgctatgatcgcagacaagatcaatatgaatcgccgcaaatatgccgtgcagtagtcgagcctgagaaaagaccccggagaccggttctccgggatcttattatttgcaaaacctgggcaggtgcgctataatggacaggtcaggcacaaaaagtgccgggacttttcatattacaccggaggcaggtattggtcaggcagagaggaatgcattcttgattccactgggactatggctgcatcggcagcgattccatccggtcacagggaggataagaagatggcatttcatgcggtgattttcgatttggatggaaccctcatcgactccatgggagtctgggaggaagttccggatcagctggtctgccggctgggaggcgagcctttccccggcctggcagacgctctgcgcacccgggatctccggggcggggctgagaagctcatccagatctatggctgggatctcacagccgatcaggtgctggaggaggctgaccgtctgctggacgaaacatacagcaccgctgttcctctcaagcccggtgccggggaactggtgcggcagctccatgaaaagggagtgccgctgtgcatcgccaccgccagcaccgagggacaggctgtgggtgccatgcggcattttggcctggcggactgcttctcctttgtgctgagctgtacccgctacggcggcaagaaccgtccggatatcttcctggaagcggcctggcggtttgatctccagccggaggagatcctgctggtggaggattcgctctattcggtgcgcacggctcatcaggcaggctttggcaccgccggagtggcagacacctcagcggaaacagagcgtgctgccatggagcagacctgcgattatttcttcgaaaccctggcggacttcgatgtgccggtgactgcgccggagcatggatgatccgtttcccattccccgtatggctgtttgccgtgcggggattttttgctgccgggaaaccgggaatatcatgcttataaagcataaaatactgatataacaaggtattggacatataaatttcccatcccttataatacaatcagacgagaaccacaccgaccggcgctgcaaagccggtctgactgaaaaggagatggggagaatatgaaaaagatcctgagtattctgctgatggcactggttgcggcgggcatgactgcctgtgggacagagggtgagccgtctccggaagcggaacagcagccgtcctcccagcagactgcggcagaggacccgcagccatcggaatccgggccgcagagccggtatctggtggtatatttcagctatgcggagaatgcggatcttccagaggatgcggatgtggaggcctcggcgagcatccagcgctggaacggcaccctcaccggcaataccggcgtggtggcgcagatgatcgctgagaccgccggggcagaggtgttcccgctgcacacggtggagctctacccggatacctatgaggccaccatcgaccagggtgagcaggagcgcgccaacggagcccgtccggagctgcaggctgtgccggagaacctggaggactacgatgtgattttcctggggtatcccaactggtggggagatctgcccatggcggtgtacagcttcctggacgaggtcgatctcaccgggaagaccatcgctccgtttgtgacctccggcggcagcggtttatcggggacaccggataccattgcgacgctggagcccggagctgaggtccgggaggggctgacggtccgcaataccaatgcagccgatgctcaggagagcgtagaggtctggctcacagacctgggctatctgggttaattgccggaacagggaaacagaatgcggaaaagccgggagcaggatctcagattctgcttccggctttttggatggttcggttcaggttttgggggtcaggccaggtggaagacctggatcagcatgagccaggccaggccgtagtacgagattacagccaccaggtcattgacggtggtgatgagcggccccgaagccacagcgggatcgacgccgaatttatcgaataccatgggaatggcggtaccggcaaagctggaaatggtcatagccagcatcagcgcaatggcaacacaggcccccaccgccatggaatagggcaggggatagtgcttgagcaccatggtgtagaaggtcacaacgccgaaggcgatcacacccagcagagtgccgttggtcaggccgacccgcacttccttggagatcaggtgcagcttctcggacatgggcagggcttcatcggtgagcacccggatggtaactgccagcgactgggttcccacattgcctgccatatcgaggatcagcgactggaagcagatcaggatggcaatctgggcaacaatctgctcgaacatgcccaccacgctggatacgaacatgcccaggaacagcaggatcaccagccagggcaggcgctttttcatgctgagcaggaggggttcatccaggtcgtcatcggtgccttcggagatacctgccagcttgttgtagacttcccgggattcctcttcccggtagtccatgatgtcctgtacagtgagtacgcccaccagctgatcagcggcgttcagtaccggcagggagtcctcctcatagtcactgatccagtccatgcactcctcgatctggtcgtgatcgtgaacgaagggataggagtgcacaatgatcttgtcaagggaggtgtagtcccgggcccggatcaggtctttcagatcaatggcgccgcagtagagcccctgatcgtcaatgacatagagggtggatatgttgtcgttctccgcgctctgacggatcaattcccgcatggcctcttttacggaagcggtctgggggatggcaatatagttggtggtcatcatgctgccgatctcatcatcggtataggaggcgatcatccggatctccccggaggtctcctcactcaggtgaccggcgatcaggcggcgggtctcctcgggcagctcttccagaatttcggctgcttcatccgaatccatgctgtccaggattgcagcggccttgtctgccgggaaaccggccagcacctgttccggctcatcgcagtagggcaggatctctgccagacgcagggcacccaggggcaggaacagtcccagacgctcctccggggtgagctgttccagggcctgggcaatatcatagtcgtggtagtcgttcagacgctctgccaggacagcgggatcggcagtctgatggatcagggccaggatctcggctgctactgcttcattgataaactcatgtcttctcatcatcggtaattcctccttttctgctgcaaaaaagagaaaatgcgcacaggaaatactcccgcgcgcagcaaatgatgaggacgatcctcacagcatatcggtcagacagacagcaagagccatcccgtccggcagacaggggatcttccgcatgaaacgcaggcagagcagtttcctgtggattttcggttgttcacagttctactgtcgccgtccatgcgatcacatccttcccgaacggctttggctttttcttccatatcccatatggacatggagtctcctatccctttttatcatacccggacagaaaagtcaagtaaacaaattgtgtcgtatcggtaaacgaaggttccggcatcttgcaggaatttcctgaggtgctatactggaagcagaaaccagtgggagggggttatgcaatgagcttgtgggtgccgaaactccgggcggagtatatcattgaaggggcactctatcaggaggcgctggactatgcccgccgttccagggcctatacttcggaccggcatgacttccactccggcggccttgacaataagcagcagaagatgctcgagggcaagctcggggagaaggcgttcaagctgttcctgcaggataatggcatccggtttgaggaggatcacagcagctatgatgaacgggacgagtatgacttcctgctccggggctcggggctgcgcctgcgggtggatgtcaagacccgcaccgaggaattccatatccgcacattggaactggtggaacagaccatctcccatcccaaggagctgtatgtttccgcccggctctaccgggagcggaatgcggtccggctgctggggtggtttacccgggaggatctgctcacccagaggaagatcgaaaaccagggctatctggataactatgtgatgtacgaccggcagctgcgcccgatggaatcactggcccggcgctgccgccggtacttcccgttataaaacagattcggcaaaaaagaccgtccgataaggacggtcttttcttattccccggaaaggggcggaagatagttggtgatgagaacctcctgagtgttgccggagcggtccttggcatgatagctgcagttggcatagttctgctccagatgcagcacatggtaccgctggctccagcggatcagttcctcattggtcatgcccttgtggacaaatacattggagagggcaaagcgaattcccccacggtccagttcgtccagcagacccagcagctgccggtcctccagtggagtccagtccttgaagccccggcgcccatcgttgtaggagccgttgctgatgaggtagggcgggtcgcagtagaccagatccccgggctgcagcaccgagaagtcaaagctgaggaaatcccgggtggaaaagcggatgtccttctgctggagcgcctccacaaaccggacgaggttggcctcaatggaaggattataggcgctccggttgcgtccaaaggggatattgaattcatgcttctgattgaagcggatctgatggttgaaggaatagcaggtgagcacaaagaggtcgatggggcgtccggtgcggttgtattcccggcgcagggccaggtacccctcggtattctggtcggagagctcatattccgcgatgcgttcccggatcagtccgaggatgatttcagccggtgtgccgcggaagaactcatacagcccgatgaggtaggtaatctgatcgttggcgtagatcaccggggcatccacattgatacccacattgaacccaccggcaaacagatccacaaaccggtgataatcccggggaaaagccggcagaatccggtcgagcagacgatattttccgccggtgtagttgagcggacttttgatgtagcggttctgcggcatggcgttctccttctgcggacgggtgggaattttcgtgcaattcattatagcacagaaccccattccggctcaaccggcacagacggatttcccggtatccatttctgccggaatagaagcaccggcgtcaactgaaagaagcagatccgcaaaacaaaaagcatatcccacggaaagccggggatatgcttttttgtttggggtcagggttcagcgggcggaaagtcagttctcccgggtaccggaggcatattcgcccatgaagatgtccagcacctcccggggcggctggatcagcgagccctcatgctggcatttccactggacctcctggctgatggctccgtccaggacgccatccactgtctcgccgtcctggatagggttgcctgccagcagcaggtaggaggccacactgtatgcgtgtcccaccacccagttggggtccatatcgtggaagtggtactgcaggtcgggcaggaacagggtgctcatgcccagcgtatccaccagcatgtcgtcggtgccctggatgttgaagaaccgtgcgttgacgccgaaccggataaaccggtccgggccggtgatggtattgccgcgtacctcctcggccttgagcagcttgccgcagttctggaagtagaaggctacgcaggtggggaagagctctgccagtgcctccaggaagtccatatccaggtcggcacgctccagcgggtccagagcggcagtgagcatatccacgccgacgatctgccaccggcactcagccaggatctgatcccgttcgcccatacagtcccacatctggctgcgggtgaaggggtcaaacagatcctcagagattttggagcaggcggtgaccatcagctgcaccggagccgagccatcctggaaggtggccatgtggtccagagcggcaaagcctgccatcttctcatcatggcagaagcagtccagccgtccgcagtgctgctgcagaacccgcagcatggtatcccggtcagggagctctgtgggctcccggaaaagcatctggatcaggaacggcccgccggggcggggagattcctggctgagatcctgctgatatacttgatccatttcagattcctcctgttgatgttatggggtttatcgaatcggtactgggtatatagggcttaatcccaccagaagaaccacttatccgactggcggagggtatctgccagccagccgatggaggcatcttccggtccctggtctacgacatcgggacagaacgcatactgttccatggcaagctccatggcctgatccgcaggcaccggagcaggcagtgcacactcgagcacatcgtgggtaatcactgccggcacagagccgtgctgttccagccagtaccgggcgatcgccatcagttccgctgtatcggggcattcgttccagccgccgaagggcaggtaggcaaagacttcccagggattcttcaccgggatctttgccagaatcagcgggcaggtgcgtcgggtgtcataattccagtaggacaggaaccggttcccgggctcgccgccctccatggtaccggtgatctcctccagactcatgtcgtcgtccttcagctcagagatacggtcgttcatgcggctctgcagcaccgttttgccatccagcggggcggcgctcagagcggccttgcggtacttggcgacctggatggggtcaaagccatagtcctcagcgccgtcgctttcgggatcggcgttcagaatcagcatttcccagagggtttcgtccacagcgaccagcaccggcaggaagccctcttccataccccggcggcgggcatagctgtatgccgcggtaatggggtcatcgtcccgcatgggcgggaagtattcacagtcgcagcccagatactgcatcatggcctgggccagttccgaaggctcctcgtctgacggctcatactgcagccagctgtcccagcgctgctggatcagccgggccatatcctgataatagacctcgtcaaaggggataaagagataggtttcattctgatacttctccgagaagtactcttccgatccgaaccggcgcagggcatagtcatcaatatccgacgggaagtagggcgcgtccccctgaccataatagtactgggagaaggcttctcctttcttactgaacatcgagtgccgcagtacgccgcccagctgatcccggataaagacccgcagatcggttccggcagggtccccggcaaactggcgcatcagatccccgtattccgcacggaagctctcgctcatccggtcgtgttccagattccagcgcaggtagattgccatgtggttgtaggcggtaatctcatccaccggcaggtgtttgtcccgcagatcccgcagatgccactgggcatcatccatccggtccttcatcgcctccagctcctcctgtgtgggagccgggccggcttcttccagaatatccgggcgttccgggtccaccacaaagctgacaccctcgtagagttccagcagactggcggcgccgaagcggatcttatactccatctcgtcctgatagagcggaatgacctgatagaagttgacctcctcgccctcagccagcggacagatacaggcatcttcatccacctgctggggtgtcaccagaatggcggcagagagctgggtgctgtcggcatagggctcctggttatcgatggtgtgtccccagccaagccaggtatcgttgatgccgggcagccgtgccagcgccttgagcagccggacaggccagtaccaggcttccttctgcagcgagtcgtgatccagcttccagtccggcggcagggcgatcagcagttccgcccgttccagcttctggtccgccagctcctccgggacattcatgcggtgcgcgcccatgcccatggtcaccagggtgtagtagttcttctccgggctgggcggaatcaggcagatgtccacatggatatccggggagaccagctcgtgcatgactgtctcgaattcaccgaagtggctggagatgtgttcctccacccgttccagttctttcggggtatagtattcagtttcaaattcattggggtcgggcatgtccggctcctcctggggctccttcggacagccgttttcatccagcagaaccgggaatggctcgccctgttccggacgccagatcagtgccgcagcgtggctgaggtcaaagaccacggcttccagttttccgggagtgccgtccgggagggtcagccacatgccgctgtccagccgctccttctgaaggcgcagccagtccgccttgagtttggaaagaccggcccggttcatgcggaataccagctccactgtctgtccctgcactgtataggggaaggagcagtagggggaatcgacggtgaaggtgtcagggtcgggggcaaacagctccataaagcgttccagtcctgcgggatcggtgttgatgcaggagatggcctggagcttgctgtccgagttctcgtccagtcccttctggagcagcaggtcggcatcggggtgaatccagtggtattccatctcctcgagggtggctcccttttcgatctcctggcgcagggtggtgaactcatagtcgccgggcaccagctccaggccccggtcggctgctgccagtgccccggcacggtcgccgaagtgactgcgcagcttgcccagctgcagccagatccacggatagtccggctcttcccgggcgccctgttcggcataccggagcgcctcctccgggtgtccgcagtaggtcaggccgatggagtagcggtagtaccaggtgccgcagccggcggcattcttctccgaatcccgcatccactggacaccccggtaatagaaggggtattcgtcaatattcatgcaggcatagccgtaccacagagcgatctgcaggtcctcccgggcctgctgctctgtaaatcggcgagactttacaccgttttcaacgaaggtttccaggtaatccagcgcccggtagaagtagccgctcacatctccgatgaaggattccagcgttttgatgtcctcctgggagagcagggagccggtttccgggtccacatcgggggcaggagccggggcgaggggtgcctcctcgggagagatcagccgcacggtgctcacatcccggcggaagctgtggaagctggcccagggcaggccggatttttcaaagaaggcgacagcggcatccaggacagccggcagatcccaggcgatgaagtccaggtatccggcgtacagtccggtggcgccgcccaggagggtaaaggcatcctccccggcctgatccagcagagcggcttccagttcgtcccggaaggagaggatcgcctcactgcggttctcgccggtgaaggtgtccagcgggtagatgagaaatcccgccatgacaccgtcctggtgcagcaggtccatggtgtcgctctcagcccgcaggtagtccccgacgagcaccgggagccgggtggaaccggatacggtatccagccgccagtcagcttccgggtcctgttcgggctccatctggtagaccgcgtaggccgaatccaggtaatccccggcggaagcgggtacctcgaatcccatctgctgcacccaggcgggcagatcgctgagcagcatatcctctccgtccagcggggtatcggaaatatcaaaaccgcggatcagcgccatagcggggatctcacccagcacctggtctaccagggtggagagcagccaccaggcctgattctcgtcctcccggagcagcgggagcagggctttgcagtacagggtcagggagagggagtcatcatcggtcttttccggcagcacccggacatcctgaccggagatctccattcccgccgcagtgcggatggagaagttgaccgaagcctggcgtcccacagggaagttccagtgttccagcagttctgcgggggcatggcgctggaagtagaccagctcatagagcctggcaagattcccctcgggggtgaggatcagttcgtatttctgaccgttgtgtcccacttcaaaggcggggttcaggaaagccgggagcagggctgtttcacacaggctgatgagctcctcctggacagcggagcgatcccgtacatccagaagctgccgcagctgggcttccactttggaaaaggcagcccaggcctcctgggtgcgctcccggaaactgggatcgaaccggggcagggccagacggcggcggcagtcgtcgatcatctgctgggtgtcctcatcgccgggacgggcttccagagcctgctcgaaatagcgcagggcctgtccctcctgatccaggtagtaataggcatagcccacacggaaattccagttgtgatccccctggaaatgctcctcatagggcaggagcagggacagtgccttttcatacatttccttatcatccacatcggcggcgttgttgtaggcccgggcgagctcactgcacagctcgggggtgcggctctcttcggggatggcttcgatggtgtcgatgatcttctggtactcgtccttctcgttccagatctgacattgttccaacagggtcatattcatgtcctccttcagcagtggattggctatggaaagcagtgttttttatatggaaaaatctgcgcaggcagaaagggctcttatcagcgctctgcctgaattccatggacagcgggagatttcagcaggcggcatggcccggcgagcgatctcccgggaatgttccgctcagcatacaggtgtatggacagcggatacactctctcaattctaatgatactaagaaaccctcacaggcgcaatccatgaatcacacaaaaaatgtgaatttttatatccaatttcccaaaaggcagcagcatataaaaactcccccgtccggcttggaaacgggggaggagaagctgaggccaggctcagcgcagatattttccggtgatgctccggggattttcccggacctgttcgggggtgccggcagcgacgatctgtccgccggattccccgccgcccgggcccatatcgatgatgtagtcggcattgcggatcacatccaggtcgtgctcgatcaccaccacagtggcgcccttttcgatgagggtctgaaacacgcccagcagagtcctgacatccagcggatgcaggccgatggtgggctcatcaaagacaaagacggtatccgcctggccccggcccatctcgctggcgagcttgagccgctgggcctcaccgccggacagactgggagtggcttcccccagggtgaggtagcccaggcccagatcccgcagcaccgaaaggcgctggctgaccgttttccagccggcgcagaggggcagggcggagttgatgtccttttccatcagatcggggagggagtagctctgtccgtccggggcggtgtgacgcacctggtcagcttcccgggcatagcgggaaccccggcattccgggcaggggatctccacatcgggcaggaactgcacatccaggtcgatgaccccggtgccgtcacagaccggacagcgcaggctgccggtattataggagaagtcgcccgccttgtagccggcggccttggcatcgggggagcgggcgtagatcttgcgcagttcatcgtggacaccggcataggttgccaccgtggagcgcacattgatgccgatgggagtggcatcgatgagcttgacccgctcgatgcccggggcctccactgcacggatatgctctggcagcggggtgccggaggtggcggcttccagggccgggatcaggctttccagcaccagggtggtcttgcccgagccggatacaccggtgatgacggtgagctttcccttggggaagtccgcttccagcggcttgaccgtgtggatcgccccggtggagaggtggatgtgcccctgttcaaacagctgttctgccggggtgtggggacggaccatcgtttcggccttgccggagaggtacgggccgatctgggagtccggctggcggcagagatcttccaccgtgccctgggcgataacctgtccgccgccggcaccggcttccgggcccatctctatgatccagtccgcttccgagaggatctgggtgtcgtggtccaccagcaataccgagttgccgtccgctaccagatcgtgcatgaccgcagtgagaccgtcaatattggaggggtgcaggccgatggagggctcgtccagcacatacagcactccggtggtacggttgcgcaccgaccgggccagctgcatccgctggcgttctccggtggagagggtggaggcggcacggtccagggtgagataccccagtcccagttccatcagccgccgggccgcggtgcggaaggagtcgcagatgctctccgccatgggacgcatctcctccggcagagagccggggacaccttccacccagtcagccaggtcggacagggtcattttgcaggcttcatccaggccgatgccccggagcctgggtgctcgggcctcttccgaaagccgggtgccgccgcagtccgggcagatgtcctcccggaggaacttttccacccgcttcattcccttttcgtccttgaccttggagagggcattttccaccgtgtataccgcattgaagtaggtgaagtccagctccgcggcgtcattggagttcttggccttgtagaagatgtgctttttcactgccgggccgtggtagacgatctccttttccgcctcggtgaggtcccggaaggggatattggtgcgcacccccatctcccggcagacatcggtcatcagcgaccacatcagtgtgttccagggggcgacggcgccttcctcaatggtcagggaggggtcagggaccagggtggcaaggtccacggtgcggacaatgccggtgccgccgcaggtacggcaggcgccctgactgttgaaggcaagactttcggcagccggggcatagaaatgttccccgcacaccgggcagaccagttcctgtcccgcagccactgccagggtgggttcgaggtagtgtccgttggggcagcggtgatgggccagccgggagaacatgagccgcaggctgttgagcagttcggtaccggtgccgaaggtgctgcggatgcccggtacaccggggcgctggtgcagggccagagccgccgggacatagaggacttcgtccacctcagcccgggcagcctgggtcatccggcggcgggtgtaggtggagagggattcgaggtagcggcgggagccctcagcatagaggacacccagtgccagggaggatttgcccgaaccggagacgccggcaatgccgacgatctggttgagggggatatccacatcaatatttttgaggttgtgaacccgtgcgccgcggatctggaccgcgcgcgggggaatggatcgttcttttatggggatcatctcatttctgtgttggtcgtgtgggaaagccggggagggcgaggcgctgttccccggcggtggattctccctctattctgcgccccgggcaggtgtgtgtcaagaccggcggcttgttttttggcttcatagttggtacaatggtaaaaaacaaagctgtgtcccggacatgccgcactctgccgggccgcaggaaaacggcagcggaacactcccctgccagaggaggagccatgcccaaggtagcatattcagaagaggaccgcagacgggtccgggaagagctgctcaccacagccctgaaactcatgtccacccagggaatccagcataccacagtggaacaggtgtaccggtcggtggggatttcccgcagctttttctatgcctttttccccaccaaggaggatctgatcgtagaggcgctctatctgcagcagccccgcctgctggaatatgcccgcagccggatggaagacccggcgatcagctggcgggaaggggtgcggcagttcctggatacctgctgctatggcggcaggaatggggtggcagtgctcagcgtggacgagcagcagatgctgttccagcggctttcggaggagagcttccgcaccttccgtacccggcagcggcagctcttcgaaggcattctggagagcttcggcatcgctccggagccggaccgggtggatctgttcatcaatctgagtctggcggtcattgtgctgtcccgggcgatcccccagaccttgccgatgtttgtgcccgatgccgcccgggagaccacagccttccagatccgctgtattgtggactggctggaatccctgcgggaacagccgggagaacagcactgaaaaatcccgcttttcacagtagatacagaaaaacggtgtccttttaggacaccgtttttgctgtgcgttatttccgggggttcagccgggagcgtcaaagggccgaatagctgattttcagcgtcataaccggcagggcgacacccgggctgcgggtgatggtgtgcttatcctctgccgagaagccgatggtctcgccatcgtgcagggtaactcctcccgacagcacatattccaccatgctggcaaggaagtcccgcacttccgagggatcggcatcggcgtccagcacttccatctcgtcaaagccgaacacatccatgccgtaggtatagccgcagatgcccttttcgctgcggtagagcccgaaccagatccagttgaagatgggcagttccccttcctgcatcatgtcggcaaagccctcatagaaccggggctcgaataccacgccgctggtatagacacccagggcatttttctggcggcagcaggaagccagcagcttgacatagagcttgccccgttccagcagatcctcctcctgacccagcacaaccaccatcagatgggcctggtgagtcttggtgacctccaccgcttcgggccacaggaagttgttttcggcgttgagttctgcctcaccgttagggatcggcgctgccatcaggctgacagcggcgatcatcttgccctcctcaaagacaagggcgtcatcgccggtttcctcatcttcgtcctcctggacagtaaggccccacttctcctggagatcccggataaaagcagccttgtcccagctcgggtcggagagcagtacaaatccggcaaaggctccggtgcgctcggaatcctccccctgggagtcggccttttctgcctgctgcatccagtaggcacggatcatctccaccatggcagtggccttttccaccgcagtggattcgtcatagggttccatttcactccacacatgaccgcagtgctccagctcatcgccttcgtagccgccgcagacacccagaagccagcttcccagcagggttttcttgtagcggaacagatagtagcgcagtccatgcagttcaaaggtgccggtgcattcgatgcgggccggggcttttcccagctcctgggggtgggcaagccattccttcatggcctgcagagcagcattttcctgtgtttgagccatattcagttcccctttcacagtcggtttcgggctggcgcggacggtggaaccggcacgccattgttaagaaaagtatatcaaatcccccggggaatgacaagggaaagcctgctgtccgggcggggattttctcagaatccggggcctgagaacggggaatatacaggctttccccagaaggcagctgcacagcggatgatgcggttttatgctctggtatctgtaccattttctggcgcttcatggtataatttacagacagacgagtgtatctgagagagaatatcccgggccgggtcagacggtgccgggcacagagaaggggaaaacagatggaatacctgagcaaacgggaatatttaaggcggtatgtcagccgggtggatcagctccggatcggagttctggggctgctggtgctgttcggcggagccatcggcattgccctgggactgcgggggcagaatcatggcctggctctctgggggcttctgatcgcagtcatggggctggggattctgcagttccagagcctggcctgttcggtgggaacgatggtctgtgggctggctggcgtgacagggctgatcgacggcatgaatcccatctgcggcggcctgctgattctggcagcgatcggcgcgatccggctcacatatctgctgaaccgtgactatcgcagttaccgggacagcagtgccccggcatcgtccccacagaaccggcaggccctctccaaaggggacggcccggcggcagccgctgtatttatcccgctgctgggaataatgtgcagtatggggctgattgccttttccctcagccccttcttcctggagcagctggtggggcatgcccgcacaccggaggagcttctgcaggggtacagccagtggtatatcgcggtgatcagcgcagtggcgtcagcgatcctgatcggggctgtggcagtgatcctttactggaagtggggcatcggtgtggaaaagggcatccgcctgatgcttctcaccatggccttcccgctgctgctgggcgggttcatgctgctcagtgaggaggttcccaccctgctgatccactcctgggaggatctggcgcagatccggagcggggagctctccgaggaaactgtctggctcagctccaaaacctggacggaacggcttccggggccttacagcagcggacagcccgagccggtgatccggtacggcgccaccggaatggagcccggcagcggctgggaggacttctatatcccggaaaatctgggcttccggcccgacccggaaaccctctataaagaaagccagagcatcagctggaatgaggagcatgcccagaaataccggctgcggtttaccgaccatttccggctggtggtttcggtggagccggtggaggaataggcggcatcttgcaatcaagtcaaaaagcacacaggaggaaagtcactcctgtgtgcttttttcatgcgtgttcggaggtgctgactgtgccggaagtgctgtccgggtcaaggggcagccggatccggaagcagaccccctgcccgaggttttccaccgagcaggagcctccgtgggccgtgacagcggcctgtacaatggcaagtcccagcccggtgccgccgctttcccggctgcgggagcggtcgccccggaagaagggttcccagagatgggggagatcctcagcggggatggggagcccgtcattgcagaccgaaaggcaggcccagctggcttcccgggtcagggcaaggcggatcttaccgtcagcggggcagtggcgcagggcgttggagaggagattccccaccacttcccggagccgttcccggtcgccggtgagcgtgagttccggcagatcagcggtcaggtggatctgcttctgctccagttggagctccagcggctccagtacctcccggatcagcccggcaaactccagcggttcccgatgcagagctgccctggattccagccgggagaattccagcagccgtcccaccagttctgccatacggtcgcattcctccagcacgatgtcaaggtactgctccctcttctcggggagaatgtcctcccggagggcttcggcgtgggtgcgcaggacagccagcggggttttcagctcatgtgccgcagcccgggtgaattcccgctcccggcgaagctgtccggcaagctgatcctgcgcctgattgaaggaaaccgccagggcgttgagctcggtgatggggccgtccacccggcagtgtccggcggctgcctgttgggagagctcctccaccgggctggtgaccttccgggacagatgccccgagagaagcagcaccactgccgcagtcagcaggaaggtgctgatatagagaaactgctcctccttgatggcagctgtcagggtgctgcactgtccagcaaccatccgcatggtgccgctgcttccgctgctcataccggtgatctctccgccccgggtctggacaacccggtcttcgtctgccagctcccggctcacaatggcctgggcctcccggaagtttttcaggcgcagttccatatccaccggcgaattttccagctcgcctccgctgtagctggtgagcccagggagcaggacgctgctgatctttacatagtgcagatccagcgtgatggtgggttctccgggggcggtggtttccaccatcgtctcggttgtaccgtccgggtggacgatctcaaccttctgtacctcaatggcatagcccggcagttcgattccggtgatccgggcataccgtccatcgcagttggggtctttggcagcgtcctcagcaaaccagccatccggcgggtagagggtataagaccagtgctgaagccggtgctccatgatccactgggccagttccaactgtccggcatcgtccagaccattgtcaaaacgaaggtgccatcgctgccccatatcaacgtcggcttcatgaccatatccccaggccaactggctctggatcacatggttttcttcgtcccgtgtgacaaatgccatgccgccttcggcaatatcggtgagggcaagggaactgctgctcagattatccaccagaatgtgttcagcttccgctcccagcccgttttccagatttgcctcgtaatacgaccactgctcctccaggtcgtcccgggcgtccttgtagatgcgctggactgtgatatccagccggtcctgggtgctggcagtgagcagcgccatggtgccgagccacagcaccgaaaaggccagcatgagcggcacggcgatccgccgccggagccggtatgcacgcagtttctccatagtatcacgcctcctccaatcggtatccggtcttgtagacagttttgatctgcgtgccggcgctgcccagggcggcccgcaggctgcggatgcgcacatccacagtgcggtcatcgccgtcgaagtccagcccccagaccttgtccaaaagctgactccgggagagcacctgtccccggttgcgcagcaggcagcacagcagggcgtagtcccggggcgggagcttcactggctgaccatttgccatacagagctggctgccggtatccactgtgatcgctccgcaggtgagctgttccggatgcccgccccggctccggcggatcagcgcctgggtttttgccagcagcaccgccagggagaagggcttggtgacatagtcatcacagcccagcgcatagccccggagcatatcctcctcgcctcccagggcggtgaggaacaggatcggcacctggctgttccggcgcacggcggcacagacttcgaagccatccagatggggcatgaaaatatccagcagaatggcgtcatagtcgtgatcccgcagcagatccagtgcctcctcgccatcccgggccagatcgcagtccagaccgtgggcggcaaagtaatcccggacaatatcccggatgcgtgcctcatcctcgacgatcagaacggaacttttcatacaaccacctctttcccttacaggataccgccgttttgtgtcggagttgtgttcagtttcattatagcgccctggctaagagcgcacaaggagggcccgcgggaggaaatttgcggaaaatgagaggcagaaaaattccccggcgccttttcacagacaccgggggaaaaatcagcttgttttgatggcctccagggcggagatctgtacagccttgttggcggggtagtagccggagccaaggccgattcccaccgagaacagcaccgcagccagcagcagccagggcgggacaacacagacccgggagagggtttcgctgccgacgacggcggcgatcagccgggagggttcaaacgggccggggaaggaggcgaggttgatgccgatggcgatgagcatgctcaccacgcatcccaccaggccgcccagaagtccgatggcgccggcctcggagaggaagagcagccggatgtcccggacatagcagcccagggatttcatgatgccgatttcccgggtgcgctctgaaatggacatgatcatggtatttgtgatgcccagcgccgccacaaagagggagatggctcccagaccgcccagcatcatctgtttctgacgggcttccttttccatgggttcccggatgctctccatcgaggaggtggagtagcccatggtgcggatctccttttccaccgctgccacatgggtgatgtcggtgaccttcaccagcacagttttgtagctggggtcggctttggcagagccctgcagatcctgaagcagtttcttcaggtcatcgatgttcatcagcagtccgtccgaggtttcactgcccttgacatagtcctctttcaggacgccggtggttttcaggggagtgcgcacctttttcccgttcatctcgatttccagggagatgggggtggaagctgcgtcaaagtaggggtccggtaccgaagccggattgccgtcctcaccgaacccgccgccccagcggtccacggtattgctgccctcgggacggaaggtgtcggcaaaattgtaggccaggtactgcccggtgagcacatcaccgctctgtctggcattctgccccgagatcagcttgtagcccatccggtccagttcccgggtgtcgatgccggcgacggtggcccactctgccacataccggtcattggcgccggcatagagcctgatggtgcattcatactcctccagattgagcttgggcgttaccgcggccacatgctccatgtgccggatctgtcccagggcggagtcgttgagcttgatcttgcccttgccgttctgtttgggagtgacagtgatgatggtcaggtcgcccatctctgccagcatccggttctgggattccgccatgccgatgccgatggacaccatgatgacaatggaacagcagccgatgagcacacccagcagggtcagcagggtccgggaccgccgccgtttgaggttctggatgcacatcttgaggatatctttccggttcattctgcatcatcctccgggttattgctgccggattctgtttccgacggctcctgcagatcgtcccagtcgtcccagttctcgtccgaagcatgggacagttcagtctgggctgtattcttccggcggcgcatccagatcactcctccgccgatgagcaccacagccgttccgcctgccagccagaaccagagtccgaatccgctctggggttcctcgtccggcagatcatccagttccaggtcagcatcaaatgcctcctggacttccagtgtcaccgggaaggtgagagtgcgcagtgtctggttggcgtcctcatagctcaccttcagggtcagttcggtgcgtcctgcctctctgggggtgaagataaagccgatgttgccgctcttgccggaatcgaagttccccaggtactgagaggcgctgggggtgtccacttcgccctcaatggaggtttccacattgctcacttcctccttgcccttgtttacatagggcagggacagggtgacctcctcaccggcccggatcatatccgggagcaccggagcattgacctggaagcggtcgggctgcatcaccggtaccgagagccggacttccgatgtggcagaggagcgcttggagccgtccatatactcatatttgcagctgaccgaaatggactgggcaccgcttttggcagtggtcagcgcctgcatccggatggactgacgctgtttcccggctgcggggatcttttcataatagaaggtgttggtgccgccgtccactgtaaagctgtccccgccgtccacagtgacgatcatgttttccaccgggcgcttgccggtgttgagcagggtgaagtccagcgggaagcgtccgccggcggcaacggtgctctcgccgaactggaagtcgctcaccaccacattcggcaccgagccatcctcggcggcctccgcggcattgaccgggatattgacccgctcggtggaactgccctgggccatttcgtctccggcatcgtagttgtatttgagatccacactgatgctctgggtcgagccggtcagttccttgcccgctttgagcttgagcgggagtttttcagtcttgccgggggcgatctgcttgattacaaaggtggaggtgttgttctgcaggatcagcgaatcggaggtggataccgaggccacaacgctctccatggcggtattgcccgcgttttcaagggagagcaccacaggaaattcctggtcgggggagatgggttccacagcactgcgggtgacgatcaccagcggctgggggtgcttttcattgctcttgaccgctgccggaatggtgacgcggtcgctggcagacccctggagagggccgctggcgccgtcataggtgaatttgagctccactcccaggctctggaccgcggcggagatggagtcggtggcctgcagcttgatggtgactgtgcccgaggactccccgggaatatcgctgagctggaaggaggaggaaccgccctccaccatgagcgactcagacgggctgatcactgccaccggagagcgcagggtggacttgctcaggttgcggaaggtgagggtgacctcggttttccgtccggggcggatgggtgtgcggacctcgctgcggctcaccagtacagtgggcaccggtgtggaatcggactccttttcagaggggtccggttcggcggcggagggggcagccgggctggcgggagaggcctccggctcagcggcataggcagtcatcggataggcagctgccgcaatggacagcgccagaaacagggagagaaaacgcttcatagacatggtcagttacctcgcagtctgtggatttggggaagtctgggaatggggtgtgcgctcatcgctgacgatctcaccgtcgatgagcttgaccacccggtccgcataggcagccatttccgggtcatgggtcaccagaatgatggtctgacggaatttccgggcaaagccgcagatcatctccatgatctcggcggtggtggcggagtccaggttgccggtgggttcatcggcaaagacgatgtcgggacgggtgatgaaggcccgggcgatgccggcccgctgctgctgtccgccggacatctgggaggggaagtgatccagccggtgggcgagtcccacacggcacagcattttccgggcgatggcctcccgctgttcctggggcattccccggaacatgaggggcagggcaacattctcggtggcagtgaggttgggaagcaggttataggcctggaacacgaacccgatgtgccgctgccggaaggcggcaagttcctcctcgggcaggcgggagatgggtacaccgccgatatagacacagccccgggtgggcttttccatgccggcaagctggttgagcagggtactctttccggagccggaggtgccgaaaatacagcagatctcgccccggtagatattgaggttgatccgtttgagggctacgactgtttcgtcctccagggggtactccttgcggatatttttcacttcgatgatgggttgttctctgggatactgcggcatggcagagcctcctttcaccatcactgtaccagaccagtcttaaaagcgtattcaggcagtcttaagatttcgtaaggtaagggggattcaggacataaaaaaggggtgacagccgccggggaaatatggatttatcgggggatcaggatctcaaagacagtgccgccaaccccggtttccggagagagccggagggtccagccatgggcttcgatgatcttccgggagattgccaggccaaggccgctgcctcccttggagcgggactgatcgcccactgtaaacggggtgaacagatccttgcgcagggcttcgggaatgccgttgccattgtccgccaggcgcagcaggacagcggagccggtctggatcagcgagacccggatgcgggtgcccagccggttgtgccgcagggagttgccgaggatattgtccagggctctgcgcatctggaaggggtccagacggcagggaaggcgcagggtttcaggaatatccacctccagggagaacccggccagatcgatttcattgaacttgtctgcaaggtattcccgcaggaattcacacaggtcggtttccaccggttccagacggaagtcggggtgttcggtcttgctgtactcatagaagctgttgatgagctcggtgagggcatcggcctttttcccgatgatctccaggtactggggcagatcctcctccgacacctttccgtcccggacagcgctgatgtagccggaaatcaccgtgatgggcgttttcaggtcgtgggagaggtcggtgagcatcttgatgcgctgttcctccagacgccgggtctcagcctggctttcggcgagctgccgggccatggcatcaaagctgcgccccagctcctggatctcctccgggcctccgcaggcggcggcagacaccggttccccggctcccagacggcggatggcatctcccaaccgggtgagcggacggcggaaatgccggttgagcagcacgatgaagaggagcgtcaccccgcagtacagcggaatggtgagcagccagagacgccctgccttgtcaaaggcggcctggaagtcggcgtcggaataactggaaagcaggagcagtaccgttaccggggcgccggaggagtcctgggcggattcccggtagagcgtatactggctggaccagcggttggtgagcagttccagttcccgctgggtgtattcggttttgccggggatcaggctggtgccgtccagcacacgcagatcctcgtccaggatcatcacctcggtctgggtcaggtcgtcctccagcatcagatcccggatcacgatccagcactgctgaccatcctgggcctcaaacggcacagcggatacagtatccccggcgtcaaaatccgcaacgcacagcagttcgtccggggtctggatggcgggaatccggctggtggaaacatacaggggttgtccctgggcatccagcacggcaaagcctccggagggccccaggtaccgccgggtgtctatatcggcatattcgccgttccggaactcccgggactggaacagggcatccgggtcgggaatatgcagcaggtccacatagaggcggtcccagagatggtagaatccaaagaagagcgcaatcagcaccagcgtgaatgccagatagtagcgggcaaacagcagggagatgcgccgggtgggtcggttatttttcaaagcggtaccccaatcctctcacagtgaccagacgggcaggcttgcgggggttgtcctcgatcttttcccgcagcttggagatatgcaccatcatggtgttgtcgtcgttttcgtagtattcgccgttgatggcttcgctgagctgaacccgggtgaaaatccgccccggagagcgcatcagcaccgagaggagcttatattcagtgggggtaagcggcaccggttctccgtccttggtgacggtgcaggtttcggggttcagggtcagcccgccggcggagtagactgccgtccgggaacggtcgctgcggcgcagatgtgccttgacccgtgccacgatctccagcgcgttgaacggcttggcgatatagtcatccgctcccaggttgagccccaggatcttgtcgttgtcctggttccgggcggacaggatcaggacgggaatatcgctctgctgccggatggcccgtaccacggcaaagccgtccagcttgggcatcatgatgtccaggatcaccagatccggcgaaccactccgcaccgcagccactgcggattcgccgtcagcagcctccagcacctcatagttttcgctttccagatagagccggagaatattgcggatatccgcttcatcttcggcaatgagaatggtttgtttcatagcggctcctccatccggcatgggcctgggccagatgcgctccgggccattgcctttctccagaattctcgctcacacagttccggggctttcccggtcaagcccattatatacgataacccgcatccggcgcaatgcggtttcgggtgattggtctgaaaatgccgcttttatggcggaacagaaatttccagaagatacagtttttatatttccgggatacattttgttgtataatggaggaagtgtggagggcatttccggacgcccgtccagacaatggaaaggagggcgtgatccagtggcaatcatcggaatcgacctggggacaaccaattccctggtgagtgtttatcggaacgggcacgcagaactgctccccaatgagtggggtgaattcatgacccccagctgtgtcggggtgctggaggatggaaccgtgacagtcggcgcagtggcaaaggaacggctcatcacccatccgga

SEQ ID NO: 434 - DNA, 9659 bp, Unknown
  16S sequences of unknown bacteria
ctcatcggcgatttcgacagcctcgcgcagggggagtatccggcagatgcctgcccgtgcgtcaggctgccggtcgaaaaggacgacaccgatacggtcgccgcgctcaaagagggcctgcgccgcgggttcacgtgctttgagctgcatgcggcgctcggcggcgatgtggggcacgagctcgccaacctgcaggcgctgctctttctgcgagagcatggggcgcgtggcaccttgcacgggcagggccagcgcgtactcaccatcgccccgcaagatggcgaggtgatgcttcagaccgtgccgggcatgcgcgtgtcggtgttcgcctttggtgccgacgcgcatggcgtgtgcgagcgggggctcaagtgggagctcgaggacgcggacctcgcccagtcgtttccactcggcgtgagcaacgaagcgctcggcactcgcatccagctgcgcgtgggcgcaggactgctcctcgtcgtgctggggtagcacgcacgctgagcgctgtcgcagcgtgagcggcctcttcgcacgctaaattgccccttgtgggtatctcggacaaagggtatgctttaaaggctgtgcgatttcgcgcagctgacactgacacatgctcttgcgagccgccccgctagtggccccgtcggatacgaggttgcgggcagtacggcgaagaccaggggcagaggattaacgaaaactggaggttttgcaaagctatggctacgactgtgtctatcaagtccttgctggaagccggtgtccacttcggacatcagacccgtcgctggaacccgaagatgaaaccgtatatcttcggcgagcgcaacggcatctacattctcgatctcaaacagaccatgtacgcactcgacgatgcgtactcgttcctgagcgtcctgggcgcctcgggcaagaaggtcctgttcgtcggcaccaagaagcaggcccaggagcccgtcaaggcaaatgccgagcgcgctggcatgccctacgtcaactaccgctggatgggcggcatgctcaccaacttcgccacgatccgcacccgcgttcagcgcatggaagagatcgaggccatgaaggcaaacggcaccttcgagaagtacaccaagaaggagcaggccgtcatgaacaaggagctcgacaagctccagatggcactgggcggcatccgcgacatgcatgacctgcccgacgcgctgttcgtcgtcgacaccaagcacgaggagaacgcggtccgcgaggcccatcgcctgcacatcccgatcatcggtctgatcgacaccaacgccgacccggacgagatcgatttcggcatccccgcaaacgacgatgccatccgttccgtcaacctgctctgctccgttgccgccgacgctctcgtcgccggtgctggcgcagaggtcactgaagaagaaatggctgccgaggctcccgctgaggaggctaccgaggccgccgagaccaccgaggaggctgcagagtaatggctgctatcaccgctgcaatggttaaagagctccgtgaggccacgggcgctggcatgatggagtgcaagaaggccctgaccgaggccgacggcgacttcgacgctgcggtcgacgttctgcgcacccgcggtctggctgctgccgccaagaaggccggccgtgccaccaacgagggccgcgtcaacgcgctcgtcgagggcaagaagggcgctgtcgtccaggtcaactgcgagaccgacttcgtcgccctgaccgacaagttcggcggctacgtcgacaccttcacgaaggccgtcatcgagaacgaccccgccgacccggcagcgctgctcgagtccgagtacgagggcgagaaggttcaggatgccctcaccgaggctatccacgtcatcggcgagaacatgcaggtctccaacttcaagcgcctcgaggtcgagggcactggcgcgcttgtcccctacatccacatgggtggcaagatcggcgtcctggtttccttctccttcaacaacgaggccaccgcttctgacgagaagttcctcgccatgggcaaggacgtcgccatgcagatcgccgcgaccaaccccgtcgcgctcgacgaggaatccgtccccgaagaggtccgcgagcatgagatgagcatctacaaggctcaggctgcagagtccggtaagcccgagaacatccaggagaagatcgccacgggccgtatgaagaagttctacaaggagaactgcctcatggaccaggacttcgtcaaggacccggaccagaccgtgacgcagtacgtgaactccgttgccaaggagattggcgacaagatcaaggtcgtcgcgttcgcgcgcatcgcgctgggcgactaagctcgactctcgagtttcttactgagaatgaagggccggtgagcatcacgctcgccggcccttttgcatcgctctgcgatttgtctcggaacacattcgcacgcgctatactttccgttatggcacggtcttgattctctttggggagggactcatggaactgccaacggcaatgaccttgaacatcctcggccacgagcttgagcgttttggggcggtccgcatgcacactggggaaaggagcctccagctgcgtggcgtccgcatctgggcgggagcgcttgcacgtggtgcaggagagctttcgcatgacgtcatctacgtctgcgcacacgagggcgcgcacgatgcgccgcctcaggagtgtccgtcgctctacgtgcgccgcgcgaccgatacgcggcctgcgcaagggtgggtcgagctcacctgcgatcttggtctcgtggatgtctgcaacgcggtccagggcatatttgcagcgtatggcgagtggtgccggcagatggacgccgctttgatcgagggctgtacagcccaggatctcgtcgactgcagtgagcgcttcctgcacaaccatgtcgtggtcgtggacccagcgctcaagctcgtggcctgcacatgggacacgccctgcgatgaccccgttacctgcgagctcatggcgcacggttatcacacggacgacaacatcaagaagttcaagctcaacaagcgcttcgccccgtggagcacgacagacgggttcatcgtcaacgactcctataagatctgcaagtacgtgaccgcggtctacagcttcaaggcggaggcggggttctcgctcatcgcggtcatgatgtgcaacaacgccgcttttaaaccctggctgcgcgacacgttcggtctgtttctcaggcgccttgcctgcctgtcacggcgcgagtacccgcagatgatgccctcgggcaaccgcgttgactcgttcgtgcgtgatttgctctcgggagcgctcaccgattctggggcaatcactgaacgggcacgtttcgccggaatccccgatgatggcaagttctgcctgttcagcatcgcgttggggaaggcggacgaagggcttgcggcgcgtgtcatctcggagacggcgcagaaggtcgcccccgcgaaggtcatctcgttcgagggcgctatcgtcgtcttgtgcttcaattgccgtacgcggcgtgcgatgtgtccacggggatgccgggtttgctcgctcgagtgctcgttggcgagcaccgacgaggtcagggtcgcctcgacgatcgtctcgcgtctcgaaaagctcatgggacggtatggcctcatatgcggtaggagctcgagtttttcgacactgtcccaggcgcgctgcgcgtatctccaggcgcgtacggccacagagatcagcatgcgcctacggcggggcggggagtcgacgggcatctgcgccttcgacgacgttctcggcgtgtttctgctctcgcatgcggacgtcgaaggcgagcagatcgtgcttcggacctcggcctgccagctgctcgcgcgcatgcgcacgcacgatcgcgagcgcggctccgacgactatgaggtcctccgcacctatctcagggaggagcggcgcacggtgcaggtcgcacaggagctcggcatgcaccgcaacagcgtgcgcagccgcgtgcagcatatcttggacgagtacggcatcgacgaggaagacagccgtacccgctctgacctgctgctgggctttcttctcatcgatagcctgcccgagcgcgatgacgcggcgcacggacctgccaaaatctgaagcccgcatttcgcctgtgccatccgcacagccatcctctcgattcgggtgccgccggaacggtgccgcagatgtgctcgccgcgtacctttaaggaggttcgaagggacacgccgccggggcgaaaaggagcgcccgggggcaccgaagaagagaggacaggtcatggcaatcaacaagctcgatgacgtccggctcaacgtgaagccgatgttcatcaagatgtaccacgagtacgcgttcgagggaccatgccgctttggggagggcgtccagctcacgaaggaattcgacctcaacatggccgaggagaagtacaagagctggatcaagcagctgaaagacgcaatgcccgaagactgcgtcaacctcatggagcccgtcgtcatcgagcgcgacgagcagttcctcacgaccgatgaggcactcgagaagctggctgtcgaccatgagaacgtcgacttgtactgggtcggctacgcaagccgcccgtacgacatcgtgctcgagttcgcgcagcgctacaagatcccgatggccatcacgcaggcctgctgcgcgtctgccatcacctctgccgagtgcctgtcgcgcggtctcgagttctactcattcgaggcctgggaggacgcgacggaatacatgaccgtcctgcgcgcccgcaaggccatcgccgagatgaaggtgctgtgcgcgacgcgcatgacctcgacggtctcggtcagctcgcccgacagcatcatcgaccccgagaagctcaccgagaagttcgggacgcgtttccgctacgtctcggcgcacgagctgctcgaccagatgagctacgacgatccgatggagaaccactgcacgccgggccgcaagggcctcaacttcgacgacgaggacgccaaggaaatcgaccgcatcaccgacgacctcgtcgggggcgccggcgccgtcgagatggacaaggagatggtgaagaagtccgtcgaggcgtactacagcatcaacaagttcctcgacgcctacgagtgcaacgccttcactgcgccctgccccgacctgtgcgcgacgcgccgcctgaacaacaagaaggtcacgttctgcctgaaccactcgctcaacaacgagaagggcgttccctccgcatgcgagtacgacatcggggccgtgtggtccatggaactgctgcaggccatcggccgccgtccgtcctacatgggcaactgcttcacgagcccgatccgcaacggcgtgcgcgcaccgctgcccaaggcgctgttcttcaacccggactccgtcgaccagaagatggtcgacctcaagcagatggaaaacgtcgtcctgacgttccactcggtgcccaaccgccgctggacgggcttcgacgctcccatccgcccctacgacatccgccgcttcgcacacagcggcttcggtgcgacgattcgctacgatttcgccaaggacgccggccaggtcatcacgatgtgccgcatcgacccgacctgcgagaagctcttcgtcgcgaagggcacggtcgtcgacggcatcggcttcaaggacacgaactgctccgagggcgtgttcttccaggtgaaggattccaaggacttcttcaagaagcaggctgccatcggcaaccacatgccgctcatctacggcgacttcgaagatcaggtcatcgagctcggcgagctgctcggcctggagatcgtgcaggcataacgccgcgcgtttgcacgagcacgaactatctgaggggatgtgtgtctggggcctctcggatagcttgaggcaacgagggggcgccgcttcggggcagatccggaggaggcgcccccttcgaatgtggaagggaggatgcatggagttcgacggcacgacggcgagcgaggtccaggtgcagatcatcgacgccttcaacgatgcgggtgatgccttcaaccagttcacgtacctccttcagctcgcaagcgagttccccgagcttcctgccgagcgcaaggtcgagcaggcgctcgtcaagggatgccagtcccaggtttggctttacacgagcgtcgtcgacgacggcgccggtgtgcctgcgatgcacatcgagggagacagcgacaccttgatggtacgcggggtcatcaggatctacgtgctcatgttcgaggggcgccgccccgaagaagtgctggacacgccgatcgacttcatcggcaagaccgagctcgcgagcatcttcgacgacaaacgcaaagccggggcaagcgccatttacggacgcatcgcgcagacggcgcgcgactatgtggggaaggagtgagcgccgatgacgctcaaggagatgatcgagcaggccgatgcgcgtgcagacgaactgctggccgatatgaagcgccccaatgccgggcgcgagcaggtgcgcgccgatgtgcgcgcctacacgctcgcgaaattcctgatgacgccggatgaggccaaaggcgaagacgacatcttcgcgcttgcggagaagagcatcgagaagatgttgcgcctgaacgacaatagcgtgctgctcgccgtcgggtcccagacctgcacgaaccaaagctcgacagatatcaagaaggtcctgctctcgcttgcgctgcagtcggggctcggcgtgaagctgacgccgcaggaatcggccgctgccgagacgacgcaggccctcgcagacgcgctctacgacaagctgcatcccgacgaggcagggaagggggcgtagcgacgatgttcgacgtcgaggaagtgcgcgctgatttcccgattctcgcgcaggaggtctatgggcatccgctcgtgtacctggacaatgcggcgacgacgcaggttcccgattgcgtgctcgacgcgctcgtcacgcactatcacacggcgaacgccaacgtccaccgcggcatccatcgcctctcggagctgtcgacgagcgcctatgaagacgcgcgtgcgacggtcgcacgcttcatcggcgcgccggatacgagctgcatcgtgttcacgcgcggggccaccgatgggctcaacatggcggctcatgggctcgagcatctcgtggggccgggcgatgccgtcgtcgcgaccatgctcgagcaccactcgaacttcgtgccttggcagcagctcgcgaagcggcgtggcgcccgcttcgaggcaatcggcctcgatggcaacggcgatatcgaccttgccgcgctcgagtccgtgctcgcgcgtggcgctgtcagaatcgtcgcggcgagctgctgctcgaacgtgctcgggacggtgacgcccatcgagcgtatcgtcgagctcgcgcacgcccatggtgcgctcgtcgtgctcgacggtgctcaggccatgcggcatcgcgcgttcgacgtggccgccctcggctgcgatgcactcgccttttccgggcacaagatgtgcgccccaacgggcatcggcgtgctctacgtcgcaccggccatccaggatgttctcgagccgagcgccttcggtggcgaaatggtcgacgaggtcacggtcgaggcgacgacattcgagaaaccgccgctgcgctgggaggcgggcacgccgaactacgtcggcgccatcgcgcttgagcgctcgattgagtacctcgagggcatcgggctcgctgacatcgcatcgtacgaggacgcgctcgtggcgcatgccgtcgaggcactttcggacatcgagggcctgctcgtgctcggaagtcccgcgcatcgcagcggatgcgtctcgttttccgtcgaaggcgtgcagccattcgacctgtgcgcgatggtcgataagctcggcatcgcgctgcgctcgggcaacaactgcgcgcagccgctgctgcgcgacgtgtgcggcacgccgtatgtctcgcggctctcggttgccttctacaacacgcacgacgagatcgatgctgccgtgcaagcggtgaaaaaggtgctcccgctcgtcacgcaacggggatagcggacgtatctgtgggcgaaaaccggtcgatttcctcgcggcgcgttcgcgtgcgctacaataggcggcacctctagatgctatgaaacgaccgaggagcacatctcacatgtccgatacggataccaagtcagaagtacgcgtgcgctttgccccgtcgccgacgggcaagctgcacatcggcggtgcgcgcaccgccatctacaactgggcgttcgcccgtgcgcacggcgggacgttcgtcctgcgcatcgaggacaccgaccccgagcgctccacgcaggaaaacatcgacctcatcatccgcgcgatgaagtggctcggcctcgattgggacgagggccccgaagttggcggtgcctatgggccgtatctgcagacgaagcgcttcgatacgtacgcggccgcgctcgagaagctcaaggaatccggcaacgtctacccgtgcttctgcacgtccgaggagcttgctgagcgccgcaaggccgtgcaggcggccgccgagcgccaacccgatccctgtcgcgccctcagccgcgaggccgcgcaggcgcgcattgacgccggcgagccccacgtctggcgcctgaaggtgcccgaggaccgcggcaccatcgtcgtccacgacctcgtgcacggagactccgagttcgatgccgcgctgcaggacgacatgatcctcgtgcgctcggatgggaccccaacgtacaacttcgctgtggtctgcgacgatgtgaacatgaagatgacacacatcatccgcggcgacgaccacctttcgaacacgccgcgccaagtgctcgtctacgaggcgctcggataccccgtgcccacatttgcccacctgccgatgatctgcggtccggatggcaaaaagctctcgaagcgccacggcgctgccagcgtcgaggagtaccgtgacctcggctacctgcccgatgcgctcttcaactatctcgcgctgctcggctgggcgccggacggcgagacgacgatgttcagccgccaggagatggcagagaagttcgagctcgaccatgtgagcaagaacccggcttcgctcgacttcggcaagctcgagtggctcaacaaccagtacgtgcaggccatgggcgccgatgccttcgtcgaggcgctcgagccctacctgaaagaagccggctacgaggacgcggaccgcgacctgctgaagcgcgcctatccgcttgtcgccgagcgcgtcaagctcatgacagaggccgtgccgatgctgcgctacctgctcgacgacgaggtcgagctcgatgagaagagcgtcgccaagatcctgcaaaaggacggcaagaaggcgcgcacagcgctcgtcgaggggcgcaaagtgctcgcggagtgcgcgtgggatatcgagtccatcgaggcggccctgcgcgaactgctcgtcaagctcgatgccaagccgcgcttcgtgttccagccgattcgcgtggcggtatgcggcaaccaggtgagcccgccgctgttcgagtcgattgcgctgct

SEQ ID NO: 435 - DNA, 4862 bp, Unknown
  16S sequences of unknown bacteria
aggttgaatgttcgcgtaaaagcgctcgcatccaacctttgctccgaggtcacaaatatgctttatttatcaaaagagggctgtgttttggctggggagggaattctatttattctaaaatcttgccgtcaatagaaattgttaccacctgccatggaataaactttccactgtttttcaaagcagtcacagcggcatgttccaatccaccgcagcaaggaacttccatacggacgatagtaacacttttaatatcgttagtagcgataatttctgtaagtttttcactatagtcaacagcatcgagttttggacagcctaccaaagtgatttttcctttgataaaatcctgatgaaagttagcataagcatatgcggtacagtcagcagcaattaacaattttgcaccgttaaaatatggagcagtaactggagctaatttaatctgcactggccactggctaagctgagaggtgattgcagcaggtgtagaagtagtttcattatcagaggaagaatctgctgtgttctggcggttaaactgtgcgatacgctggcctggacaaccgtgagctgtgtgtgcttttttcgcttcgttagattgtggtacagactgtgcagtattaatggcagaagcctcttttttctgtttatttgccattactgcagcttcatcataagcggcagcttcacgttcttcgaaagtgattgctccagtaggacaggccggcagacagtcaccaagtccgtcacagtaatcgtcacgcaaaagctttgcctttccgtttaccattccaattgcgctttcatggcaggcatcggcacaggcaccgcagccgttacatttttcttcgttaatgtgtataattcttcgaatcatcgttagttctcctttgttttttgaatttatgtgagataaaaatactgtcacaattatgtggaaagctttgtgacagtctggatttcttggttctgtgttattgtaatatagatgagaagaaaaaaccgttgttttaacaacaaaaagagaaaaaatctgatttgccgcaggcaagggggacgccgccgtagaagatgtcttttgccggattttcccagatggctttaaaaagaaggggttattctaagcttgattttgttccgttgcgctaaacgttccattctgcctgataggataaccttgctcgaaggaacctccactggagcttctttcgacctgctaaggcatcaaaaacgagctcgcaaggttacagtcagaattccacagcgcaaagtcacaaaattcaagctttctctttctgagggcgtcaactttgccattcagcaaattcagaatttagagttgttttttcataatccgtggataaggtttcttttcatcagtcaatccagcaagataatccatgcttgtctctaatgccaatgcaatttttctacattgttcaaatgtgtaatagcgttttccattttctattttggaataatcgctttgatcaattcctgttaataattgcatttttatctgggtgtaacctttttcttttcttaattcctttaaacgagacataagaactccttttttgaagaattatgtcatactgacctattgaatttagggcgaaattgacctattattaaagaaaaatcaaggaggaagtatggttgtaatatttttaatttaggcttggtattggcatttatattactggtttctattgtttttattaatgcatctaccgaatttgtattagctattctgggagtgacttgtattttgtttttgattaaagatataattcaggatttatattttgcattacataagtacaaaaataatgtccttattgtaattatatcgtttgttcttgatattgttagaatagcctttttttataaacttatacatcattttgcagcaggaacagccagggcaactggattatctacgtttggatggatgttaggatatgttatttcaatattagtaggaggagttctcttttttgctggggaagcgaatggattactttttggaatgggccagaaaaatgaatcatctattctgatgaatgtatttatgacagggtgtctggtagccttttgtcattttataatataatttttttacaggagggttttatgaatcaaataacagaaaaagagagagagtttattgaaaataaacttaaaatgacaacaagaacaatagtagtttcgcgcacaaagcaattttgtctaaataaaataggatgtgagattatctttgatggacgaaagatagcatcagtagatagtgggaaaaaagtggatataaaaatcaatggacttctccataagatagcctgtctttggacatttgctgatgggaatcagacattaacggaaacttttacaatcccatatggcgtgtcgtctcttaaatatgagacaatgagaaaaatagaaaatagtcatttgtttactttaaaaggattgaatctaacaacaacaccagttggtattttgatggaagataccagattacgagaggaaagtgataatttgttccgtcaaaaattaaatgaaatgttacagtggtatagaacaaataatttataatttaatcaataaagagataaattcccaaaaggaagacttttggggatttatttattaagctactttttgatgttactatattcttgccttgacattgtaacaatagattacgttaatctttaatagcccattttccattctctcccaaatataatcttctaaacaatccccaaattctccaacatgaattctgattttgctccaacagccaaagacagctcccaaagagagacaatacgctatatttgtggcctcggagcaaaggttggatgcgagcgcataagcgaacattcaacctgcagcgactaaagtcacaaatatagcgtattgtctctctttgggagtgtctcccttgcctgcggcaaatcacaatttactcgccctcattattgaatttttcccatgtttcttttgtatggaatccaatgccgcatcgagctttgacattttttcccgtttttcatgtgaggaggcagtttcagtgaaaagttgtatctgttcgattttgtcgagggtgagtttgccgcctcgtactccaagaagccggattggggtgccatcccagagttctttaaaaagttttatactggtttgatagaagtcgtcagtagtatttgtagagtaatcaagaaccgtctggtgggattttctgcgaaaatggctgtccttgagttctacttcaataacttgtgcgtaaacctgatcttcacgaagtcgcttagtgacggtttcgcagagttctaataagacaggtttcgcctcagaaagcgaagtgagatctttgcttaaagtagtggaattcccatagccttttggagtatcaggagattctttaaccggagaattgtctctgccgtttgcatagttccacaaagtaactccttgagaatttaagtgtgcctttaaaaagtcagggttgcttttggcaaggtcaccaatagtatagataccgagctgatttagcttttgtgcggcagctcttccggtaaaaaagagagtgcggacaggaagatgccacatttttttttctatttcagatggaaacaaagtgtggattttgtctggtttttcaaaatcagaagccatttttgcaagaagtttatttgaagaaatgccgatatttacggtaaaacctaaagtttccctaatatcggtctgaatcttttcggcagcttcaagcggagtagagtagaagtagtgaagtccgctcatatcaaggtaagcttcatcaatagaaacctgttctaccacaggagcatatttctttaaaatagtaatgaaagctttggaatatttgtgataaagagggaaattcggttgaaaactttgtaaagtaggacatttcgtcagagcatcggtaaccggttctcccgtatgaataccaaaacgtttagcaggaagcgatttggcaagaacaactcctttgcgcaaagaagtatcgccaccgatgatcgatgggatcgttcggatatctgtaggagcaccatttttaagctggtggacagcctcccagcttaaataggcactatttacatcaacgtgaaaaatgagtctttctttcataagtgaaaatcctttgtattgtaataattagttttctgtctttggcgggatggaaaataaatattatgttctagtatatttctatttaaatatgtacaaatgatgattgtaatgagtcttgtggataatttacattccaatatgtctctatttaaattgggtaacgttagttaaagctaattgtacacaagaatttacattccaatatgtctctatttaaataagaccagaccacatacatgaaaatcccatatctgaatttacattccaatatgtctctattttaatccatcacccggattcccgcttcttttctaccttattccccaactttctgttgaccagtcaaagcttacaaatattttaccatatctccttcattaattctacgaaagagaagaaaaatcacctgtttttcatgcttatagaattttgtcgatgtatgggcatttttacattatcggaggtcgacagtttaaaaatagtagtaatggagtaatacatttcttgttaagtatggaaggtgagaagtagccaaggataggcgtttaaaagtataagcagtaacctaaaatttgaatcacctctccaatttatcaaagacaggaaataaaaaaatagatatatagtatctgtgccatatcactgcacgaataatgcgggtgagcattattcgtgcagtgatatggcacagatactat

SEQ ID NO: 436 - DNA, 25884 bp, Unknown
  16S sequences of unknown bacteria
ggttcgtcgtccgcaagattatacgtagttctaatgatagctgtaatattataattatgaacaaaatcttaaatatacaagggagacaccctgaccaaaatttcgtgcattttcccattttcgtgcatcgaacgcaaaaaaagagaccgccgcaaaacggcagtccctctcttattcttatgttctctcagaagagataagtacccttcttcacctgataagtctttccgtcaatcacgatctcagccccgaccggaactgttatctcatacctgaacatatcagccgtctcgtcatacgcccacgcgctcacgatccttccatgctcagtgtcatactccgctctcaggtgtccgagtctgcggtcaggctccggcgctatcctcaccttcgaaaatcccggctcgagcggcgttattccggcggcagtctcgaagacccatccggcgaccgctccatacgcgtaatggttgaacgagttcatgtcgcggctccagaagcttccgtcctccttcagaccgtcccagtgctcccagacggtcgtcgcgccgtgctcaaccgcgtacagccacgacgggaacttattctgacagagaagatcatacgcgacatctgtatagccgttctcggacagcgcgtaaagcagatacggcgtgccgacaaagccggtcttcagtctgtttccgttgtccttcaccatctccgcgagcttgtccgcgagcgcctgtctgtcctcggcaagcccgaaatagagagcaagcacgcaggaagtctgggtcgggtaatcagtgaagtaacggttgaacgccgcctttgtccgcttcatctgctcctcaaacccgctcacgtcctcaccgagctcatgacccgcgagaaccacgagagacgtcgaataatacagatatgccgaagcgatcagatccctgtcggtcgcgccaacataagacccctcgttcgcgtcgagaccgagccagtcgccgtaatggtcatgtccgttcaccccgtcgcagtagcccgtccagaggtccggaacagtcgtgtgcgaggtcatgtagccgatccacctcttcatcatgtcaaagtgcgagcgcagaagctcacggtcgccgtagtgacggtaaatgtgccacgggcagatgacagccgcgtcagcccaagccgtgctcgactttccgtcgaagtcgtagtcgccgttccactcagccggtatgacgcagggtatgccgccgaacttgttctggttcagcttcatgtcggagagccacttcgtgaagaaacgcttgacgtcgaactgataagccgcggtattgacaaacacctgagcgtcgcccgtccagccgagcctctcgtctctctgcgggcagtcggtcggaacgtcgaggaagttgcccttctgtccccagataatgttctcaaacaggcggttcagcttgtcgtccccgcaggagagataaccggtgcgctttatgtcggagcagataacgatgcccttgaaatcgtcaagagacgcctcgacgccctcgacgcgcagatatctgagaccgtagaaagtgagcctcggacgccatgtctcgtcgtttccgccgcagatatagaccatctcgctcttcgcggagcggtagttctcggtgtagaagttcccgtccttatcgaacatctcggcgcaggtgaggcggattctcgtgcccttcggagcggtagtgtgaagctcgattacaccggtgaactcctgaccgaagtcaagcaccttgtcgccagcgggtgttgttatgatcctcttcgggaatatctcctcctgatacgtgatcttctcgccctgctgaggaacaagcctgtcgtgagggaaatcggcgatgacgaccggcttctcgacgccctcgaagttcgcgtcatagtgctcgccgtcgtagatgtcggcgaatctcgttttgctctctctgacagtccagctctcgtcggtcgggattatctcgacctttccgtcctcgtactcgatagtgaggagggctatcagcttcagaacatggtcggcttccgcgggtattctcgatatatttccgcagtaccagccgctcgcgacctcaaccgtcagagtgttcgtgcgctccataagatctgtcacgtcgtagctctgaacctgtattcgcttcgcgtaaaccgtccatcccggcgcgagaacgaaatctccgaccggcttaccgttaagctcggcatagtaaactccgcaggcgctcatctcgagcgtcgctttctttatcttcttcgcggtctcaaatctcccgatgaattcggggcatccttcgatctttccggcactcagccattttgcggattcaagcatatctgtgtttcctttctgtataaaaagagcgcgggtctccggaaagccatcatcaggtttcccttcattacctgcgcactcttatttcacttactgaagattagcggtgatcttgtccatccactcggtgacgttcttcttctcgtcgtccttgactccgccgaggaacggaagtccgcccttgatgtagaggacgtcctcaatcgcgttggcgcccgcgctcttcacggcgtcgatcagcaccttcgctccgtcagccgaaccgtcgaccagaaacgcgacgttagcggctctctgcttcgtcagctccttgcagaacagaacgagagcgttgtccgggtccttcgacaccgagacgatcatgacgacaagtctctccttatcgcaggaatacgccggaggaatcttatccatgcagttgaccttctcggtcgcgtagttatcggtgatgatacccgcgatattcttgagctttgccttgttcgtgtaataaagaacacgcatcttcataatgagttatctccattcagtattattattccctcacggcttttcaccgataggcgaacttttccaatatcaattataccacaaaccgggcgatttttgaagcacataccgcaaatttccgaaactttgtaggctttcacagtttgagagattatttttgtgtgatataacaagattacagtccgatatagacaacagagcgcggaggaatcgtgacatagttatcgcttatcacaacgcaggcagtattttctacgcatgcagacaacaatacttcacccccgcgcccggtctcgatatcccaaggtctgtccgacatattggcggcaacggctgtcacgtcgctgttatatcgtctgactatcagtatctgcgacatatcgccggtttcagggagtgagatatcaccatgcagaagcgccggatttccgtttctcacccgccccgcctcgcggtagaagtcggtgagcggcgtctcgctcctcacgaaaggcatacggttgaacgggtcgcgtccgccctccatccccctctcgtcgccgtagtagacgcacggcatacccggaagcgcgcagagtatcgcccaggcgagccgcagtctgttctccgcgagttctctcttgtcgtcaggcagtctgtaaaccgcgagctcagcgtttgtcatccgctcagcgccgacgcccgcgagaacagtcagaatccgctcagtgtcatgcgttccgaggaagttcatcagaacgtgcccgaccatctccggatagtgcgggtaaattgtcgtcagaacctcgtacagccgcgctttgtcgccgctcatgacatagtctgtgacgccgtccttaagtggatagttcatcacggaatcaagctgtccgccgcggaaatacttacgccttttcgagtacgcgaccttgttcgacgcgtcctcccagacctcgccgattattatcgcttccgggtcggcgcgtttcgcgctcttcctgacctccgagaggagcttgtccgacagctcgtccgcgacgtcgagacgccatcctccggcgccgtgattcagccagtttccgacaacgccgtcagtatcgtcctttccgcatatgaagccgacaaagctcccgtccgcggttcgtgtctgcggcagaatcttaacgccccaccagcacctgtagtcgtccggccagcgcctgaaatcgtaccattcgctgtattttgagctttccgactgataagcgccctttcccggatagttcccgaacctgttgaaatacacgctgtcagcgcccgtgtgcccgaacacgccgtcgagtatcacgagcatatctttttccttcgctttggcgcacagctcctcaaacgcgtcagtgtcgccgaggagcgggtcaatcttcatgtaatccccggtgtcatagcgatggttggacgccgcctcaaatatcgggttcaggtaaatcgtccgcacgccgagggactttatatagtcgagattgtcgatgacgccctgaaggtttccgccgaagaactcgttgttgtcgagctcgtctccgggcttcccggcgtattcggggacgccggtttcccagtcggggtttatgacgcgcttctgtccgccgatgaaggtcagctcctctcgcgaagcatatctcttcccgcccgtcgcgaacctgtccgggaatatctggtacatcatgccgcccgcgaaacgctccggtacggtgtaatccttcgggtaaaccagaagctgccggctgtccggcgagccgtccgtgacactcccgtcctgatttgtcctgacctttccgagcggcgtcgtcagctcaaagtcatagtagaacagtccgctcccgtcaaggcatatctcaccggtatcgaccgggcacgagtaaatatccgcggaatccccgaaacccgacagtgtcagcggaagctcccgccttgacatatcgtcgtcccggtaaagccgcatgacgaccgaatccgccgagaacgcccgcggcacacaaaccgtgaaatcgagcacagtcccgaacggataagcgtcccgccccatgaacccgacagaacccccgtcccgccgggcgagagaaagcgaaaccctcgccccgcaccggataagagcgtcaatgtccgaaaacgcgttcatctcactttatcggtcttatatgccagatattgtcggcgtactcgcgtatcgagcggtcggcggagaagtagccggccttagccgtgtttatgagcgacatacggtcccacttcttcttgtccgagtagtcgcggagcatcgcgtcatgaacgctcgtgtaggaatcgaagtcagcgaggcacatatacgggtccgcgacgccgtgagcgtactgcgggttcacgagatactgcttcatgtcgccgaacgatctgccgttgaagcccgcgtcgagagcgtcgaccgccgccctcagcttctcgctcttgagatagtacgaggtcgcgtaatagccgcgcttccagaggtcgtcgacctcctctgtcgtgagaccgaagatatagatgttgtccgcgccgaggtgctcgtacatctcgacgttcgcgccgtccatggttccgattgttatggctccgttcgccatcagcttcatacatccggttccgctcgcttccttgcccgcgagagatatctgctcgcttatgtccgccgccgggataaggacctcggcgaggctgacgttgtagtcctccatgaatatgacgcgcagcttctcgcgtatcttcgggttcttctcgatgtccgcgctgatatagcagatgagctttatgatgttcttcgccatatagtaacccggagccgccttagcgccgaatatgaaggtctgcggggtgatatcgaggtcgggattctcctttaactgaacgtacaggcttatgatcctgagcgcattgagaagctgtctcttgtactcgtgcatacgctttatctgcacgtcgaatacggaatccgggtcgagctttatgcccgtcttctcctcggtgtagatcgcgaagttgaccttgttcgcgcgcttgatcttctctatgcgctggagcaccgacgcgtcgtcggcgaatctcgcgaagctctcgagccgctccggctgcttgtgccacgcgtcgcctatgcactcgtcgatgagcgcggtcagctgaggattcgagtagcagagccagcggcggtgagcgatgccgttcgtgacgttcgtgaactttccgggcgtgtgcttgtagaagtcgtggaatatcgtctttttcagtatctcggaatgcagcttcgagacgccgttcaccgtgtgcgagccgacgaccgacaggttcgccatgcgtatctggtcataagcgacgaccgccatcctcgatatcctgtcccagtcgcccgggtaagccgtccacagctcggcgcagaagcgtcggttgatctcgcagatgatctgatagatgcgcggcagcttcagcctgaacaggtcctcgttccatgtctcaagcgcctccggcatgacagtgtggttcgtgtaggacacagtcgaggtgacgaggttccacgcgtcgtcccagccgtaggagtagttgtcgatgagtatgcgcatgagctccggaatgaccatcgccgggtgagtgtcgtttatgtgtatcgcgaccttctcggcaaagttcgacagagagccgtaagaggcgaggtgatccgcgattatagactggagcgacgccgacacaaggaaatactgctgtgaaagcctcagatacttgccctccgtgtggttatccgacggatagagcaccttcgagattatctcggcgttcgtgtcctcctccatcgccttgacgtactgtccctgagagaagaggttcatgttgaagttcatagggtcgcacgccttccagagacggagaatattgaccgccttcgagtccgcgccggagatcatcatgtcatacgggaccgcctgaacgacgtccggattctcgaccgtcacgtcgcagtgaccgttctcccacttctcgttgagctttccgccgaatgtgaccgaaaaggtcttgtctgtgcgcggcacgagccacacgtcgccctcgggcatccatatgtccggcagctcgatctggtcgccgtcgactattctctgcctgaagagaccgtactcatacagtatcgagaacccggtcgccggataatcaagagttgtgagagcgtccatgaagcacgccgcgagacgtccgagaccgccgtttccaagccccgggtccggctcgagcgggtatatctcgtcgagcgagaagcccatgtccgcgagcgcctgcccgtaagcgccggcgacgccgaggttgttcaggttgttcttcagcgagcgcccgacgaggaactccatgcagagatagtatatcttctttcccctctgcttcttcgtgtcgagcttgaagtccgacctcttctgggtcaggatgtccttgacggtcaggacaaccgccttatacatctgctccgggttcgcgtcgtccggcgtcgtgccgaaatagcgcgcgagctttgaggttatagcggcgcttacctgttcttttgtcatgtttgtgttcatttataccagttcctttgcttaatgcctttccgggcgtttcccggaggttcttttcttttcctgtttctgttcctgtttatctgagagactcgtacatctcaatgtatttctttgccgaggcgttccacgagaagtccatgttcatggcgttcgacacaagatgcttccactgtgctttgttgctgtagagcttgactgagcggcgtatagcgtcgagcatatcgtgcgcgttgtaggtgacgaaggtgaagccgttgccctctcctgtttccggattgtacggctttatcgtgtcacagagccctccgacctccctgacgaccggcacggctccgtagcgggacgctatcatctgcgagagaccgcacggctcggatttcgacggcatgaggaatatgtcagcccccgcgtagatctgcttcgcgagccgtccgtcgtaggcgagcattaccccgcacttgccgcggtgccgctcagagagcccggagaagaagtcctcgagctcgctctcgcccgtcccgagaagcacgaactgcacgttctcggtgtcaagaagctcatccgcgacacgcctgacaagatcgaagcccttgtgcgacgcgagacgggagaccatcgcgacgaccggcacgtccggcttttccggcagtccgaatatcctctggagatccgctttgtccgccgccttgcccgagatatccgcggcgctgaaggtcttcgttattgtcttgtcagacgccgggttgtagcggtcggtgtcgattccgtttattatgccgcagaccttgtccctgtacattttcaggatatgatgcagtccgctcgagaaatactctgtctgaatctcctcggcgtagcgcgggctgaccgtcgtcaggcggtcgcagcagacaatcgcgccttttgtcaggttgatgcacccgtcgtactcaacgacgtatctgtcccaggagtcaaggcagaagatgtcgccgagaatatcaaagctgtatattccctgatagtcgatattgttaatcgtgtagaccgacttcatcttcgagtaagcctcgagatacttgtacttgcgggagaggtatatgacgcacagcgcgctctgccagtcgtggcagtgaagtatatccgggaagaaatctatgtgcggcatcatctccatgaccgccttgcagaagtaagcgtatctctcgccgtcgtcatagctgccgtagagcgacgggcgcttgaagtagtactcgttgtcgatgaaatagcaggttacgtttccgagcctgtattcccacacgccgcagtactggcgcctccacgcgagctgcacggtgaactcggagacgaggcgggatttctccttgtatttttcggatacgacctgatacataggtatcacgacccggacgtcaagctccggatcctcacgcataagagccgccggaagcgaacccagcacgtcggcaagtccgccggtcgccgcgaacggaatagcctcggagccgacgaaaagtatctttttcatgtcctttttcctttctccggttttatacaagacggtttttctcaacgaagaacggcagcgtctcgtgacccgagagtatccttccgtcgcggatgacgacgttcttgtcggttatgacgcagttcaggaagacgttctcgccgataactgtgtcctggaaaagtatcgagttcttgaccgtcgcgccgcggcttatcttcacgcctctgaatattatcgagttctcgacggttccgtcgattatgcagccgtccgccacaagcgaattcttcacgaccgaggactcagcgtatctggtcggcgcggagtttcgcaccttcgtgtagatcgggcgggtctttatgccgaagatctcgtcgcggttctccggcgtgccgagaagctccatggaatggctgtagtaatcggcgagcgagcctatattcgcgaaatacccgtcgtacttgtatatccggaagttgcgcctcgaggtgttgcgggctatgacgtcgcggttgaagctcgtgtagccgtgcgctatcgcgtcgacgacaatgctctggagatattcgcggttgatgacaagaatattgaggtctatgtcgcggtagccggtgacgttcgtcggataggggtttatgtcgactatccttccctccgggtcggcgtctatgatgacgtttctcgacgcggcgtccttgtttaacaggacgcgcttgacggctatcgttatgtcggcgttgttctcgatgtggtcgtttatcatgtcgttgaggtcaacgttgcagatgacgtcgcagtcagagaggacgacataatccgacgtgaagcggctgaccgagtaattgacgctcttcagagcctccatgcgggaattgtagagagcgttcgactggttagcgtaagccgtcatgtaaggcggaagaatcttgataccgccggaacgtctcgcgaggtcccagtcctttccggctccgatgtggtccatcagagactggtaattatagtgagttatgacgctcaccgatgtgatgccggaattgaccatgttcgacagtgcgaagtcgatgagccggtatcttcccgcgtacgggaccgacgccatcgtgcgcctgagggtgagctccggtatgttcttatcgtgcagattagaaaaaattattccctgaactgacatcttcaaattcctttcgccttatattctgtgctcttcgaggtactgcgcgttgaccatctcgccggcctttatgacgccgccgtgcgggattttcaggtcggagccgacaagggtgatcttcccgcccttctccatggcttcgccgacgactgctcccgcgccgatctccgtgtctccgtcgactatcgaatagtaaaccgacgcgccctcgcgcaccaccgtgtcctgcatgatgatcgaattgcgtatataagccccgcgcgcgaccttgacgccgccgaacagaaccgagttctcgacgatgccgtctatctcgcagccctgcgatatcagcgagttcgcgaccttgccgttcatgcctatatagtgcgggggtctgatctcgctcctcgaatagatgcgccagtcgtcgtcatagaggttgaacaccggatcgtcgccgagaaggtccatgttagcctcccagaggctctgcacggttccgacgtccttccagtagccggagaactcgtaggcgaacattctctctccgctcgcgagcattgccgggatgatgttctttccgaagtccttcgaggatttcgggtccttctcgtccgcctcgaggtattcggcgaggacgcggcggttgaatatgtagatgcccatcgacgctttggtgctcttcggctgcttcggcttctcctcgaactcgattatcctgccgtcctcgtcggtgttcatgatgccgaatctcgacgcctgctcgagcgggacgtttatcaccgcgattgtcgccgccgcgcccatcttcttgtggtactcgagcatagccgaataatccatcttgtagatatggtcgcccgagagaatcagcacataatccgggtcgtagcggttgatgaagttcatgttctggtaaatggcgttcgccgtgcccttgtaccagtccgccgacttcgagccctgatacggcgggagaaccatgacgccgccgttcatgcggtcaagatcccacggctgaccgtttcctatgtattcgttgagcacaagcggctgatactgtgtcagcacgccgaccgtgtctatcccggaattgacacagttcgagagggtgaaatctattatccggtacttggcgccgaacgggaccgccggcttcgccgtcttctcggtcagtgtatagagcctgcttccctgccctccggcaaggagcattgccacgcattctttcttgttgtacataccgatggaacctcctgaaaaatatatatatcacaccgtcatctgacggtcatgtcacgttatttgttttcgtcagagcgtctttctgcccgttctgccgaccggcttcagtatcaccgcggagagacccggaaggtcaatcgtgagtctcctctttaccggcgctccgtcctcttccccgccgtcgtccgtgtcgtaaagaacggcgtcgagcgcgccctgatttctgatgcccgagccgccgaaagcctcgtcgtcggtcgagaacgcctcgatgtatctcgcgtgggtcagcggctttatctcgaacccgtatctcgtcaccggagagaaattgaacgccatcacaagctcgttccccttcttgtccatacgcctgaaagctatgatgttgaggtcggacatatccgggtaaatccactcaaagccgtcccacgagaagtcgagatcccacagctcgcggttctcgagatagaaccggttgagcgccatgacgaacccgcggagcttcgagtgcatatcgaaatcgagcatgaaccactcaagctggttctcgtagtcccactcgcggaactgtccgtactcctgccccatgaacatcagcttcttgccgggatggcagatctgatacgccatgaacagtctgtcccccgcgaacttctcgttgtagtcgccgaacatcttgtcaagcagcgagcgcttcccgtgtacgacctcgtcatgcgataccgggagtatgtagttctcgttcagcgagtacatcatcgggaaggtcagcttgtcgtgtttgaattttctgtaaaccgggtcggtctcaacgtaatcgaatgtgtcgttcgcccagcccatgttccacttgaagttgaacccgagtcctccgtccgagaccggctttgtcaccataggccacgcggtcgactcctcggctatcatgagagcgtccgggaactccgcgaagagcgtcgtgttgagcttctggaagaacgctatcgcctcgagattctggtttccgccgtccttgttcggtatccactcgccgggctgtctgtcgtagtcgaggtagagcatcgacgccacggcgtccactctcagtccgtccgcgtgatactcgcggagccagaacagcgcgttcgatatgaggaagctctcgacctcgtttctagcgacgtcgaagaaccttgttccccagaccttgtgctccatcctgtcctttccctgatactcgtagagcggtccgccgtcgaactcataaagcccgtgctcgtccttcgggaagtgcgccggaacccagtcgaggattaccccgatgccgaccgagtggagcttgcttatgaagtacttgaagtcctccggctttccgtatctcgaggtcggcgcgtagtagccgcacacctgatagccccacgagccgtcaaacgggtgctccatcaccggcatcagctcgacgtgagtgtatcccatctgcttcagataaggcgcgagctcgtccgctatttcacggtaggtcaggtaatttttcccgtccttcgtcgtctcgccgtttctcgtcctccatgagccgaggtgcatctcgtatatattcatcggcgcgctgaaaaactcacgtctcttcgaccgcgagcccttacccgcgactgtctgcatacgtctcgcgcgccagagggaatcgctccacctgaactgcgtcgggtcgtatatcttcgacgcggtgcccttcagcgtctcggaccagaacgcgtaggggtcggctttaaggtgagtgccgctcttcgacgtcaccgaatacttgtagttcccgccgtcaagcgatttgccgctctcaagcgtgtattcccacacgcccatcttcgtgaccctgaccatcggcgcgtttccggcgtcccagccattgaagtcgccgacaaccgagaccgagagagcgttcggcgcccacaccctgaacgtgtagagatacttatctccgtcccgcgagaggtgacagccgaggtaatcgtaagcgtgcgtgctcgttccctgatgaaaatagaacgccgcctgatctcctgtctccggaaggttagtgttgccgctgttcgtttccttctgcatttcagaccttgcctttcctgtgattttttacttcgtgaataattatatcatgttccgcccgcgtatcgtgtcgtttcccgccgatatcctgcaaagggcgcggtgattatctcgttttccgtcccgtaccgagtatcccgagtatgtcacgtccgtaacgcttcgcgacctcgaagctcattccgcgtatcatcgagagctcccttatgtccgcgggcttttccgccgcgacaaggcgcatcgtcgagtcggtcattatgctgtacgccggtatcccgcgccttcccgccgcgtcacgacgccagcttctcagcttttcgtacaactccgagcccgcgccctccggcactctcggcgggacatttctttgaagaaccgtcgtcttcttcttttccgcccgcatcttcatgacggcggcgcgcttgtcgtggaagaacgcgtcgaactcgtcagtcagcgtcagtatcgggtaatccgccgacagccgcttcaggtaatcgagatcgatgagccgctcgatcacgtcccgtatcttccccggcggtatatccgagagtatcgcgaagccgctcatctcgctgtacccgcctcgtatcatcctctctgtgtcgtccccgtgcaggaagtcggttatgaacgacgccccgaaccgctcgccggtcgcgtaaactgcgaggtaaaccgcgcggacaatgcgcgtcacgtcgaccttctcgtagtccccgtcgcagaccgagcagttcccgcactccttcttctccggctcctcgccgaaatatctcagtatgtaggagcgcaggcagtcatccgactcgcagtattttatcatatccgcgagcttttcgtatttgcgtttctttgccgcttccctctcctcgggcggggcgtcagcgtcgtcggcggcgttttcgatcaggaacttcgccgtcctgatgtccgcgggcgagtaaaagagtatgcactcggcggcgcccccgtcgcgtcccgctctgcccgcctcctgatagtagccctccatcgagagcggcatattgtagtggacgatgaacgagatatccggcttgtctatccccattccgaaagcgttggtcgcgaccatgagctgtctgcggtcgctgatgaaatcgtcctgattctcagcccttgccttctcactgagcccggcgtggtataccgcgttcgggaagccgtcgaccgtcagcctgtcgtggagcttatccgcggtctttcttgtcatcgtgtagattatgccggacttcccgcggttgcggtccagatactcctcgagcctcgtgaactggtcggaggtgcggataacgccgaaatacaggttcggtcggtcaaagccggtcgttatctcaaacgggtcatgaagccccagcacatcgtgtacgtccttcttcaccgcgtcggtcgccgtagccgtgaacgccgccatcaccggacgccccgggagagagtccgcgaacttcccgatattcgtgtagctcggtctgaaatcatgcccccactgcgacacacagtgcgcctcgtcgaccgccagaagcgatatcggagccctcatcgcgaaggaaaggaagctctcggtcgcgagcctctcgggcgcgacgtatattatcttataggctccctcggacgcccttctcagcgcgagcgaatactgccccggcgtcagagagctgttgagataagccgcgcgcaccccgcgctgattcagcgtcccgacctgatccttcatcagcgagataagcggcgacacgacgagagttatccctggaagcattatcgctggtatctgatagcacaccgacttaccggagccggtcggcatgaccgccatcacatccctgccggagagaatgctgtcgattatcttctcctgcccgccgcggaaggaggaatagccgaaatatatcttcagcaccgataatttttcatccacttttacacctccctccagtaaagatccatctactatatattatacaacaaaaatgtgtccgtgtaaatagaaattcattaggttgaataaaaaaatgagcgcgtcgcgctcagtgttttatgtatactctgcacaatttacttttgcatttttagacgttttgcggtctcgtatttcagcttcgtggcgttgcccccgcgcaggtgtctttcggatttgttcttctcgagcactttttccgcggcggcgcagaggaccgggtcgatgcgcatcagtctcgacgtcagatccttgtgcacggtggacttgctgaccccgaagaccgcggcggtcgctctgaccgtgctgtcatgctctgtcaggtactgcgctaaaaggcgcggccgctcgtcgctgtcgattttcaaggcgttcactccgtttcgggttcacgatttccataacatcatatgcggcgggaggagtggaatatgacagcggttttacatttcgcgggtgtgcgttatccgtgtaaggagcctgtaacggaagcaatataagacttcgttattatagataaatcaatatcgtttttttgtatattacgctgattttgcgatctgtcagaaaaagcgtgtaaaaacagagaaaagcgggaggcatgacgcttatctcccgcttttaatgtcttatttatgaaagaattatgtccgtataaactctccagtccgcaaggcacgggctgtgctccccttcgcggttgtggaacgcgacgtagccgtccgagtaagactcgtcgacaccgacaaacctgtcctccggcgcgacaaacccgggcttcccgaacgcctcccaagcgggtgacgccgcggcgcagcagagattctcagactccgggtccgcccactcgtcaagagaggacgcgccgacggcgacgtgtctcggcgctgaagccgcgatgagccagtgctgatcgaacggcatcttttcgattccgtcgccggcataatccttgtatcggtcgcagaaccagtagccgaaggtcttcgtgatatatccgatgtcctcgcccttctttccgcgggttatcgcgtcgccggagcagccggcgttgttcgagaagacatacttgaacctcgtgtcctgagcgccgcaccagagagcggtctttccgagccttgagtgtccctcaacggcgattctctcagggtcaaagaggtcgagagtcagaagaaaatcaagcgcgcggctcgcagcccacgcccacattcctatcttgccccagagatcacgcgctccttcttttctcgggaagagcgccgccactccctccttgcagtcatcatacctgtccgccgcgacgtcagtgtagacgaatttcgcgagcgcgacgcccttggcgcagatctcctcatccggcgtgaagccgctcggaatcagcggatcaaagcttatgctgacgataagcgggacctttttatctgacttcgggtaagagagtctcagcgggaacgtgaaatcgccgccgggagtggttacggtgagatcatagtgaaaatgctttgcgtgacccgcgaagcagtcatgatgcgcgtacgtgaccttcgccgagaccttgctgtcaaaatccggcgtacggccgtagatgtgttcggagagagtgtcgacgagttccttccgtctctcctccgggtctctgccctcaaatccgagcggcgggagctttcttttttcgagttgttcgcttatgaatgacatatgtaatatacctcacttttcaatatcacggaataatccgcgtgggttaagaaaagtataccataacccggcgaaaaaatcaagatattcctgaaaattcagaaaaaaaaaaccgcggaacgccgatacgcgtcccacggaaatgttatttcaggtcaagcgccagaccacttttccatgatctccgctatctgcgcggcgatcttcgtctcggaggacgcgaccttcgaggaaatggatgcggttccggtccagacgtcggttcccgcctgatcggcgatcgagctgttgataccgaaaatggagtagtacaccggaatgatattctgcgtggcaatcgcgagcatctcgatggaatcctcattgcggagtcccttctgctcaaccgcgtagtcgcggaaagcgggaacggccgtcctttcgccctcatacgccatagcgtcgaggatcagccccgccttttcggcatccgccgaggtcacgggaatgaacgccgccggggaaccctcccaagtgttgcagaagtaggtcttctgagcctcgtcatatttcggatacggcacgattccgtactcaaagtcaagctttctgaacccctggaacttgtttacctcgcagtcggagaaaagagccctgccggatgtaaaaacatagatatagcccggattgccgtcgtccttccagtcgtcgccgttcgaagcgtttatacccttggcgtcagaggtcgtgaaaatcttcgagagcttggagacgcagtcatagaagcgttcggttccggcggtgtaagtgagctttccgtcctttacctccactatgttctccccgcagccctggaggaattttattatgccgttctgattgttcgagtagccgtagacggttttgccgtccttcttccacgcggcggagtcgtcgccgttcaggttagctgcggcggtcaggtaggtattcatcgcgtcgagcgtccatttgccctcgcgcacaagatcatacggagcgtcaaggccaagcctatccatcatatcgtcattgaaggaaagaactctcgtcgcgtcgtgtatgcagagatgcgcgccgcccatagcgccgtacagcttcccgccgagctctatcgcgcggttgaaggagtcgtaccaccacggctggtcaagctgaaccgtcggaacagtctcgaggtcgaggaacgcgccgtcggtaatcagccctatcgcgccctttatcggcaggaacatcacggcgaactcgttgtccccggcgagaatcgacttctgcgcggtagcggcggtggtcttcagctcccaattgtctgtgacgagcgtttcgttcagcgttatgtcgaacttcgtctcgatgagcttgttgcggttgaagacggcgtcgttgaggacgtcgccgttcagctcgtcgcggagaatcccgcagtgcatcgtgtacatatcggccatgttaagaatgccgaactcctccccgccgtaaccggtgtcgggatacgggtaggcatactccgtgacctcctcggtcgtgtcggacggcgcggtcacgtcggttgtctaactcccggacgacggcgtctgaccgcacccggcgagcatcgccgcgaggattaacagcgcggcggcggatcttatctttttcatgaaaaatctcctttccccttcagagggttattattttgtcaataatattttaacacatcccgaggcatttgtcaagagatattcaaaaatattgcacaataaatttcgtcgggtggcaaataatttccgcaattataaaatataccggcaggtcggaacccgccggtatatcatagaaactcattcagtgtcctgagacgcgccctcaacatcgccgagacgtctgaccgcgatgcttatgtggaggctcatcgcgtacctcgcctcctcgccggagccggcttctatcgcctcgtatatcatccggtgctcggcgagcgtcgcgagcttcgagtcggtcgcgcggaagctcgaacggctgtactgcatgaaaagctgcaataactgcgagtacatcccgacaagaaacctgttcccggagccgtcgaggatcatccggtggaactcatagtcaagcttcgacagcttatccgactgcccgcggcgcaaagccttctcaaagtcggacaggttctccgcgagcgccgcgcacagctccttgtcggctctcccggcgcacagctccgcggcgaacggctctatgcaggagcgcacgcgcagcagctcatcgaccgacgagcggttcaccgacagccacctgaccgcgccgtccctcggggacggcatctcgtcgctgctcgtgacgacggcgaacgcgccgcggttcgggacaagctcgacatatccggcggcggcaagctgctttaatgcctccctgaccgacgagcgcccgactccgagacgttcggcgattttgttctcgcccgggagcttctgtccgtgggagagctctccggagaaaagtatctcctttatcctgcccgcgacctcgtcggcgacaggggttttgttttcattttcctctgacattcgttatcctttcgttatcatttcagcggccattgcgacgagagaatccatatagtcgacgcacatacggtcatagtcggtggtactccgcgcggtgcggctgatgtcgttcatcctgacgccgaccttgtcaagatgatacttcgcgatcgacgggtaatcgatatactcgatgaacgccgactgagacagcagcgccgcaagcctctccgccctcccggcgtcctccgagaaggtgtggcagagcgtcacataaagctccgggtggaaattgcacatgacgccgcagtaaccggcggcgtcggcgcgcagggtgtcaagcagcgtctgggcgttggcgttgaacagcgccggcttcagcgccggggacggagtgtcgtttatctgcttcactctccgcgctatctcggttctgtcgcagcaggtgtccttgatgaacgcgaagcgcccggttctcgtcacgtggtcgatcattgccggggtcagcagccgcttgtacggtctcggacactcgtatataccgagtggtatgtccggaagagccggaatcatccggtcgaggtcatcgttccatctctcgtccgaggtgttttctatgtcgaaacggttgcttatcagaatcagcgagtcaacgccggtcgcggcgacctcttcgagctcctttttctggtcctcaaagctgtcgcttatgtgcccggaggcgacgattgtcatcggctccgcgccgctctccgccgcgatcttcatcgcggtttcctttacgacggcggcgagctttacgcggtcttcgagggaaagcatatgaatctcgctcgactggcaggacgcgaagataccgtcgcagcccttctcccgataccacgcggtgagcgccctcaccgccccgtagtcgaccgtgccgtccctgttgtacggcgttatcatcgtcggatacgcgccgtgtcttggtctgaacattgttttctgcctttctttctcacagaagcccgcggaaattctctatccggtggaaggtctggaaattgttgtcgtggtggttcttcgcgccgttgaacgccgtgcggctcgagtatattatgtcatcgccgtcgaaccggaaatcgatgtactggaacgcgaccttcgccgggtcctcataacggtaatctatcaggtggcgcacgagcttccactccccgaggttctcggagcacatgagcgacaggaggttccgcccggtcttcggctcgtcgagcttatagctgacaatcgcgaaatacagcctcgttttctcgtcatagagaatatcagtcttcgacggcgtcgccgggaggttaatgagcttttcgaatttcagcttcttctccggctcgtccggatcgaacgagagcaggagccacacgccgttgtcgtatctcaggaagtcgtaaaccttcccgtccggaccgacgacgacattgccctcaattccgcccggaacgccttttctcttcgactccggcgcgtcgtcggggaaccagaagccgctcgagacccaattccccgcgtcgagaaggtcgctgtgctccggagccgagataacggcgtcgccgaaggtgaactttgcccacgagccgtactgcacgtcggtcatgacacgaccgtgagagacgcacacaggcatcggcgccctgtgaagcccgttctcgggtgagaaattcgacccgcggaagagcaccgtcggcacagtccacgtcttcccctcgtcgtccgaacggccgatcagcagatcgccgtactcgcgcgagacgccgagcatatagagcttcccgtcagagaggaacagcttgccccagaagcacgggaaaagttcggtgagatatcgccacgtcttaccgtcgtcctccgaagagtatatgagcgtcagattctgcgcgaggtcacctgcgaaaacgtccatcgacgcgagcagctttccgctttgcagcttcaggagcgacggcgagcagagataatgaccggaaaaggcgtactcattgtcgtccggatgcaggtaatttatgacgattccgggaacatatccggtgcggacgagccttattccggagcgttttccgtcgtcaaggcgttcggcgaaaatctcgtagtcagtcaggtcgtcacagtcaacagacacggtgaaaatctccttgtcatggtcaggcgagaccgcgttccactcgccctccccgcggcgtctccaatagaacacatggcgtccgtccggcgcgccgttgtcgataaaatcggcggtgaacccgccctctcgcggcgcgagacggcatatatacggcgagaatgaccgctcctcctgcggcatgggcgaatacggacggaaattccatccggtgattgctttcataagtgtaacctccaaaaagattgtatgacaatattatagcatatgccgcgcaaaatgtcaacacccggcaaacaatttctcatattgtatgacaactttttcaagcaaaattcaggcggggcgaccccggaagatcgtcccgccgtttatttcaggtattcccgctgttttcgcctgatgtttccggggcgtcactgtcaccgaagcttcccggctgtccgtcgggcttttccggaggctcggagccgctgttcccgttcccgcccgggaacccgtttccgtcagggggtgtcatgccgtccggcatctccgctccatccggcggggtcattccatcgggcatctccgaaccgtccggaggggtcattccatcaggcatcgtcgcgccatccggaagctcgggtctgtcggacgtgtcaccgttccatccgccttttctgcctcctccgaagccgcccggaccgaagcctccgcccatgccgccgaagccggagcctgttatcgtgtcggtcagcccgactgttgtcgtcagatcgccgccggtcacggtgtaggtctcgccgaccttaagatcggggtgtgagattacaacacactgatattctttctcgggagtgtaggacgcgacgacgtttccctcactgtcggaaatcctgatctccccgctcgtcgtgccgccgaaggtcacgagcaccgaggactgcgtcgagtcgctgccgaagttctgcgccattccctgtgccccggaggcgaagattataccgccgcttatagccgcgttcccgttatagtcgagctctccgtcagcactgcttgtcggtccggaaacacagacctcgccgccggtcattatgaaatcgccgttagagtcgatgccgtcgccggacgcgtttatccttatcgtgccgccgtttatcgtgatgcagttgtcgccggcggagaagatgtccttcccgaacattccggcaaatccggacgagtcgtcgcccgcggcgcttatgccgtcgtcagaggcggtcagcgtgacgtcgccgccgtttatcacgacgtccttgccctcaaccccctcgtaacatctgccgatgacgattgttccgtcgtttatcgtcagcgtctcatccgcgtggaacccgtcgtcgccggtcaggatatcaaagtcgccgccgtctatagttacagatgagttcgagtggacggaatcgtcatacgcgtcaattctgaacgttccgccggagatatggagctctccgtcgctcttgaacgctttcatgctcgtcgtgtcggaagagtcagtcgaagaggacgaggtctttccgaaaccgaaactgttcccgccgttcgatatcgtctccggacttccgccgccggtcgttataccgaaatctccgccggtgatcgtcagagtgcccgcggtgtcgacgccgtcgccgtcagaggtgacattcagactgccgccggtgatcgttacgtttccgagcgtcgtgtcgtccttgttttcagcgtggatgccgtccttgccggacacgagtgttagcgcgccgccgctcatggtcagggaatccttgacctttaccgcgtggttttccgccgtgatctcatacgtgccgctctcgatgacaagcgtgtccttcgcgttcacaccatgaccgccggtcgaggttatcgtgagctttccggcgccgttcagggtcaggtcgtccttcgcgtagacagcggcgtcggtgtcgccgtcgtctgagaacgaagaggatataagcgtgttctcactgccctccgcgagggatatcgtgacgtttccaacctgctttatatatatcgccgcgccgtcggagttcgttatcgagacgccgtcaaggatgagcgtcacattgtcgtcctcgcccgcgtctatcgtcagccgcccgtcggagatcgttccggcgacgaggtactttcccgccttgtcgatcgtcgtgctctcgctgagggtcagcttttcggcgtccgcggtgtcgaccgtgacgggcgtagtttctttgattttttctgttgtttccgaacctgatgttccggagttgctctgcccgccggagcaggacgcgaggagcatcgcggagattatcagcgcagacatcagttttccgtattttctctcaaagctcattgcagctttcctccttttccatgatcgcgatctcgaggttgccgttgcggcatctgaggtcgtccataaagttcttttcgtcgcgctcgttcttcagcttcaccatgtagcggagcttgaagaggctgcccatgttcgaggtgttcaccgacgtgagcctgtgctcgcttgtgtatctctcgaacaggtcgtcgaagataccggtgtaatcgagatcctccggcacgacaacgacaagctcgcgggacgcgtccttcttgtcggtgagccggtcgaagagatacatgaagcccgccataaccagtgtgaacagaaccgcgtaggcgagatatcccatcccggtgataagccccgcgcccatcgcgaggaacagcgtcacgatctccttcgcgcttccgggagccgaccggaatctcacaaggctgaacgccccggcgaccgcgacgcccgctccgacgttcccgttgaccatcatgatgacgacgcagacgacggcgggaagcatcgcgagggtcgcgagaaagctcttagagcttttcccgccgttccgcccgcaccttgaagcgacgaaggtgaggaagacgccgatgagaagcgagacgaggacacagagaaggaaatctccgactccgatgacgtttgtcgacgaggtgtcgaacagtccggcgaataagcttgacatttgatttgcgacctttctgtgttaattttgttctacgctttgagcgtcatatcgccgcgctctgttgagcggaagaacgcggcgccggcgtttttgtttccgaagatgattttctgccgcggatcgattatacggcggtatatgttcccgtattttgagaatgaggtcttatggattttctcttcggtgagtattctgcatatccagagcgggaaggctccgcccgctttgatttccatcagcgactgaccgtccgggagaagcttcagtccgcctatgccttccgtgagtgacaggtcggtgtctcttccgaggatgttgtcgtcgaaggtgatgcggaattcgtggtcgtcgacggcgtagaaggcttctctttcgcaggatacgaaggcggcgggggcgagggttttgtatcttgagagcatgaaatcgagttctttcatgacttgtgcgtcgagtgcgctgtcttcttgtccgctggtgtacggaccgtcccgccagcagccggagaggtaggcttcggcggcggcgttcgtcatgcggcagcggcgtttgtagactattccgtcgaattttttcttgatttcggcgtagactggggaggtttcgtctgcctgtttgtagcttcttagtctgagtttttctttgtaaaccggcgcggcgagggagcggcggatgaggaggtggtcgggggtgtcgtagtagaggcttctgacagtgcttctgccgaattcgtcggggcgcatccatcggagcatttcgtgttcgataagttcgcgttgtttgtctgagacgaggaatttgacttcgctccgggcgaagactttctggacggtcaccctgaatcattcctttcggtgatttcttttgttgtgtaataattatataatgccagtgtgacagccacgtgacgaagtatgggagttttgtaaaaggaatgtcaaatcctgcgcgaacaatttacatgaataaacagttaaagcgcgctaacagttccctccgataaacaaaaaaacgctcagacgagcgccaagagttaaagtataaaagtttaggggaagaaggggggcgcgggggg

SEQ ID NO: 437 - DNA, 32759 bp, Unknown
  16S sequences of unknown bacteria
ttgtggaagtacgaagtacgaaacaatccgtaaggcatcttttgacattaatatcttatgatgatgatatcagggtcaaaaggtcatgctttttcatacaagtatgaaaaagcatgacttattgacccgcaaacaccgaaaagtagccatttttcgtagaaaatgagcggatttgaggtgttttaggattgcgagagcacgaaatgcgaagcaatccgtgtatcataggaaccaaaatatcttttgaccccaacatcatcttatcactttaactaaatcaagctgcaaagcaactattcggttatgagatatattaagaagcgacccggttacagatgtatttcttatgctcctacaagtagcaggcataatcaaaaccgatattgtccatcatccttattgcttctttttgctgtggtgactgcagtaggacctttgtttttatcataccctaaaatacaaaaaaaagaaagtttttttgattgtaagctgctctgatttggtttatactaatatccagaatattgattcggttaaattataaaatcgaaaggacggaataaaaatgggaaagaaaaaatcattactcaaaacctctttatttacggtaggtcttctcgaagtggtcaatcgcatcattgattctgcttccattgcaaatacaaacaccaaaaccggcggttcctattatcactggaaacacggtgatatttactatcgaaccttcggcgaaaaagactatcctccgatgctgctgatccatgatctgactgtctggtcctcggaatatgaatggctgaaaatggcaaaggttctctctgacacctaccgcatttactgcgttgatctcattggctgcggtaaatcagataagcccgggattacctatacaaattatttttatgtccagatgattaccgattttgtcaaagaagtcatcaaagctccgacgctggtcgctgcgaccggactttccggttcctttgttctgatggcaaacgcgctggatgaaacgctgttcactgagatcatgcttgtcagcccggaatcacttactaccctgaaaaaatcgccggatgaatacagcaagctgtggctgaagctgttcgaaattccggtcattggtcggtctgtctactatttcctcacgaaccgatccaataccgagtattatctgacagaaaaatgcttcctgaattcgtttcacatggaaccctcgatcacacgcacatactataatgcagcgcatgccagaaatggaaatggaaagtatctgcttgccagcttaaacagtaattatctgtatgcagacatctccaaggcgcttcagaagacgacaaaacgaattgtcatggccttcggtgacggcgatccggatgcaaagagcacactggagcaatatctgagactgaatccggatatcgttgtagagtacattgaaggcgcaaaacaccttcctcagctcgaagacgaatcctatgaagagatgctggagttaatgtatcacttctaaacataaaagtacaaaaaacaggcttttcatctgagatccggtctcagtgaaaagcctgttttgtcacttctttccgccactcccaagcggttccttcgacggcagccctgccttgcgcggatactttgccggagtcggacgttctttccggatgacgacaaaagaacgccccagatcgcttcccggcagacaaaatgtctccacctgctccacctttccgccgagcagataaatagctttttttgcctcttgtacttctgtatctatttccatcgatttgtatgaaataaatcgacctttttcgtttataaatggcacgcagtattctgacagagatgagagatttgcgaccgcccgtgaaacgcacagatcaaactgttcccgataagccggattctttccaaaatcctccgctctcccgtgcactgccgttatctcctcacagccaagcctgcctgtcagctcatttaagaactgtacacgcttgtttagcgaatccagcagaactactttgatatgcggaaacgcaatcttgatcggtacccccggaaatcccgccccggtgccgacatcgatcagtgtctgaacctgcttcatatcacaaaccttcacaatcgaaagactgtctacaaaatgcttctgcacaacctcttcatactctgtaatcgcggtcagattcatgacctggttcttttctaccagaaactcataataggtcaggaactgtcgtacctgctcatctgtcaggataattcccaatgcttcacagcccctgcgcaatgtgttttcatctatcatctttgttatttctcccctcttgatcctgtagaagcaaggtacacaagcaatactgacacgtccgccggcgatacgcctgccagtcgggatgcctgtccgatcgactccggacggtacatggagagcttctgcctcgcctctgtccgaaggcttggtaccgtctcatagtccagatctgccggtatctttttcctctccatcttccggaactgctctacctgcttcatctgccgctccagatatccggcatatttgatattgatgttgacctcttcgcatacatctgccggaagattcggacgctccgtatcgatctctccaagtgcctcatagctcagctccggacgccggatcagctccgcaaggctcgcagatgtctttaaagatgtgctcccgtgctccttaagacacgcctgcacctttgcattggccccgatatgcgtcgcctcgacccgtcttgtctcggcctcgatctcctgttccttcttcaaaagcttctgatacctctcttcgctgatcaatccgacttcatagcccttcttcgtcaggcgcagatccgcattatcctgccgaagcagcagccggtactccgcgcgggatgtcatcatccgatatggctcccggttctcctttgtcacaagatcatcaattaatacaccgatataggcttcagaacggtccagaacaagcggctccttcccctgtatcttccgcgccgcattgatgccggcaatcagcccctgggccgctgcctcctcatagcctgaactgccattgaactgaccggcgctgaacagcccggaaatctttttaaactcaagtgcgagcgtcagattccgcgcatcaatgcagtcatattcgatcgcatatgcatttcgcacgatctgcgcatgctccagccccggaacggagcgatacatcgcaatctgcacatcctccggcagcgaacttgacattccgccgatgtacatctcatccgtatggattccttccggctcgataaatacctgatgtcggttcttatctgcaaaccggacgaccttgtcctcaatcgacggacagtaacgcggtccggttccctcgatcataccggaataaagcggcgaccggtcgagattttcccggatgattttatgtgtctcctcatttgtataggtcagccagcacgatacctgctccttctgaatcgcatccggatcggtcgtaaaggagaacggaacgatacgttcatcgcccttctgctcctccattttagaaaaatcaattgattttttcgcaatccgcgccggtgtgccggtcttaaaacgatacatctttaccccgttcccttttaaggaatccgtcagataattggccgcctgcagcccgtttggcccggtatagacactcacattgccgtaaatgcagcgcgccttcagatatgtccccgtacacagaatcgccgccttgcagtgataaacggccccggaatacgtccttaccccggtaagcacaccatcttccacaatcagctccgtgacctccatctgacggatgctcagatgctccgtgcgctccaacaccatccgcatgctgcgcgaatagtccgacttatccgcctgtgcgcgcagggaatgcacagccggtccctttgactggttcagcattttcgactggataaaggtccgatcgatattttttcccatctcaccgcctaacgcatcgatttcccttaccagatgtccctttgagctgcctccgatattcggattgcacggcatcagcgcaatgctgtccacgctcacggtaaatatcaccgtctccatacccatgcgcgcacacgcaagcgcagcctcgcagcctgcatgtccggctcccactaccacaacgtccacgaactcttctactatgctcatgtctttccttcctttttccttgcttcctgtctattttcccatacaaaaccggctgaaaatctcattcacgagatcttcgccgacggtctcgcctgtgatcgtccccagcgcctcatacgcggccagaagatcaatagaatagaaatcctcaggcatgccgagtgaaatgctctcctgcacccgctgaaggccttctgcagcatcccaaagggcgtgcttctgtctggcattcgtaatgtacagctcatcctgcacagatatctctccctgataaaacagattgtgaatctgttccgtcagtttggaaagccctgtctgctcctttgcggacactgatacgacgggatagcgtccccctgtcagctcctgcagcttcgtttcctgcaatgtcacagcaagatccgtcttgttcagcaaaagaatcgcctgttttccctcgatcacctttaaaatctcccggtcattttcgtctaaaggacgcgccgcatcaaatacacagaggatcagatccgcctcccctgccttctcaatcgcccgtccgacgccgattttttccactacatcctccgtctcgcggattccggctgtatcgatcagattcagggtaatgccctgaaatgcgatcgtttcctctaaagcatcccgcgtcgtcccggcaatatccgtcacaatcgcccgctcttctccgaccagcgcgttcagcagcgaggattttccggcattcggctttcctaaaatgaccgtgcggatgccttcctttaatatccggccattttccgaggatgcgatcagctctgaaagtgttttctgcagctgatgcacctcctcggaaagccggtcaggatacccatccaggctgatatgctccggatcgtcgagcgccgactcgataaacgcggtctgatataaaatccggctgcgcagttcttcaattaccgtgcggaccgcaccttttaactgctgtaaagaactctttaacgcatactcattttttgcctgaataacatccataacggactctgcctgagacaggtcgatccgtccgtttaaaaaggcgcgtttcgtaaattcccccggctctgccgggcgcgcgccatttttcagtactacatccagcacccgcttcatcgcgtagacaccgccatggcagttcacctccactgtgtcctccgcggtgaagctcttcggaccacgcatcagcatcacaagtacctcgtcgaccgtttctccctgatctacgatatagccatagtgaatcgtatgtgtcggctgatccgccagtcgctttttcccgcctttggatcgatacacccggtccgcgaccgcgacggcatcctttccgctgatccgtatgatcccgattcctgaattcgacactgcggtagagatcgccgcaatcgtatcctgctccatgctcctgttccccatttctttctgatcttacccttttgtccgggcttttcgctgtccctcattatagcatccgaaaacataaaagaaaagccaatgtttccactggcttttccaacaatcggtatgatttaattttccgcttccggctgctgcggctcctctgccgctacccctgcaggcgttgcctgctctttgcgtcttgtgtactcagaccggtcagatctgcggtactctctgcgaccgccctcattgccgccacgctcattttttctgcgcggtgtcacaacgaccttccggttcggctcctctccctctgaatgagtcgtcacatacggatcattctgaagtgccgaatgaataatgcgacgctcatatggattcatcggctcaaggaataccggatgtctcgttttctttaccttaaacgcaatgttcttcgcaaggttctccagggttgcttttctgcggttgcggtaatcctccgtgtccagctttacccgtacataggaagcctttcctttattgactaccagggaagtcaggtactgcagggaatcaagcgtctgtccccgctttccgatcagcagccccatctcctcaccggaaagatcgacagaaagcgtatcatcctcaaaagatgcatgaacctcgatctgcatattcataacacggaacatatcagtcagaaatgtcactgctctgcgctttgcctcttccggatcagccggaacacgcggctgcttcggctctgcaaaaacggcttcttctgccgcttctgccggtctttcgggcttctcctgcggcttttctgcttccttttctgtcggctttaccgctgccggtctgcgcggctctttttttacttcccgattctctctcttctccggcttatgtgttgcttcttttttctccggagcagcctccttcttcagttcaggcacctgctcctttttcatttctttttttggctcacgcttcggtttttctgccttttcctttttctctccgaatacttcctgcatcagatcttcatcggtgaatttcttgcgggcctcgatcatggccttacggcttccgattccgaaaaagcccttggaaccttcatcgataatggtgtattcgatgttgtcactgctcgtttcgagctggatagacgcttctgtgatggcgtcactgactgtttttgccgttacacgaatagaatccataacccttatcccccttatttctttgcgtgcttctcattgtactgctgtaccatctgcgcctttgacgcgaggctgcccggctttgcttttgttgtattcttataatagtcggttgcattctgaatcttctcggcacgatcttccttgctcggctgcggacgatcgattgtctttgcattcagcttcgccgtatttgtaatcttctgtggcggaagccccttctttgcacgctttttatttgccttctcgatatttttctttacgatatcatccagatccatcttgtcgatgtgcttgtttacaaccagctgctggatgcttcgaaccaccgcacctatgatccagtaaatacccatacctaccggaagtgtgaaacagaatacggcagacataatcggcatcatcacattcatggacttcatcgtcgctgccatcgtatccgctgcgccgccggaggtcggctgtgtatcgttctgcgtggacatcagcttggtattgagccactgtgtcagcgcggaaagcaccgggacaagcagtgcggcaataatcatcagcacggagcctgccgcaatcgcggtctggaaaatcgatgccggtgaatcagcgatgttcagtccgaggaaatagttcatgcggtcgacatcgccttgtgtactcgtaatcaaagaagagagatccggaaactgcttcagaagtgcactccagttctccggcttgaatttgtacagtacatcgatcagggtaagctctgtcatttccttaaagcttactgcatttttggaagcaatttccgccataaagtcctgcgcaccgctcacattcatcagtgcctgtgccagcggaagaaaggcgttctttacagtacctacataagccggaatattccagatcactcggtacagtgcaaacaggatcggcatctggatgatcagctgcagacagcttcccatcggatttacgccatatttctgataaacagcctgtgtctcctcattcatcttcatcatggctgcctgatcctgtctcttatccttatatttcttctgaattgcctgcagctcaggattcatcttgctctgcagcttggaaaacttctgctgcttgatcgtcagcggcatcagaagcatatagattacaatggtaaataaaatgatgcacagaccgatgctctcgataccgatctgcgactggacccagaatattccattcataatgtagccgagcaaggtggctaccggtccgatgataaatgtcgtgctcttggtcaataacatggtttactttcctcctcatggaacggggtcatatccgcctctggaaaaaggattgcacctgaggatccgccacactgcgagcataccgccctttaccgcgccatatttctggattgcctccagaccatactggctgcacgacggagtgtaagggcactttgtgcttttcatcggtgacagatacttctgataaaatctgatcagattaatcaataccttcttcatgttccttcttcacttctttcttttcctcttccttcagaatggaatgaagtctgccaaggtgaagcagcgcgctctcaatttcaaagaaactacgttctttcgcgcccggccttgcaatcaccactatatcaaggccccccacaaatttctgttcattcaatcgataactttcccggattaatcgcgtaattctgtgtcttaccacactgtttccgacttttttactgactgaaattccgatacggttttcctgcacatcctgcttcaatacatacatgatcagatatttgttggcatacgatctgcccctcttatatacgcgctgaaaatcaccgtactttttcagagattctgaaaataacatatttttttcctttaaaaacgtaactgcccggcattaccggacagttacaaaaaaggccacatatctgcggcctatgctgacaatacttttcttccttttgctcttcttgcagctaagacttttcttccgcctgctgtgctcattcttgcccgaaatccatgaacctttgatctggatctctttttcggctgaaatgtcatcttcattggcgtggcacctcctttttctgaaccaaatctatctcagttggtattttaatgattgtcatgtatatatgaaaacatcgtttcaattataagctgaaaacctgcctgcgtcaagcaaaattttatccacatttttatccacaccggttgataacttttccagttgacgtaatgttatccacaacttgttgataacttgtggataattttctcacaccttgtttacagtttggttatccgcagaaaaatgtgtgtatttttctcgcttttttgctatgtgtatattgcggatgagttatgcacatcttttcttttccggttttttacttttcattcttatgtcaaccgcccgagcgcatttccacccggttttccacatttccaatacctaatttccggatatccgccctttgatgtggataacgtgaaaactttccattgctaatttctctgttttaggttaatattattgtaggaaaaaatggatttttggagatacgaacatggacatactacaagaaaaatgggatgacatcctttataccgtcaaatcggaacatgaactttccgatatgtcgttcaagacctggctgaaaactctggagattttatccatttcagaccacaaggtcagctttcttgtccctaccggacagatggggattgattatattacaaaaaaatatctgattccgctcaatgtagctattgcagaggttaccggaacagaatatgagatcgagctgctggctccggagcaggcgcacaatctggaaaataaaaagatgtttgcctccgtcaaccatgctgacaacagtgcaaatgtagaaaatgcgaatctgaacccaaagtataccttcgacaccttcgtcgtcggcaacaacaacaaattcgcacacgccgctgccttagccgttgcggaatctccgggaaaaatgtacaatcctctgtttatccacgggggcgccggacttggcaaaacacatctgatgcacgccatcgcacactttatattagaagaaaacccggacaaacgggtgctctacgtgacaagtgagacctttacaaatgaactgatcgaagcgattcgaaacggcaacaataccgccacaacaaaatttcgcgaaaaatatcgaagcgtcgatgttctgttgatcgacgatattcagtttataataggaaaagaagcaacacaggaagaatttttccatacgttcaatgatctccacggaaagaaaaaacagattattatctcctctgataaaccgccaaaggatatcgagacactcgaggcccggcttcgttccagatttgaatgggggttgatcgcagacatttcctccccggattttgagacacgaatggcgattcttcataaaaaggaagaaaccgacggctacgatatcgacaacgaggtcatcaaatatattgcgatgaatatcaagtccaatatccgtgagctggagggtgcgttaaacaagctggtcgccttaagcaaccttgaaaatcgcgaaattaccgtaaaactggcagaagaagcattaaaagacatcatttccccggacgaaaagaaggaagtgacgcctgctttcattatatctacggtcgcagagcattttcacgtgtcggttgatgacatccggagtaataaacgaaataccgaaatcgtcgtaccacgccagatcgcgatgtacctctgcagcaatttgacaagcgtcggactgaaaaaaatcggttccgagatgggcggacgcgatcactccaccgttttgcacggctccaagaagatctcctctgagctgaagacatccgaggacatgcgaaaaaccatcgaaattctaaagaaaaagatcaatcctagctgaaagttatccacaaagttatccacttatccacaggatatctatggtatatgtgggtgaatgcactgtggacacctgtttataaacaaccgctcgtattttccgttgtttgctgtggatttttcggattgtgcataactttccggttatccattacctgtcagggtgactttcacagagttattccatcgggtttttccagtaattccgcggcattttggacttttacacttatccacaccccttacggcggttactgcggttctttttcttttttatatctatccatccggactttttttcaggtctttggataaccagatcatcatcagtatcaaaggagtgtttacttttatgaaaatcatatgcaaaaaaacggatctgctgaaaagtgtcaatattgtaatgaaagcagtctcttcaaaaacgacgatgccgattcttggttgtatcctgattcatgcaacaacagatgaaatacggttcaccgccaatgatatggagcttggcattgaaactaagaccgacggaatcattcaggaaaaaggcatggtcgcccttgatgcaaagcttttctcggaaattattcgaaaactgccagataatgatgttattattacatcagattcaaataataatacgcaaattgtctgtgaaaaagcaaagtttacgattatgggacagaccggagaagacttcccgtttttgccgtttgtggagaaggattatcagatcacaatttctcagtttaccttaaaagaagtgattcgccagacgattttttctattgccgtcaatgacagcaataaaatgatgaccggagaactttttgatattaatgacggtgaactgaaggtcgtttctctggacggacatcggatctccatccgtaaaattgaattgaagtcttcatatccggcgaaaaaagtgattgttccgggcaaaaccctgactgaaatttccaaaattctgaccggcggcgtcgatgacaatgtggatatttattttacagacaatcatatcctgtttgagtttgaagacaccgtcgttgtttcgcgtctgattgagggcaattacttccgcgtggagcagatgttgaccaatgactatgaaacaaaggtcacaatcaataagcgcgagtttttagactgtattgaccgtgcaactttgatggtaaaagaaggcgataagcgtccgatcatcttgaatattaatgatgacgtaatggaactgaagatttcttctcagatcggctcgatggatgagatgattgacattcagctggaagggaaaaatatcaaaatcggcttcaacccgaagctgctcattgatgcacttcgcgtcatcgacgatgaaatgatcgatatttactacatgaatccgaaggcaccgtgctttatccgtgatgaagcgcaaacgtatatttatctgattctgccggtcaattttgttgacaatgactaatggtgaatgatgaatgataaggaaaccactcaggataagtgatattagatgaaatgtcacttatcctgaaacggactggaaatgtccgcgcgagaaagacaggcaggaagaaagataaggtatttgtcacagaggtgcctgtgaaacggtacggaagaaagggagaaacaagatggaagtagtagaggtaaagcttcgggatgaatatatcaagcttggacaggcgttaaaggcggctcatgtcgtaggatccggcgtggatgcaaaatttctcattcaggacggaaaagtaacggtgaacgggcaggtggagctgcagcgtgggaaaaagcttcatgcaggagatgaagccacctgtggaaattttcggataaaaatagtataataggctggtagggaaatgcttgttgagtcgataaagctggaaaatttccgcaattacggcagtctggagctggaatttgatccgggaactaatctgttctacggagataacgcacagggaaagacgaacatcctggaggctgtttatctgtgcggtacgacccgctcccacaaaggaagcaaggatcgggagatgattcatttcgatcgggatgaggcacatatatgcatgcggatccgcaagggagatgtgccataccgcatcgatatgcatctgaaaaaaaataagacaaaaggaattgcaatcaacggagttccggttcgaaaggcgggagagctgatcgggcttgggaattttgtgtttttttcgccggaagatctgaatatcatcaagaacggaccgggagagcgcagacgatttctggatatggagctgtgtcagctcgattcaatttatctgtttcatctctcgaattataataagctgctcttacagcggaaccgtcttttaaaggattatggtttttatccggaagcggggacgatgctggatgtaatagatgagcagctgatacagtatggcacggcgctgatccggtcgagacgtgtatttacggatcagctgcaggagattatcggtggaattcacagcagtctctccgggcggaaggaagatctgacagtgacctatgagccaaatacagaagagaccgaatttggacagaagctgcaggagaatcgggagaaggatcttcggatgaagcagacgatgacaggtccgcatcgcgatgatctgggatttgccgtgcatggtgtcgatctgcggaaatacggctcacaggggcagcaacggacgactgcgctttccttaaagctggcggagatcgagattgtaaaacaaagtgtaaaggatacgccggtgcttttgctggacgatgtgctttcggagctcgatggcagcagacagcgttatcttctggagaacattcatgatatccagacgatgatcacgtgtacgggcgtggatgattttgtagagaataactttcaaatagaccgactgtttcaggtagtagaaggaacagtcgaacgaagaaattgacaggagggcttctatgagcgcagaatacggtgcagatcagatccagatactggaaggtctggaggcagtaagaaaaagacccggtatgtatatcggcagtacctcgacgcggggactgcatcatctggtatatgagattgtagataatgcagtggatgaagcactggccggatattgtcacaatatctttgtgacgatcaatccgggggactccatcacagttgtggatgatggccgtggtatcccggtcggaatcaacaaaaaggcgggtcttccggctgtggaggtcgtatttactgtgctgcatgcaggcggaaaattcggcggaggaggatataaggtatccggaggactgcatggcgtgggagcatcggtcgtgaatgccttaagtgagtggctcgaggtcgagatttgcaatgatggcaagatttatcagcagcgctatgagcggggcaaggtcgtcgaaaagctgactgtgatcggaacctgcgagctggaaaagaccggtacgaaggtcacctttttgccggacaaggagatttttgaggataccgtctatgattttaatacgttaaagcagcgcctgcgggagatggcattcctgacgaaaaatatccgcattgtgcttcgagatgagcgaaatccggaggaaccggtagagaaggtcttccactatgagggaggcattcgcgagttcgtaaagtatctgaataagggcaagactccgctgtatgaggatatcatttactgtgagggaaccagagacggtgtgtatgtcgaggtggcgatgcagcataatgattcgtatacggagggcagctacagctttgtcaataacatcacgacgccggagggcggtacacacctgaccggcttcaagaatgccttaacgaagacattcaatgactatgcgcgtacgaataagctgatcaaggattccgaccagaacttaagcggagatgatatccgtgagggactgactgcgatcatcagcatcaagatcggtgagccgcagttcgaaggacagacaaaacagaagcttggaaacagtgaggcacgtggtgcggtagagagcgtcgtaacggaccagctcaccattttcctggagcagcatccgcaggtcgcaaagacgatcgtagaaaagtctgtgctgtctgcgcgggcgcgtgaggcagccagaaaagcgcgggatctgacgaggagaaaatcggccttagacggattgtctcttcctggcaagctcgcggactgctccgataaggatccgtccaaatgtgagatctacattgtagagggagactctgcgggaggctcagcaaaaacagcgcgaagccgtgcgacgcaggcgattcttccgctgcgcggaaagatcctgaacgtggagaaggcgcgtctcgaacgtatttacggcaatgcagaaatcaaggcgatgatcactgcttttggaacgggcattcacgaagattttgatatttccaagctgcgttaccacaagatcattatcatgaccgatgccgacgtcgacggtgcacatattgcaacgttgcttttgaccttcctgtatcggttcatgccggagctgatcaagcagggctatgtctacctggcacagccgccgctctacaagctggagagaaataaaaaagtgtggtatgcctattcagatgagcagctgcagaaaattcttgatgaggtcggaagagaccagtacaataagattcagcgttacaaaggtcttggagagatggatgcggagcagctctgggagacgacgatggacccggaaaagcggatactgaagcgtgttacgatggatgaggcgcagtcctcagagattgatctgaccttcacgactctgatgggcgatcaggtagagccgcgaagagagtttatcgaagaaaatgcgaagaatgtaaagaatctggatgtatagtgccggaagtccgtctgaatgatgtcagacagggatgaatgagataagacaggagggaaatccgtggaagataatatatttgatcaggtccatgaagtggatctgaaaaagacgatggaggaatcctacatcgactatgcaatgagcgttatttcacagcgtgcgcttccggatgtccgcgacggactgaagccggtacagcggcgtgtgctgtattccatgatcgagctgaacaacgggccagacaagccgcaccggaaatgtgcgcgtattgtcggtgatacgatgggtaaatatcatccgcacggagacagctcaatatacggtgcgctcgttaatatggcacaggactggtcgacccgctacccgctcgttgacggacacggcaacttcggttccgtcgacggagacggcgcggcggcgatgcgatatactgaggcgcgtctgagcaaaatttcaatggaaatgcttgccgacatcggaaaggacacggtcgattttgtaccgaactttgacgagacggagaaggagccgacggtgcttccggcgcgttttccgaacctgctcgtaaatggtacgaacggtatcgcagtcggtatggcaacgaatattccaccgcataatctgcgtgaggtcatcgcagcggtcgtaaagatcattgataaccgcatcgaggagcagcgggagaccggcctggatgagatcatggagatcgtcaagggaccggattttccgaccggagcacagatattaggtcgcagagggattgaggaagcataccgcacaggaaagggtaagattcgcgtgcgtgccgtgacgaacatcgagtcgatgcaaaacggcaagagccggatcatcgtgacagagatcccgtacatggtcaacaaggcccggctgatcgagaaaatggcagagcttgtgcgcgacaaacgaatcgacggaatcacggcgatcacggatgagtcaaaccgcgagggtatgcggatcaatatcgagctgcgcagagatgcgaatgcgaatgtcgtgctgaaccagctgtataaacatacacagctgcaggatacgtttggcgtgatcatgctggcactcgtcaacaacgagccgaagacgctgaacctcaaagaaatgctgacgtactacatccgccatcaggaagatgtcgttacaagaagaaccaaatatgaactgaacaaggccgaggagcgggcacatattttacagggcctgcttatcgcccttgataacattgatgaagtgatccgcatcatccgcggatcagaaaatacacaggcggcaaaggcaggactgatcgagcgctttgccctaagtgatgcacaggcacaggcaatcgttgatatgcgtctgcgcacgctgaccggtctggagcgcgagaagctcgaggcagagtacaaggagctgatgaagcgcattgaggagtaccgtgcgattcttgcggatgagaacctgctccttggcgtgattaaaaaagagatccagatcattgccgataagtacggggacgaccgccggacctctatcgagcgcgatgtctttgacatcacgaccgaggatctgatcccggatgagaatgtcgtcatcacgatgacacatcttggatatatcaagcgcatgacgccggataatttcaggagccagaaccgcggaggcaagggcataaaggggatgcagacgatcgatgatgactacatcgaggagctgcttatgacgagcacacaccattacctgatgttctttacaaaccagggaagagtgtaccggctgaagggctatgagattccggaggcgagccggacggcgcgcggcacggcgatcatcaatctgctgcagttgatgccgggtgagaagatcacggctctgatcccgatccgggagtataaggaaggcagattcctgtttatggcgacgaagaagggactggtgaagaagactccgatcacagattttgcaaatgtgagaaaaactggtctgactgccatcactctccgcgacgatgatgaattaatcgaagtgaaatttacaaacaataaaaaggacattttccttgtcacaaaatatggtcagtgtatccgcttccatgagacggatgtaagaaagaccggccgtgcgtcgatgggtgtcatcggcatgagcctctcggatggcgatgaggttgtcggcatgcagctcgatacgcagggagaatatctgctgatcgcatcggaatatggcatgggcaagctgacgccgatcaccgaatttagtgcacagaaccgcggcggtaagggcgtcaagtgctataagatcatggagaagaccggcaatgtggtcggtgtaaaggcggtcaaccgtgaacatgagatcatgatgatcaataccgagggcattatcatccagatggcatgcgaggatatctcggtgctcggacgtgtgacaagcggtgtgaagctgatgagtcttgatccggagcaaaatgtacgcgtagcaagcatcgcaaaggtaaaggattcggcgaagaagaacgaagaagatacattaaaatcactcgaagaagaactgaagaaggaagagtaaggcatgaggatacaaaggctgattgccatctgggctgcaaagctgtgcagtaccgcgtgccgtctggccggcaaacagggcgtgaccctggccggtaagctggcaaggaagattgatcctgatattttgcgggaactctctttggaggtgcgggaaaagatttttgtagtctgtggcacaaacggaaagacgacgacaaataatcttttgtgctctgcgattgagtcggaggggatgaagctggtctgcaatcacaccggatcaaatatgcttgacggtgtgactgcagctttcgtgctggcggcgaagaacaatggacatctggatgcggactatgcgagtattgagattgacgaggcgtctaccgtgcgtgttttcccgtattttaaaccggactatatggtgctgacgaatctgttccgggatcagctcgatcggtacggtgagatcgatatcacgatgaatctgctgaaaaaagcaatgcagatggcaccggatatgaccgtgattgtgaacggcgatgatgcactctcggcctatctggcgatggaaagcggcaatccgtacgtcacctacggcattaccgaacaggtattcaaggagcaggataccggggagattcgggagggacgattctgcaagcggtgcggggagcggctggagtatgacttttatcactatagtcagctcggcatgtaccactgtccgaagtgtggatttgcacggccggaggtggattttgatgcggaatatattgatatggcgcatggtctgaattttgacatcgtacgctttgtcagaagcgcatcctgtgagtcagaagacggaaagcacagcgtgaaccggaggcttccggcagagacggcgcatatatcggtcaattataagggattttacaatatctacaacatccttgcggcctacagtgcggcgcgtaccggaggcatggagctgaaaaattttgcacaggtgctgcaggatttcaatccgcagaacgggcggatggagcagttccatatcggaaataccgacgtgatcctcaatctggcgaagaatccggctggctttaatcagaatatttctgcggtgatggaggataaaagggaaaaagatctgatcattgtgatcaacgataacgcgcaggacggtacggatatctcatggctgtgggacgtggattttgaccggtttgcggctccgtcaatccgttcaatcaccgtcagcggtatccgttgccaggatatgcggctgcggatgaagtatgtggatattgaatctgagctgattgcggatgtgcagacagcgatccggaagcgtatcgcggacggctgcggcaatctttatgtgctcgtaaactatactgcactgttttcgaccagaaatattctggcaaatatgcattaaggtaccagggaggaatccaacatgaagcttaccatcggacatctctatcctgatctgctgaatctttacggcgaccggggcaatatccagtgtatgaaaaagcgctgcgaatggaggggcattgaggcggaagtgcgggagtttcagatcacagatgcagtcgattttacgaagctggatctggtgctgctcggcggaggctccgaccgggagcagatgcttgtctgtgagaaattaaaggcgatccgggagaattttcgggcttatgtggaggatggaggaagtgtcatcgcagtttgtggcggctatcagctgctcggccattactatgataccgacgatggaaggatcgaaggtctctctttggtagatatctacacggaacagggaagcccgcgtctgatctcgaatattgtcattcaaaatgaccggatggagcttccgatcgtcggctttgagaaccacggtggcaggacgtacattaatgacaacgagccgcttggaaaggtgctgttcggctgtggaaataatggggatgacggcatggagggcgtgcggtataaaaatgtgatcggaacgtacctgcacggtccgcttctcccgaagaacccacaggtgtgcgatctgcttttatccaatgcactgatgcgaaaatacgggacggcagagctggtaccgctggacgatacgcaggagctggaggcgaaccggtatattgtggagcggtttacacagggcaaataagaagcggtcggtgtgtggcttttcccgcacaggaaaatgagaaaatttgacgattcccggcatttgtcaggagaaagtgcttgacaaacaggggaaaaagctgtagcttatatcagaacaaacgaatagatgcttttctcttattcagagtggtggagatacataggatctgtgaagccacggcaaccccatgatggaaggtgccaacctgagcgagtgaactcgaacaataaggggatttgatgagtgattattgagtccgcctttttcggcggacttttctttatggtgatcggttcagaacagaaaagcatttctcaagagacagaaaaagaaaggaaatgaaaatggacaagagattatttacctcagagtcagttaccgaaggtcatccggacaaaatgtgtgaccagatttcagatgcgattcttgatgcactgcttgagcaggatccgatgagccgtgttgcatgtgagacagcgaccacgaccggtcttgtacttgttatgggtgagattacgacaaaggcttatgtcgatattcagaagatcgtccgtgatacggtccgtgagatcggctacacgagaggaaaatatggtttcgatgcagacacgtgtggtgtcatcacggcgattgatgagcagtcgaccgacatcgcaatgggcgtagacaaagcgcttgaggcaaaagaaaatcagatgagcgacgaggagatcgaagccatcggtgccggagaccagggtatgatgttcggttatgcgacaaacgagacggatgaatatatgccgtatccgatcgcactggcacagaagctggcactgcagctgaccaaggtacgcaaggatggcacgctgacctacctgcgtccggacggaaaaactcaggtaaccgtcgagtacgatgagaacggtaagccgtccagactggatgcagtcgttctttccacccagcatgatccggatgtgactcaggagcagattcacgcggatatcagaaaatatgtatttgatccgatccttccgaaggagatggtcgatgagaacacgaagtttttcgtaaatccgaccggacgttttgtgatcggcggaccgcacggcgacagcggactgaccggccgtaagatcatcgtagacacatacggtggatatggcagacacggcggcggggcattctccggaaaggactgcacaaaggtagaccgttctgcagcttatgcagcgcgctatgtggcaaagaatatcgtagctgccggtcttgccgagaagtgcgagattcagctttcctacgcaatcggtgtcgcacgtccgacctctgtcatggtagacacctttggtaccggcaaggtttccgatgagaagctcaccgagatcatccgtgagaacttcgatctccgtccggcaggtatcatcaagatgctcgacctgcgccgtccgatctacaagcagaccgccgcatatggtcatttcggacgtcatgatctggatcttccgtgggagaagctggataaggtagaggtactgaagcagtatctgtaaggcgaaggattcgttcggaggataaccgcaggtggcagagtaatctgcatggaagatggcgggaaatgtaataaaaaagcagaaggcagagatctgtctggagtcgataaaagagattgccaggcgggtcactgccttttttgatttataaaaagtttagaaaaattccgtattgtttagatgaaaagcattttgccgtatgctatacttaaatgataagactgccatttgctgtgcagtccagtatcagtcattgatagaaaagaaagtgggagcaggatgaaattaaagacaagactgatcatcgcattttttgtgattctgtttgtgccgtttctcatgtttgcggtggcatttttcggattttccaaatatcagatgcgtatgatcgagcagagctacggcgtgccgatgtcacttgagtcgctctcggactccatgcaggtgatcggaaaatcgacggagcagatttttaataagctcaaggtgcaggcaaaggaggatccggatcagtttctggatcgggattatctggatcaggtaaatgagacgatagcggacaagccgtcttatcttctggtccgcaagaatgacaagctctattacagcggtacggatgaggatgtgacaaagctctttgcagagcttcccgcatttcgggagttcagcagctcttcagatggcggctcttacatcggaaaggatgtgcgggcgtttgtgaagcagctggatgtcgaattttcagatggctcagagggtagtatttttgtcatttcttcggcaaagatgatggtggtccagacgaagcatctgctactgaacctgattgcttcgattgtcattatcatgttttttacagcgatgctgctgacaatatggatctatcggggcgtcaatacgccgttgaaaaagctcagtgaggcgacggagcgtatcaaaaatgaggattttgatttcgagctcaatgagaccggaaaggatgagatcagtgagctgtgccgtgattttgaggagatgcgcaagaagctgaaaacacaggcggaggagaaagagacctttgaccgtcagagcaaggagctgatcagcaatatttcccacgacctgaagacaccgatcacggcggtgaagggttatgtcgagggcatcatggacggtgtggcggatacgccggagaagatggaccgttatatccgcacaatctatgtaaaggcaaacgatatggatcggctgatcaatgagctgaccttttattcgaagattgatacgaaccgcattccgtacaacttcaaccgtctgaatgtggcagaatattttgatgactgtgccgatgatgtcggactggatctgcggggacgggatattcagttttcctacatcaatacggtagatccggagacgctggtcatcgcggatgcggaacagatgacccgtgtaatcaataacatcatcggaaattccgtcaaatatatggataaaaaggaaaagcgggtggagttgcgtgtcagggatgcgggtgatttcattcaggtagagattgaggacaacggaaagggcattcctacccgtgaactggtcaatgtctttgaccggttttatcgtaccgatgcatctaggaattccgcacagggcggaagcggcatcgggctgtcgattgtaaagaagattattgaggatcacggaggcaggatctgggcgaacagtaagctgggagaagggacgacgatgtgctttgtcctcagaaaatatcaggaggtaccggtaaaatgagcagaattttgatcgtagaagatgaggtcgcgatcgcagatctggagaaggattatctggagctgtccggctttgaagtagagattgaaaatgaaggagataaagggctgaggcgttctctggaggaggagtttgatctgatcattctggatctgatgctcccgggtgtggatggatttgaaatctgcagacagatcaggatccacaaaaatacgccggtcattatggtatcggcgaagaaagacgatatcgacaagatccgtggccttggtctcggcgcagatgattacatgacaaagccgttcagcccaagtgagcttgtggctcgcgtgaaagcacatctggcgcgttacgagcgtcttgtaaacagcaatgtgcaggaaaatgatatcattgaggtgcgtgggatcaagatcgacaagaccgcacgccgtgtctgggttgacggagaggagcgtgcatttacgacaaaggagtttgatcttctcacctttctcgctcagcatccgaatcatgtgtttacaaaggaggagctgttccgcgaaatttgggatatggagtcggtcggcgatattgcaacagtcaccgtccatatcaaaaagattcgtgagaagatcgaaaagcagtcatccaaaccacagtatatcgagacaatatggggcgtaggatatcggtttaagatgtaaaaaaagcataactgataaaatttgcgcatttggaatttggcaggtttttacgtggattacataaggaatatggggtagaatttacacagaagggctatacttcatcaaagcgaataaaggaggaagacatgaagaagttaattgtgatttctgcagatgccctggttgcagaggatatggaatatttggaaacactgccgaattttaaaaaatatcttgcgggtggtgtcggagtgtgtaaagtgcattcggtttatccgacaattacatatccgtgtcatacgacgatgattaccggtgtttatccggatacgcataaagtgacaggaaatctggagctgcatccgggaaggacgtcggacctgccgtggaagtgggattataaatacaatgcctgtaagcaggatatttttacggaggcaaaaaaggcaggatatgagacggctgcagttttctggccggtgaccggaaaccatccggcgatcgatcatctgatcgatgagtactggattcagtcggaagaagataccccggaggcagcttttcgtcggatgggatcggatgagcagatgctgcgcatagtggagaagaattctcacggagtaaaacgaccgctgcatcctcagctggatacgtttattgtagactgtgcctgtgatgtgatccgggaatgtcagccggatattgtgtttttgcatccggctgacgtggactgggcgagacatcagtacggtgtttttaatgatcaggtgaaaaaggcggtagaatcgacggatcgttatattggacagattatgaagtcagtagaggatatcggtgctgcagaaaataccaacctggtgctggtcagcgatcacggtcagcggaatattacaaagattgtaaatatcaatgtggcattaaaagagcatgggctgattcgtgtcgacgagaatggtgaattcagagactgggatgcatggtgtctctccggtggaatgtcggcggaagtacatctgaggcatccggaggatttggagctttacggccgcgtaaagcagctgctggaaacgatgcagaaggacagtcgatatggaatcgaacggatttttacgaaggaagaagcaggaaaagaacatctggacggaacattttcctttattctggaagcactggatggagtttccttcggggatgagttccattcaccgctggttgctccgtttgaaacaaaggactatcgttatggtcatgcaacgcatggatatcttccggagaagggaccgcagccggtattttacgcaaagggtccggatttcagggagcatgtggtgctggagcatgcccgtctggtagatgaggcgccgacctttgccgaattactcgggctggaattcccaaatgtgcagggaagctgtctttgggagcttctgaaaaaggatcatagtggcagaaaaaaacaattatgagtcgaagaaaaatgacatagaagatttgcgggaagtgtgggggatatgatacaaatagtttttgatatggatggagtgatttttgacacagaagcactttgccagaaggcatggcgcacggtgggagaggagagaggcatttcgattgcagaaatcgatgagcttctgaagctgtgcattggatccaatcagcagcatatgacagaggttttgcgggagaaactcggagtagatttcccggtacagtgttttctgtcagaggcagctgagcagatccagctgcttgccaatgagcatctgcctttgaaaaaaggagcagaggagctgctgaaatggttaaaggagcagaaggctgcagtcggactggcatcttcaacggcaagcccgattgtaaaaaagtatctggagaaggcaggacttacggaatattttcagatcatcataggcggggatcagatcatacacagcaagccggatggagaaatctatcagaaggcgtgtgctgcgcttgggacagatccgttacagacgtatggcgtggaggattcttataacggagtccgttccgcttccaatgccggcctgaaaacgatcatggttccggatctgcttccgccgacggaagagatgagagagcgggcatgtacggttcagccggatttgcttgcggtgaaggaatacctgcgaaaagagcaggaaaaaagcgaataatgaaataagcaataaaagaagacagctgtcatgcagggaatcctgcagggcagctgcttttttattgattttttacgtggatttcacgaagaaagagaagcagaatttacaatgaagggctatactccacaaaagaaggacaaaagagaaaggcgaagggttccatatcttttggaacctgttcggagaggaaagaaatggcaggaattgagtttcgtaatgtgagcaaaagttttggaacttataatgtaattcaacatctggatgtgacgattcaggatggttctttcaccgtactggtagggccttccggctgcggaaagacaaccttactccgtatgattgcaggtatcgggccgcagagtgatggacagattctgattgatggaaaggatatgacagatgtggcacccggacagcgggatgtggcaatggtatttcagaactatgccatttatccgacgatgtccgtttacggaaatattgaatttggattgaaaaataataaagtaccaaaagaggagcggaagaaacgtattcgggaggtagcggaaaaggtagggctgacggactatctggatcgaagcccgtcgacgctctcgggaggtcagcggcagcgtgtcgctcttgcaagagccatgtctaaaaatccgaaggtgtttctgatggatgagcctttgtcgaatttggatgccaagcttcgctctgcgatgcgtgtggagctgatcgagctgcaccggaaactgaaaacaacctttgtctatgtgacccatgaccaggtcgaggctatgagtatggcagatacgatcattctaatggatcacggagaaattcagcagatcggatccccggaagaaatttaccggaatccggcgaatctgtttgttgcacagttcatcggatctccggcaatgaacattgtaaaaaaagaggactgtaccattggctttcggccggaggcagtctgtctgacgaaggagcatacaaatgcggcgttctcagttccgggaaccatttcgacccgggagatgctggggcgtgagaccaattattcgatccgggataggcagggaaacacctatatggtcacttcaccaatggatgactggcgtccgcagcagcaggtctatctgaatgtggagcgtgcttcgctctacgtattcggaaaaaacggaaatcggttgccgcaaatggaaggagcggtggtatgaaaaaagtatatccgtatctttttatttttccggctatggcggggattgttgcctttgtactttatccgatggtgaagctgattacacagagcttttacaaggtcaatccgatgaatgaggcgaacagccggtttatcggactggaaaattatacaaagatgtttcagacagcggcattcaaaaaagcactggtgaacacagggtattatgcgctgttctctgtcattttaattatggtgattgccctgctgctcgctgtgtggctttccggaaaacaggatcggtttcactcctttattcagggaagcgtgtttttacctcatgtcatctccatggtatcgatcggtctgatcttccagcagatgatggatccggactttggtgtttttaatcaggttctgaccgcattacacctgcctgcatgtacgtggcttcgaagctcgagtaccgcggtgggctctattatctttacaaatgtatggaagtcggtcggatactatactttaatcctgctggcagcaattcaggggatcccggccagtatttatgaggcagccagtcttgacaatgccggaaagctctgtacttttttcaggatcacgcttccgatgatctcaccgcagatcttttttacgctgatcgtgctgaccattggcagctttaagatttttgacatgatttttattatgacaggcggtggtccgaataatgcctctacgtcgctcgtattttatatttattcgaaggtctttcaggaatttgatatcggaaaggcagctgcggcgggcgtggtgctgatggctctggtagggattatgacggtattttattttgtcgggctttctaaaaaggtccactaccagtaggaggcggaacatgggacaaagaaaatcaaaaataggaaagcttctgtttggcattatagatatagtcattgtatttatctttctttttccgtttctgtggatgttgtcagtatcccttcagacagagaaggagatcacgacgattccgctgacgctgctcccgaagataccgcagtggaagaattatgtggaagcatttgcatcagctccgtttcttttatatctgcgaaattctgttctggtcattcttggtgtggtggtcatacagctgctcgtaatgattccggcagcatatgcgttcgcaaaaatgcaatttgcagggaagaatctctgtttcggactggtcatgatcgcatttatgacaccggcacagctgaccttctatccgatttatcacatgatgtcgaaggtcgggctgatgaatacactgtggccgcagattttaccatttatgacaaatgcgtttggcatttttctgctccggcagtatttcatgcagattccggacgaactgcttgaatctgcacggctggataacgcaggtgcattaaaggtgatgggaaaaatcatgctgccgatgtcgaagccggcgctgaccagcgtggtactgtttagctttgttggtcactggaatgactatttctggccgttgatcatcacgtcttccacgcaggtacgcccgctgacaatcggtgtcgccatgctgaaaaacacagagggtgcgacgagctggcattatatcatggcaggaaatgtcatgctgatacttcctgtgctgattctgtatctgttcttttccaaatatatcgtaagctcgtttacctattcaggaattaagtaaccatacccaaaagggcagtgccttatggtactgagtttcgttggcaatccgaaaaaaagattccggagagctgacactcgcggcaacgatcagatattcatacagctgaggctgcatgggatgttgcctgcgggaataaaacggagacgcaatgtctcgcatagcttaagaggaggatcttatgaagaaaagtgtgaaagcaactgtatgtgtaatggcagcagcaacagcaattactgcaatcccgatggtatctgcgcaggcagcagacgagaaagtgaccgtaaacttctggcattcaatgggcggtgacaatgagaagattctgcagtcggtcgtcgatacatataatgcttcacaggataagattgaggtagtaccagagtatcagggcaattattacgactccattgcgaaggtacagacggcgatcggagcaggaaacggtccggatattcttcagaccggttccggacagatttccattctggccaaagaggacggtgttctggagaatctggttccgtatatgcagcagtcagatatgaaaaatgatttttatgagggctttatcacgggcatgagctttgatccggcgacgacggacgaaacgctgcttggcttcccaatgggctgctcgacaccggttatgtattgcaatgatgggctgttgaaggaagaaggactcgaagtaccgacgacctgggatgagatgactgaggtggcgaaaaagctgatcgatgacggcaaggtggagtatggttttgcactgccgcatgacccatggtatttctggatgtttatggcacagacggacacgccgatttttacagaggatggtaatgcctttgcctgtgtggaagatggaaccggcattacgatgtggcagaaggttcaggatatggtaaaagataaggtgatgtatttcggaccggcgcaggatgataactgtgcagcgctgttttccgagcagaaggcagcctttgtcatcaactccattggagcattgaacagtattcagaatgcagcttcctttgacttttctgtacagtttgttccgaaggaggcgataaatgcagttccgaccggtggaaatacgctctgcatgcttggatcttctaaggaaaaagaagcagcatgggattttctgcactggctgtataccgacaatggcggtgtagcgacttactcggcttcgattggatatctgccgtgttccgagaccattgcggagatggatgccatcaaagaaaagcgtcaggatgccaattatcagaaggcatttgaacagctggattatgcagataatcagcatatggtaagccagccgaataacggagatattgcgaatctgatcactgcgatgatggaagcgactctgtacgactttgaagatgtgactgagcagatgaatacgatgaacgaagaggcgaaagcaacgctgacagatctgcagtaagtagaagatagatcataataaacatagattcatagaaacggatttatttgcagcaaaggtgaagcttcgattggatcaggaaaaaaataaatgacagagaaagcagctgctatacagggaaagccctgatatggcagctgttttgtaacttgtgggtaataataaaaattgttatttctctttctgcatggtagaataaaaatgatgtaaccgatatagtgcatgggtcagtaaaagaagcatgcgaggagagaagatatgattttatacgaggataaggacatcattgtctgtcacaagatggcgggcattgcagtgcagagtgcgcggatcggggagaaggatctggtgagcatgctcaacaatcatctcatggagcaggcggaccagagaatggagccggtgcgggtcgtgcatcgactggatcagccggtggaaggcattgttgtgtttgcaaagaataaaaaggcggctgcgtcgctgtcggcgcagatcacagacggaagcatgaagaaggtgtaccaggcagtgtgctgtgtgacggaagctggcgggcactggataccggaggcagagggtatgcagaaagcagacgcgccgtctgacggggatgaaggagcggcgaccggcaggaaggttctgtggcattctcttacggattatctagtgaaggatgcaaagaccaattcttccgcagttgtgacaaaggatcgaaaaggcgcgaaggaggcaaggctgtcattttggattctgtcctaccgggaagtgcaggagcagcggatggtagaagccggggatgtccttggatatgcgcttgtcgagatccatcttgctaccgggcgccatcatcagatccgggtgcagatggcgcatgccggacttccgctctttggtgatcgaaaatataatccggattgggaattgtatgcaaaggcgtggcaggcgcagatggtaaatgagtcagcagaccatgcggcgcatcgattgccggctgcagagctggcactgtgcgcgacggagctgacttttcggcatccgaagacagggaagccgatgcattttcaggtcaagccgcagaagtctgtttttcagaccttctgagacatgcatagtcagccgccggttttcgacagccggatgttcgtaatctgctttcactgtctgcatacagccggataattgcttcgcagtttatcgagtcaagcggatattcacaatttatcggttaaacagaatagaattttccgaacttcgcatactaaccagagatcactgcgcatttctaatgcagtgacaggcgatttgcagtcaaactgcaggtgtgcatggcggaggaggcgtatacgatgacggagggaaagcagcttttgaaaatcgcagggatcaccgtggcagtttatattttgatgaaatattttctgccctacgtgattcccttttttatttcctatattctggtacatctcttaaagccggtgacggagttgattcataaaaagctgcggctgcgcagagaagtgattctgtcggtgttgcttgccgcattgctcattgtgtgctcactccttttttatatgatctattgcatgctcatgggacaattaaaaagggttgccatgaattttgacgattactaccgctgcttttgtgaagggatcgacgagtgctgccggtttgcggagcgaaattttggcgtggagatggaggagatgagatcatttgtatactccgggattgagcacgccactgagcagatacggatctatatcgtgccgggtatttttaattactcaatgaggtatctgaaaaaagcaatggacgcggcattgtttctgctcatggtatttgtggcggcgattcttctgatgcgggatt

SEQ ID NO: 438 - DNA, 19782 bp, Unknown
  16S sequences of unknown bacteria
gagggaagtctctcagagggggacgcccccccccacctaaaacaccgactccgctatcttgtccagcgcgctggcacggtatctgtacaccgtacttctctccgccgctaccttgtcgcaaacgtcgtctacgcacatgtccggcgtaaagtataacagcgttatcacgtccctctccatcttgttaaacgtctccatcgtcttctccaccgctttcactgtctcacggtagtgtattgcgcgcgcttccactgcctgagccttccgcataggtacggagccgttttccctgagcgcttcatagtactcggcgtagctttcgtattgtctgaggtttttcagcagcttgtccgcacgcatccgcagtttgttcttgttcatctctccactcctccctcgcgcgtcttttggcgtattatattgtagattctctcaagctcctccggcagaaggtcacctgtgctctccccgccgcatattataaatccgtgctttacacatgtcgtgcatatcgttttgccgagcagtgagtacgccgcgtctccctccgacagcacttctccgcattcggcgcaccttgccaccgctgtctttcgttccattatttcctccgctttttcatgtcattttcggcggaaacagaacagttgtttgtgatgattcagattatagcacatctgtacggacttgtcaatagcgatttatgtctgcttttcccgaatacagaattttacacagcgcgcggacgtaaaacatgggaataatttaaatttaggctattgtaagacggtgaaaaatatgataaaattcttatccgaacataaattataagaaaacattattatataaggaagtgtatgatcatgccaaagaagtttacagaaagcctgcacactcacacgttccgctgcggccacgcctccggcacagaacgggaatacatcgaaaatgccatagcggcgggatttgacactctcggattttccgaccacgcgccatacgtcttccgcgacggttactactccggcttccgcatgagaccggaactgcaggaggactacgtcacaacactgctcgctctccgagaggaatacaaaggtaaaattgacataaaaataggctacgaagccgaatactacccagaatttttcgaggactttttaaagctcatcacgcgctatcccgtcgactacctcatcatgggtcagcacttcatcgaaaacgaaatgtcgggcaaatactccggcgtatcctccgacgacgagggatatctgaagcagtacgtcgaccaggtcatcgagggcatgaaaaccggcgtttacacctacgtcgctcatcccgacctcatgaactacaccggcagcgacgagatttacgcaaagcactactcaaggctcattgagagtgcgaaggagatgaacatcccgctcgagataaacctgctcggagtgcgcgaccacagagcatatccgcatgagaagttcttcaagctgtgcggagagataggcgcggaggtctgcattggctcggacgcacacgaagccgcagttaccgccgacatcccttccttcaatatcgcgcaggatatgatagagaaatacggtctgaaatggaacgaacgcccgacgcttaggaagcctctgatttaaggttatttttgcgacaaaagcccctatattttagacttttatcgcaaaaatccgatttattcagagtatcctttgagaagtaaagctgtaaggagaacgacatgacaaacgaattcgaactgctcgacgagcttgccgcggctgcaaaagaaaagcattacccgatataccgcattgcaatgtacatggacggcagactggaggaaagagagcttatccccgcacccgaatgcgtcgcgctctactccgtgtcgaaaaactacatcaccgccggctgcggaatggcaatagacgagggatttttaacttacgacacgacggtatgggatttgttccgcgcggaaaagccgtatcttgacgagagatggaaatgtgtcacgctcgaaaccgtcctctcacagacaacaggctgcgggggaatgttcctcgacatcgactgcgacgacgctttttcgtggggagagagcgactggcttgacgcggtgctaaagaaaccgttcatccacaagccgaacactgttttcgactacaccgactcaaacttctacatcgcctcacgtatgcttgcggaggccacgggaaagcgcgcgaacgaatacctctcccacaggctgtttgagaagatgaagatgcagggctgggcatggtcgtgctgtccgatgggtcacgctgtcggaggttcgggtttgtatctgcgatgccgcgatatggcaaagttcggcgcgatgatactctcgggtggcgttttcgagggtgagagatacctcagcgaggacttctgccgccgcgcaacctcaccgatatcacacccgaacgaaggcactgactacggtctttccttctggctcccgaagcacgagaaaaactgcgctttccgctgctccggcatgaacaatcaggcaatctgggcaagcaaaagcggaaatttcaccgtggcatggcaggcatacgaccccacaggctcagccgacgcggatttcaacaaaatactcaacaaataggattttcactctaatatgaaaaaacaaagcactacactcgatttgacgcacggtccggtactgccgctcatgctgcgcttctgtctgcctattcttctcggaaacctgatgcagcagttttacaacatggtggacgccgccgtcgtaggtcattacgtcggaacaaacgcccttgccgctgtaggtgcgacaggttcgctgacgttccttgtcattggatttgtcgacggaatgtgcgcgggcttctgcattcccgtagctcaggctttcggcgcaggcaacaattccctcctcaaaaaatgcgtgtggaacataatctacctctccgccgcagcatccgttctgctcgccttgttcacgtccgttttcctcgggcagatgcttgacgccatggcatttcccgaagacatttacgcggactcgttcatctacctgcgcgtcatcttcctcggaattccggcgacggttgcgtacaatactcaggcgggacttatgcgtgccatgggaaacagccgtgctccgctcatcattcttatcggcgcgtctcttgtgaacgtagtcctcgacctcttattcgtgcgcgtgttcggcataggagttctcggcgcggctctcgctacaatcatctcgcagattgtctcggctatagtctgcttcacctacatattaaagaactaccccatgctccgtgcgaaaaactgcaccgcaatcgaaaagaagcccgacggacttatctcaaagagacttgtgttctcgggacttcccatggcgctgcagtattccatcaccgcgataggctcagttctcctgcaaaccgcgataaacggcttcggctcgcttattgtagcgtcggtcactgcggctaacaaggttcagtcgttcgtacacctgccgttcagcacgctcggagttacgctctcgacatggtgcggtcagaacatgggtgcgcgggactacgacagagttcgacgcggattctgggacggcatggcggttgcgcttgtctacagcgttctcatgggagtggtgatgtacttcttcggtgaatacgtctcgctcatattcatagacaaggacgagacgcgtcttgtcgagcttctttcctacgtccgcgaatttctgcgcaaaaactgcattctctacatccctctcggaatactcaccgtctgccgcttctctctgcagggtctggagcacggcttcactgccatgttcgcgggagtatttgagatggtcgcacgctcggtaatggctctctgggcggtaaaattcttcgggttcgacgccgtatgctatgcaaatcccgctgcatggatcgccgcctgcatacttcttgtacccgcgtgccttgtggttatgccgaaggtcagacgccgccttaaagccgaaaaagcacaagctctaagcacaggaggaaacaatggacaataacgaaaacatatactccgccgactttttgagaaacattaaatacgcctcccgcggtgaagttccggtaagattaaagctcacctcacgccacgttatccccgacatgagaatgtttggcacgactatgggtatgccctccgccgacctcagccttttcgaggaggaggaagagggtctcgatatgctcggcaggcttcttgaggacgaggatgaagagcttctcgaaaacgggcttgacgaaggctttaccgatgcgggtcagccgataatgcctacggaggagggcgacacctacaccttctgcacgaccgccggaatgaagaccgaatgcggagttgtcacgataacctacgaggaaaacacaggctgcacgtccgagataatcttcgacacgggaaagccgggcatggtaacgatacaccgcaccgggggaataatgaacacaatagtccttgagaagggcaagcgtcacatttccgtctacaacactccgataatgccgtttgagactgcggtgcttgcgaaaaaggtcgacgtgaacatgacctacgaggacggcggcgacattgaccttgactacctcgtagagcttcgcggaatggaccttcagcgcacggagatgaaaattcacgtcgagagaatgtgaactatctgtcaattttgcaaatttactccaatatatgccgaaaaactcttgacacagcactaaatatagagtataatatgaccatagtcttaccttcctcttcccgcgctcttgcagtcaatgtgcttgatggcttcaagtgagcgggattttccgtagacgtcccatattacatgccgtggggcgccgctttgaaatcagacgtcgggttatttgaggatactctgaattataaccttaaatcagaggcttcctgaggatactctgaattaatcagaggcttcctcgtccggcgtctttttttgcgctctgaattgttaaccgaatattgccgttctgtgtacgcgcgtctcgtttattccgatgagatacgctcacgcaggcggctttttttgttttaagcccgttttacggtattttagggcagaacaaaatatgaacgcggcgtgggactatacatgaaattccgcggaatgacaaacaggcgttcgtgtagtaaaattaaatcaggcggaaaggagaacaatgtttgtgaaaaaagacaccgtatttccaccggaggagaacgagagcagggagcggctgatacgtgctgtgctgaatgctctcacctcccccgacgcggaagaagccggtgaagtcatgcgctctcttgtgcgggataatgcaacaggcgagaccgacgaatacttcactttggctctccctctctcccgatgtgcggcgcgtgcgtatgctcccttagtatggcgtgcgctgcttgacgaggtaaaggacggaaacatgaccgcgataaagctgtatttcgacattttcgggcgcgacatcggcatgaccgacgaagaaaacgcagatcccgcgcatgacgaaataggcagccttcgcggagagcttttccgaggtgaggagacataagtgggagattatgttttctcaaaaaagcaccgtgagtacatgagccgcgcgtactcctcggtgataaacgtagcggaaggcgcgggaagagcgggaaaaaccgtggacaacgtattcgtattcgcggcgcttctcgaaaattccccggataaattccatcttgcgacaggctccactctcggcaacgcgaaactcaacataggcgactgcaacggcttggggcttgagcacatattcgggaaaagatgccgctggacaaaataccgcggtaacgaagcaatggcggtaaggacaaagtcgggcgagagaataatcatattcgccggcgggaagaactcggactcatacaagcggatacgcggaaactcctacgggatgtggatagccaccgagattaatcttcattcgcccgcgtttatcgaggaagctctgaaccgacagcttgccgcacgggacaggcggatattctgggacctcaacccctgcgctccgaaatcggcgatatacaccgcacatctcgacaggtacgcggaggctgtgaagtcgggcgaggtcagcgaaagcttttataattacgctcacttcaccatcttcgacaatcctacgataagcgaaaagcggctcggtgagataatcgcgcagtacgacaagtcaacgatatggtacagacgcgatatcttaggcgagaggtgcgcggcggagggactaatctatcgcagcttcgcggactctcccgacgagtacatgactgacgcggacgatgtcggatgtctcgacttcatcaacataggcgtggacttcggcgggaaccgctcaaagacgacgtatgttgcggtgggattttcgcggtgctccgagggatattcgcttacggtgcttgacgaatgcgtaattgacggcggcaaaggagacattgacccgacaaagatagagcgcgagatgggagagttcctcatgaagctaagtaaaaattaccccggcgtgtcggtgcggtacatcttcgcggactgtgaagcgcagtacctcataaacgggctgaggaagcacctgaaaaggctcggcgagacggcagtggtaagcgactgcgcgaagaagcccattctcgacaggatatcctttgtgaaccggctgataatccgaaagcggctgaaaatcgtgaagacctgcacacatctccgcgacggattatgcaccgctctgtggggagaaaacgacaggcggctcgacaactttacctcggatatcgacatactggacgcgttcgagtatgccatcgagaggtatatgcaggcgtaattacattaaaggaggaaaaaaatgagcggaagcattcaaggaagcattaggcaatggaaagactggtggcgcggatatgacggagcatttcaccggttctgcgaaaacggagcgggagggcaggtcataaagcgcgatatgtaccgcatgaacatggcaaagaaggtctgcgaggactgggcttcactcctgttcaacgacgactgcacggtacggataagcgacgaggtcggggaagaattcgtcaggaaagtattcgaggagaacgactttttcggagaagccaacaagctgacggaagaagcgtttgcactcggaactgccgccgcgatactccgactgagcgattttgtctatgaggacggaaaattccacgcgggagagaggtcaaagatatcgtttgactacgttgacgcagagcacattcgcccgataagcgtaagaaacggcaggataatcgaagcggcgttcgtctcggaggaggtaatacgcggcgaggaatacgtctacgttgaaactcacaggctcgagggcggagaatacgtcataacgaacgagttctacaccgcagacggaaacgagctgaagccgaaggacgtgccgaacactaagataccgagggtgatacacacaggctcgccgtacccgtttttcttcatcttaaagccgaacatcgcaagctgtcaggcggaggcgggcatgggagtttcggttttcgcggacgccatagactgtctcaagggagtggacctcgcgttcaacaatttctgccgtgacataaagctcggcggaaagaaggtgttcatgagccgttcccttgtacagcgcgacgactgcggaaacgtactcacaccggacgacgtggcgcagcagcttttcgtaactctcggagacggcgacattgacgagcacccgatgataacggagcacaatcccgagctgagagccgaagaaaacgcgcttgccgtacagtcacagctgaattatctctcgttccgctgcggactcggcacacaccactacaccttcgacgtagacggcaggacgaagctgacagcgacacagtacatgggagagagacaggatatgcgtcagaacctcgtgaagcaccagagaaacgctcggtcatacgttatctcagccgtccgtgcgctgctttggtgtgcgagggagtattattcgctggacacagacccggaatgcacggtcaagatgacgttcgacgactcgtactttgcggacagcgacacggaaagaacagcggatttaaacgaagtcgcggcgggagtcatgacagtggaggaattccgaaataaatggattaacggcgtaaaaacgcatgaaaggagggacaacatggcagaggacaagatagccgcgctgttcggcaacggtaagctgagctacgacgagcttctcataaaggcgggcgagagcggtattgaagtaggagacgtgcttgaggtcaagggagaatacggaagccgtctccacagcgaaagagtaaagcacgcgctcgagagaggactggagcattccaaagcgaaaaacactgaccttgtcggaaagatgatagaccttagtcttgtcacatcggacgaggacggagtttacgggcttgacgagcagatagaaaatctcgagaggaccgcgccttacctgttcggggaagaggaaaaagaaaagccgaagctcttctcgacgggaatgacccacggtgaggcaaaaagcgaccctgacaagctcgacgactacgagtactacaaaaagataaagaaaatctgaagattaattaaatctcaaccaaaaattattttttaaacgaaaggataacaaaaaatggcaaaatttgacgtatcggtaaagcagatagcaagagaggcactccccagacttatcgacaaccttgtattcccgaatcttgtgtacaaggaaacaatcagcggcacaacggcaaagcagggagacacggtttccgttcgctgccccgcaatgctcatggctatggaatttgacgagaacaccggaatcatccccgaatccatgcagaacaacacgattgacgtaaagctcgaccaccttgcgacggttgacatgcagctcagcgcagtagaagcagcgtgcgattttgactccgtcgtgcgtatgttcatcgagcctgccgcagctgcacttgcagaaaagataaacatcgaaggactggagctttacaaggacattccgttctacacaggcactgccggaaccactcccgacgggcttgacgaccttgccgcggcttctcttgcgctcgacaatcagagagttcccgcaggtatgagatgcgctgtgtggagtcccgaagccgcggctaagctcaagcagatacctgcggtagtgaacgcggaaaagtgcggctccaccacggcgctcagaaccggctccatcggtcaggtgttcggcgtgaaccactatatgtcccaggctgtatgcaagcacacctcgggggcaagcggaaatctcactccgaaagcaaactccctcggcacaggcacaatagtgtttaacagaaccggcacggaaacactgaacaagggcgacatcctcgtgataagcggcatgggatatgttgtgacggagaacgcctctaccacaagcgactccatcaccgtaaaggtaaacggcaatccctacgtccgcacaaccgacaccgtgaccgtgataggaagccacaccgcaaacctcgtgttccatcccgacgcgttcgccttcatcaccagacctctccagacgcccgccggagttgaatcctatgtgacaacctacaacggtatctcgctcagagttgtgcgcggctacgacatcaagtacaagagagagattctttcaatggacgtgctctacgcgttcaagaccatctatccgtccctcgccgtaagatacctcggctaaaggagggcgcatgaccaaggataacgcaaaggagctcttacttaccctcatctacccccgatgcgaggacgacctcacggacgaagaaaaagcagtacttgacgaggcggcggcgtgtcaggcggaatacggcgtgggagagagcgtagtcggagaaaaggtaggggacgtgagcgtgacatactcccttccggcgaagataacgctgtgcggagtttccctctcacctgcggcatactcgaagctgctcggcgcgggacttgtctccatgtgggtgtgactatgatcaaggaaagatttctgcgcgactctgccgtatacaaaaggttcgttggtgacagctcggacggcagcgcaaagtacgatgaattctcactcacgcacgttctcgtacagcggaaaagccttattaacaagagcggggagaggtgcggaagtcttgtactctacttcttccccgaattcagctcttgcacaaaggacggagctttatctgccctgcctgcgcccgaggagaacgacagatgtgtagttgacggcgaagaataccgcatagccgaatgctcttctcccatgtcgggtggaacggcactctcgcacgttaagctgacaatgaaataagaaaagggcgggagggcgggattttatatggcatacacaaagattaacataagcggcatatcggcgagggttcagcgcgcgtcctctgctgctcaggcaaggctttgcgaaagggtgctcacggactctgcggagtatgtgccgtaccgaacgggaaagctgtgctcctcgggcaaagtcggggtgaacagcgtatcatggacagcggaatatgcgcgcgaatgctactatgccgagaggactttttcaaagaaagctcatcctaaggcgacggcgcgatggtttgaagccgcaaaaagcgcaaatatcgccgtttgggaaaatgagatgaaaaggatgatttaggagaaagcatgattatagtaagaccgaagaaagtgaagctgccggaggatatcataagcttcttcgacgagcacggaatcagcctgacagccgaagcatggcgcgatccgagagaagaaaactccgcgataaagcaggcggtgctctcacttgacggaagccgaagcactctccgcgaatacatcgacggctcaaaaataatcgaagccggatttgaggttcgtctgagagtgcgtgcggattcactgaaggacaggcttgacgcggcggagttcttcaggaaagtttcttccgctgtatctgacaaaacaaacgaaaaattcacgctaagcgaaagctccggcatgacaaaatccgcgatttacgaaaacggagacgaggaattccgcgcctcatacaaaataaaatacaaggaataatcacaagaaaggatttaaactatggcactcgtaaaaagagctgaaagacagcactacatgaacacaggaacaagcaccgcaccggtatggtcgctcatcggagagggctttaccgactttacggagtcaaagaacgcggtaagctaccagagaagatacatccacgaggctacaaagcgaaccgacgtgacaggctacgcaccggtcatcgactacgagcttgaggtgtacaaaaataatcccgtaatcgagaagatacgcaagataaccgaccttgagcttaccggagacgaggctaaggttgaagtgctctgcgtggacatctttgacgaaaccgaaaccgccggagttttctccgctgtcagaaggagctattccgttatccccgacgaatgcggctcgggtacggactcactctgctacaccggcacgatgaaggctgtcggagacataacaacaggaaaattcacccgctcgacttccacctttacagcggactaaaaggaggacgacatgaaccacatctggaaattcgcggacaaggaaatctactgcgacgtttttgaccccgactgctacgagagaattgacggagcactaaaaagtctctcgtctgagctgtctcacatagaatactcaaaggacggcgagaggggcgacattgccgacaggctccgccgaaactgcgaggttatcgagggatttttcgacaggatattcggcgaggacgcaagaaagacgcttttcgacggcgagcgcaacatcatgaccttctccggcgcgctggcatcattcctctgctacattgacggggaaatcgcgtacatggcggagtcgggcgagaagataaaggcacagcttaccgaaaggcttgccgctttatgataccgctcatatgcgatcccctgccgtgcgaggttacagtgggcggaaagagggtgcgcgtgctgaccgactacagaagatggcttgtcgtgtgggaggtgctgtcctcttccctccccggcaggcttaaagctgagctgtgctcgtctgcggtagtcgagggagacgtgaatcttgacgactgggaagattttattaatgcattcgcggcgtttcttttgcaaaaggataaaattaatgaggaaagttgcggcggcgcgtcttatcacggtgagaagctattcgactttgccgcggactccgagcttatcttcgcgtcattcttggcggagtacggcatagacctcacgacggagcatatgcactggttcaaattcatggcactgttaaaatccctctctcccgactcgccgcttatgaggacggttcgcctgagacagaccgacacctccgagatagaggacgacaaacttaggcggcagataagacgtgcgaaaaacgctgtcagaatcaaagaaaaagaaaggaatgatgaacaatggacggctctgtaacaataggagtatctctcgacacaacggcggtcctctccgcgctctcgtctctggagacacgcatggcgtccttcggaaacggactgagcgacgcgctgataaatcccgtaatgtcggcgaatcttgcggctgtggttctcacgtcggttgaagagatggcggcggctgtcacaagaagctcgtcaagggtacgagacgccatgtacaccctcgcacagaacgcagcctccgcattttccgctattccgtggactaacacaggagcgggagcagtgtcatctgtcgcaggtggaatggactactcagccgcaaatgtgacaaatgccgcgagaagaatcgccgacaacgccgcgtccgctatgaaaagctcggcatggcattcgataggctacaacatgatggacggcgtggctgacggcattctctccgcaggatacgaggtagtgcgcgcgatagaaagagttgcacgcgacgcggagagagctgtcaaggaatactacaggataagctcaccctccggactgatgcgcgacgaggtgggagttatgatatcccgcggaatagcggagggcattgtgagcggctcgtcatacgtcagctcggcgatggagaaggtatatcccacaggcgtaaagcaaaaggaatccgtctccggaggcggcgttacgcagaacatttacctgagggagaacgaacagtccccatatcttacggcaaagagaatacgaaaggaaagcgaggcggtattcagacaatcatgataacaaattcttacaatataaaaattacatccggcacgagagaattcatcatttctccgacaagcgacgcgcatcttatctcccacgacggattctactcccccgactgcgacgtgaagctctcctcatacgcatggggcgagggcggatatcccacaaagcgcagatacggcgagcgaatactgacgcttgaagtggagatatgcggtgaaaatcctgccgaaaccagacgcaggctcgcggcgatgatgaatcccgagtccggctgtgtaatcgacgtaacggcggagggcgtacaccgcaagattagcgcaatcccatacggagacgtgaagtttacgacccacaccttcgccggaatagtggactgcgagatgagctttgtcgcaccggggatattcttcgagggggctgtcgagacggtaggcacggataacgcgtccggcggcaaaactctcgtgaacggcggagacgtaccgtgcggcatagttgcaacggtatcagcgtcgggcggctcggtagtcactcccacgatatcctgcggcgggaagtacgtgaaatgccccgtgacgctgtccgacggagacacgcttgtgatagacacgagggagcggcagaagaagataacgctgaacggctcggcgtactacggatttgacgcgggaagcacgttcttcaccattcccgtaggtacgtcggtggtaaagataacggctcagagcggaagcgagtacatcacgtcggacgtgcgcttcacaccgttatactgcggaatatgaaggaggggcaatggagctatactttttgaacatgaactacaaggtcatcgcgggacccattgacgagttcacctccgcggtatggaaggagaaatactacgaggttggaaactacaccatacacctgccgaagaagttttcacaggtcgcgcgcagtgccgagtacatccgaacggactttaactcctcgggtgagtgcaaatgcggaagagtggacacggtgaagatatcgacaggcgacgacggggagtgcgaggtacgcggtgtgcttctcgagggacttctctcaaactgtttagtctacaggcgcggcgaggtatcgggcagtgtgagtgaatgcgctctcggggtactcggggacaacatgcgctcgatgccgtttgagatagacgcggagaacagcgacgtgataagcgacgaatgcgtactgacgtgggagtgggatttgctctcggactggctgtacggagttctccgaccatacggcgcgtcatacgaggtaaagctgcatgcgggggacgagaagccgaagttcaggatagtgaagggggaagacaagtctctctcggcggtattctcgacctcatacgggaacataatctcactcgaatacgcaaaggagacgggaaagcactacaacttcgcgttcatagagggaggagacggttcgatatctgtagtgtcgaaatactcgatagacaggcgtgaggtatacaaaagcgcgaaggagatatcccccgacaaatacgagactgacgaggactaccgcaaggcgctgaggcagaaaggcgaggaagagatagcgcggtaccctgtcagcataactctcgcgatagaagcggcagagggagttccgccgtactacggggaggactacgcgctcggcgacatatgcggggtaagcgacggcgagcttgggattaagacggtgctgcggctgacctccgttgacacggtatgcgagggcgggcgggttacggtatacccttactttggtgaaaccctacggtggagggatttgctgtgaaaaaacagcgtattttactgccataggcttcatctgcccttctattaggcgtacagtgatgagacctcgctttgactaaaacaaaactgactccgcttgaaaaaacgaagccagtttgatgcataaagcttaagaattcctaaggatactctgaattaatcggatttttgcgataaaaggctgaaacataggggcatttatcgcaaaaacaaccttaaatcagaggcttcctaatattcctgcaatcgggtgtaatgttaatcttgtgtcgggtaataattgattttatcagtcttcaaagtaaatcttgataacctttccaaaagtcttcttcataagtttttccattttcttatatgttgacgcaacgtcagtctgtttatttgcaagaagctgacggaactggtacggaagtgaagcggtgaattctccgaactggaacaagaattcaagcttgcgtcctgccataatgatgtcaacaatctcggctgtagcaggctcggcggaataacggctctttaacgccttgtcgtagtatgccggatatacggttttaaaggattcggcattcagcgcttcaaaaactataccgacgacttccttgtcctcatcagcgatcgtcttcggaactgcgaaaacggagaactgatcccatgcgtttgtatagtagccctcctgcgcttcgtcaaacttcggaagcggaagaatgccgtattttgcttccatgtttccgagagattccgttgtttcgccgaaatagagctgagtcatggcaattttttcttcggagaaggctttcggaacgtcacgccagtcttttttgttgatgaaggttccgttttcgtcgtatgaaagagcaatcgccttttcaagcgccgctacggtcttttcgttaaagaatgtgatttcaaatgtaccgtcgtcgtggatgtctatgagatcaagatcgaatgcggcaagccatacgtctgtggtattcaaaccgaggaatacggaatatccgtgtatatcattacggtcgtgtatgccgtcgccgtttgtatcctcccagatttttgttgtgatcgcctgcatattgtcaacggtccacttaccgtcaaacaccatattgtagagatcctgaccggaatatccgtagttttccatgattttgtaattgaagaacataccgtaggtatattggagagtggatattgaaaggtcgccgtttattgcatagagctttccgttgatagtcgcgggatcatttgcaagctggttgtaccatggcttctcaagattaatatacggaatatcacaccagttataaacggctccggctaagatcggcgtgtaggaaaggtaattaacaaatcccgcgacgtcgtatgcatatgtgccggacgcaacgactgtttttatgttgtcgtatggcgcagcagtctcaagagcttcgattttaacgtcaaaacggctttcgattcggagatttctgtcgtatacggcgtcgtttgttgcttcacccgtcagctcttcaaaggaaatttcatatacctttgtgggatctacggcgataatatacgaacgtccgtcaaactttttatccggcagatcatcgggaatgagcattcggcgttcggtgggcgtcaatgtttcgggagcttgtgtttcttcggggacagtggaagctgttgtgctcatcgttgtttcgtcgtcaaggctctccgtaccgtttgagcaggctgctgcggaacaaagcatgtttgaagcaaggaatagcgcaaggatacgtttcttcataggcacctccgtatgtattgttttatatgtatttgctattaattaatgccgattgtaacatttgttgctaatattataccataagcttcgtgattatttatgaattattaatgaatctataaaatttaacaatatacacaatcaatagaaaaataagaattactcttgtaatttacaccctccctcgcttgagcttgaagaagtcaaaaaaaccgaagctttacgaaattccatcgtaatcagcttcggttttttgttcttcattgcgcccgtatcgcatataccacattaatctgcataggataagattccgctatttctccgttgtagtataccaccacagtgtctcctgccgcaagccccgccggaagctctgtcccctccgtcaaaacatagcattccccaccgtagggataaccttccgtatcctcggaaagatcaatcagaatgtccttttcgtttacctcaagtacagtgccgcttacgtgcggcttcgtcttgtagctcgcgcatcctatagcggaaagcagtatcataatcgctaaaaacagcgaaaacagttttttcataccgtcaccttccaaatgaaatataagataaacatatgacgacagccgaatgagaaaagttcattttttctcggagttttccttgtccttcttcgcctttttcttcatcgcctctccctgctccttcgccttcttctgagcagcattcgcaagattgtgcatatataatagcacctctccgcatatgtcgcgcttctttttcttcggcgggtcctcttcctcctcggattcaatgacaatgccacgcgcgtcaagccttgagtgtacgttgccgcgaagcagtgtgtacaggaccgaaaacagcggaataaacaaaatcatgcccacaatgccgcatactccgccgccgatgatgaccgccgtgaacgtccatatcgcaggaagtccgacggagccgcccactacgcgaggatagatgaaattgttctctatctgctgaatgatgaggaacattaagaggaaccacagcgcctttatcgggtcgtcgattatcatgagcagcattccgaaaaagcagccgaggaacgctccgatatacggaattatagcagtcgccgcgattagtgaggatatcgcaagtgggtaggggaagccgaaaatattcatgaagatgaagaacatcgtgccgagaattacggcttcaaggcactgcccgcttatgaagttcgagaaggttttcaccgaaagcgagcatatctcacatatcttgtcggcggttttcggcttgatataggcgtatgtcatctccttcacctggcggagcagcttgcgcttgttcgagaggatgtacgccgcgaagataacggacgtgagagccgtgaaaactccgcttatgatggaggacgcgccgctgattatcgaggacacgctggaggtgagtgcgtcggcgaactgtatcgcgtactcggacagctttttcacaagctccgtagtgtcaagcccgccgagccagtctataacgggagctgtgttgatgccgtatttttccagtccgcgcagccactctattattttcgggaagcttgcctgcgccttttggtaaatcgccttgacagactcgccgagctgcgggaagatggagtagcagaggatgtagatgatgagcagcgcaatgacaaacgtcagcccgagcgagagagtttcgcaggtacgctgccgaatcttcttgccgcgcttgtccgctatcttgtaaatgagcttctctatcgccatcatgggtgtgttcagtatcagcgcgacaagccctcctatgagcaagggggaaatgaggctgagcagtgagccgacaatggcggagatgtcgctgaggtgcgtgaggatgacgtagaggatgatgctgaatgcgacgagctttaccgcgaggaaaaatatattgttcggggtgaacctgtcgcgcggatcttcttgatttttgtgttcgttttcgtccataaagcctcccgttagattttagttaagcctttgtcatgtcgtagtgcgctctctcgccgccgatgaacttcggtcttactcttgccgcgagaaggtgagccgcgcctattgtattgttctccagtctgacggggactgctacttctttgaggtgcattccgatgagagtgccgccgatatcaagtccgcagtccgctttgatatgctcgagagctacgggatgagccgcgtgtgcataggcagctgtcgcgaaggagccgcccgccttaggctgaggaacgacgttgacctctgtgaggactccgcagtcgagctgcatttttacggcgtcgcggtcgactattacagcgcggttgaggtgttcgcagcactgagcggcaatccagactccccgttcatccgcggcttttttcagacccgaccagatttcctccgcggtttcgggggatgaattcttaccgatagtgccgccgcatacctccgaggtagagcatccgacgacgacgatgttcccctgctccacgcgagcgagggagaggagttcacgcatagcgagataggattgatcaaaaattgacattgtttctatttgcctacactttcttctttattcttatcaaatatagtttagcttaaatctttagtagattaaagtagaaaagattacatcttttcaaaaatttattatatctcactgcggtgaggggctgctcctacgcggagggcgcacaaggagactcaga

SEQ ID NO: 439 - DNA, 18625 bp, Unknown
  16S sequences of unknown bacteria
aaaatcgagattttaactcgattttatataattgcatttgctaatgcaattattcagtagacattaatttaatccaaacaccccttcgcaaagacgacgaagggatgtttggattattatattctaatgtgaagctgctgtcgattacttcggttttgttcacgcagttgccttcatttacaatactgatcgtatttcctgcggatatgaccttattcatatcatagtccgcttcattccggcagaggtaggctgcggatataatgttgttctttattgtaatgcttttggcgcggcagccgttataaatatgcagtgcgtttacggcaacatccgaaataacattgtcggtaacagtgaagctttcggcacctgtcatttgaattgcagcgccgcatattacgcctacctgctttacattaagcgcgctgctgcaaagcagaccgagcgatatgaagaaaaccgaaaccggcaatattaaaagcacggaaaaaattaccgaaacggtgaattcaagcccgagcagaaacgccgcaaggcagcatattacgtacagcgccgccgcaagcggcaaaaaagggagcgcataaccaagaataaaatccgacgccgtaagcggcgtggtgtaaagtcgctcaagtaatgcgatttctctgtcccttgatatcagcgttgcggcaagtttgagagtagtgtaaattttaacagttatcaaacaaatttatttttaggcaatcgaaaataaaaccgcctgtactccatgcattgcaaggggtacgggcggttcacttaattttcggtaattcggcgcagcgcgcccttttccagccgtgacacctgcgcctgtgaaattccgatttcctcggacacctccatttgggtctttccctgcataaaccgcagggataaaatatgcttttcacgttcgttaagatttttaatggattctttaagcgcaatttcgtcaagccagttttggtcatcgttattgtccccgacctgatcgagcacatatatcgtgtcgccgccgtcggaataaaccgggtcatagagcgatatgggactcactatgctttcaagcgccataacaacctcctcctgcggcagctgaagctccgccgctatttcaccgacggtaggctcggtttgatttttgcttgcaaggcgctccttgacctgcattgccttgtaggcggtatcctttatcgagcggctcacgcgtatggaattattgtcgcgcagataccgcctgatctccccgattatcataggcacggcataggtcgaaaagcgaaccttctgcgttacatcgaaattatctatcgattttataagcccgatgcagccgacctgaaacagatcgtcgggattttccccgcgtccggcaaagcgctgtatgacgcttaaaaccagcctcaaattcccgtttatcagctcctcgcgggcagatctgtctcccgccgcgctctttttcagcagagcctccttttctgactccttcattaccggaagccttgaggtatcgactccgcatataataaccttatttttatacataaacggcacctccgaaattctcattaaaaattattaccagcaggcaccgttaataaactttatttattttttttgtttcgacaaaattcacttgcatttgcaaaaacacagccgccggatgacggcggcggaaaggtcttgacaaattcgctctaatgcgttagagcaggaaaggagcgtttattatgagcacaccaaagatttttgaaagcgaatacagtttttgccttattttgtgggaatatgagccgataaaaagcagcgagcttgtaaagctttgcaaagataagctcggctggaagcccaccacaacctgcaccgttataaagcgcttatccgagcggggcattgtgaaaaatgaaaatatggtggtttcatcccttgtaagccgcgagcaggcacaggcggcggaaatagacgaaatggtggaaaaaaccttcggcggctctttgccggcgtttatagcggcatttacaaagcaccgcaggctttcagagcgggaaatcgatgaggttcagcagatgatagaccgtttcagggagggtgaaagcaatgggtgatttatttgtatccgttcttaatatgagcatatccgccgcgtgggtattgcttgcggtgctgattctccgtttgatctttaaaaaagcaccgaagcgcataaccatgctgctttggtgcattgtgtggctgcggcttataatgcccttttcggttgagagtattttcagccttataccgagtaatgagacggtgagcaaagcgtgggactctcccagacctaaccttaactcgggtatcaccgtgattgataacggggtaaacaattatttggagggtcattattttgagggcgttacaagacccgccggcgcgcttgcaaatcacggcgcggtttaagtgctcgcagcattgtgcggctacaaatacgcccttcccgtttgcctaaagtttgagaaccttttgtaaagatgtgaccttcctgtttgtttgtaatgtgccgatagcattgggactcggcagcccttctgtcttcgcgtctttaggcgctatagccctctgcttttctctttttcttatcccgtaatatttcattatctatctgctcaataaagagctccataaggtttgttgctgaattttgcgtttgcaatttgattttttcttctgtctcgtaaagtttttcactttctttgaatatttctccgatttttttgatgaaatctcccgttatctgtgttatactcttgtactatttttccctacatttattttacactaagaaaaaattcctcccaaaattcgccgttaacactcttatacttgaaatttcggtcaaattagtgtataatgcgtatactacggcaacaacgaataatttgaaaagagattattttatatgttgagaaaatttgaatccacatttctttttttaatgaagcttattttgttctgcgcctgcgcggggattttcttcctgattttcggaagcgaatatccctttatgcttattcccacgcgcacatcgtttataacgctcggcgttttcacactggtttatatgatgatgaatataatatacggtgggtttgacataggcaagcgcaaaagcaaacctattatatattccttcatcctttcgctgctgttcaccgatataactgcgcattttttcatgtgcataatgaatataacggtaattcatcacggcagattcgtttacgattatccgctgctgctgattctcgcgtatttgctccagatagccgttattatcacctttacctacggcggaaactacctgtatttttcgatattcaagccacacgattccctgatagttacaaggcgcggcgagcaggcggacaatatcgtttcaaaaatcgggagatataaaaagcagtataatattaccggtgtagtatttaccgacgacccggatatactgaaaaaaatagacagggcagattcggttttcttttacaacctgtcggttccggaaagaaattcctttgtggaatactgctatcactgcaaaaaggatatctattacagcgttgagctttcggatattgtgtcgctcggcagccatcgcgtcttttttgacgataaatcaatggtttatgcgcccgtaaaggggctcacattcgagcagcgcgtgataaagcgccttatggatctgttgattgcaggcttcgggcttataatcacatcacccatattccttataaccgcgatctgcattaagcttgaggacggcggtccggtgttttacaagcaggagcgcgccacctacgccggcagagtgttcagcgttattaaattccgctctatgcgtgcggaggacggctcggttcataagtccgtaaccaaaaatgatgacagaataacccgcatcggcaggataatccgtaaattcagaattgacgagctgccgcagcttataaatgttataaagagcgatatgagcattgtcggcccgagacccgaaatgcttgagaatgttgagaagtacacaaaggaactgcctgaattctcataccgccagcgcgcgaaggcaggtcttaccggaatggcgcagatctacggaaaatacaacacctcaccgaaggacaagctcatattcgacctgacctatataaacgaatacagcgtgtggcttgatataaagctgatcttcagaactctgctcgttttgctgactcccgataaaagcacggaagcctttgaagaggataaaaaagaaaattaattcaccaataaaatgcggcgacatcaccgcatttttcgtttttccgctgacatgtgcggcggaaaaacacattataagcgaaaaaccgcttattcagcggtttttcaagggcacaggggtggtattggcggagcataacaaccgactgccgcctgtggcggataaaaggagggcgttatggcgccgcggtcaaagaaaattcgcgctccaagcgattattttctttgggcaccgcaagagtagggagtgcagtccgaaaatccgtgattttcgagcgaacggcattcccgtccaagatcgtgtcgtctttttcgacacgatcatttatacattgatttcctttgacaacgcaaaggaataaataacggtctgctttacgggcttttcaaaaatcttttcgcaggcaagcgcgtagattgcaagctgaccgccgtaagcggcgcgtaaggcttccccattttcggcatgatcggttttaaaatcaagcaccacgattccgccatcctcctcaaagcagagatccaccgcgccctgaacgattatattttcattttcaaacgccttatcggggcttgcgagcagcttatttgcgggcagctcggttaaaaatctcatttcccttttaaccaagggggatttttttatgcgcgcgaaaatatcgctttcaaaaaacgctttgattttatccctcggcacggcattatactcccgttcgcttaaatactgccactcataaagccgttcaagctctgcatccaattcgtcggatttattaaagtctataaactccattacacggtgggtcgcggtgccgcgctcggctgcggtgattccgcccttgctcataaacgcagggcgcgccgaaaacgcgaatttatcgctttcagccttatttgcaagcgccgaaaccgagctttttgcctccacctgcaaaagcggcgcataggggtactcaaaagaaatgctttcccgtattttttcggtcaaatcattatcgggcgcgtatttctctttttcgtccgtcttttcctcggcgttttcaggctcggggtatatcacccttaagaaaaggcggctttcggtagtgtcgggaataatattagtcccgttcccgcgtaattccctgccgtcggggtgcagcaaggcagatacaagcagccattttgcgtaggatttaaagcgggagaaaagcttatcgggctgaccgccgcaaagggtcaaagcggaaatttcttcggcaatttccttttccgcgtcacttacagaggatataagcataagcttatcctgtgtgcgggtcatggcaacgtacaaaagccgcagctcttcctctttcgcggttttgcgctgcttatcgattatcacctcacggcatattgtggtaaagcgggtttttgcctcctcgtcaaaatacctgaagcctatgccgtgctccgccgaaaagagcgtatcctcgcgtgcgtcaccgtcgttaaaggcggcggtggtatctgccacaatgcaaacgggaaattgcagcccttttgaggcatgtatgctcataatatttaccgtatcgcccgcagagcccgccgcagctgattttattccgctttcggattgctttaaaataaaccttacaaacccgcctatgccgctgcctgtatcggcctcgtattgcgcggcgtagcttgcaagcagcagcaggttgtttcggcggcgtatgccctccttgcctgccgatacggtgtttaagtaatcggtgctgccaagcagccgcattataagctttgaaagcggcagcgtaacgcttaaaaggcggtatttttgcagcgtatcaagggtattttttgcgtgaacatcgccgttttcggcagcaaatacaagcgccgagtaaaggctgccgcgccgcctgtttatgcgtaggttcgcggtctcttcgggcgtaaacccgaatatgggagacaacagcacgcataacagctcaatatccgattcggggttatcaatcaccttcaaaagcgccaaaaataccgatatttcggtagtttcggcaaagctttcggcggaaaaatttgcggggacgccgtgttttcgcagctcctttgcaataattcccgctttgtatttcggcgagcgcagaagtattgtgaaatcggaaaacttcgcggggcgcagacttttttcgtccgtgcgtatcatcggctttccgtttaccgccgatttaatatactccgcaatatgccgcgcctcggcaatcaacctttcctcggcagaccctttagcgcttataatatcaagctcagccggcggctcgtccgtttcgggatatttcgcggcaggtatcagcctttcttcttcgttataggctatgctgcccgtgttttcggtcatcatatgctcaaaaaagaaatttatgtatcggcagacctctgcgcggcagcggaaattactgcccagaataatttttttgggttcactttcccccgccttatcatacggcagggcggcgtttttctttcttaaaaagtttgatgggtctgccccgcgaaagccgtaaatgctctgcttaacatcccccacggcaaaaagccgctccccgtggtgggaaagaatgtggaaaagcgtatcctgcaaatcgtttgtatcctggtattcgtccaccataacctcatcgtaaagctttaaaagctcatcatcgggagctttctccgcctcgcacaaaagccgcagtgccatatgctcggtgttgtggaaagtgaatgtgccgcgctcggaatactcggcaaacagcctttcgtcaaactctgtaagtatttcggaaagcagccgtactgccgggtaaagtgaatttaactgcgcggatataaaagcggaatcggcataaaaaagcttttgcaggcgctcaatatccttctcaagatatttataggcaagctttgcggcggccgcctgcggtgcccccgcaagtccgtttgcgcgcggcagaggcgaaagcgaaaaggcgttcagggaattataaatttcatcccagtcacctttattgcaggcatttgccagcgctgctgtacgctttgcggattcggtaatatcgggcagatatttttccgccgttttttcgtcctctaagcatatatccgccgcctccgcaataagcgcctgcatatccgcagcggtttttgcggcgctttcaaccgcgtatttataccattcgttatcagccccaaaaccgtttttataagcctccggcagagcggcaaaccactctttcgggaaagccaattggcggctgtaatcgtaaattttaagcacaaaggcggaaaaattgccgtcgtcgtactccgcgcccacggtatcgagcagctgcaaaaatatcgggtcattttcttcgtaatacccttcaagcacagatttcagcaccgcttcgtccgtcgggcgcagagaatagccgtcgctcattttaaaatcgggggatactcccactctttcaaaattttcgcgcaccaggtctatacagaaggagtcaattgtgcatatcttcgcgttattcagcagctgcctttgccgcaaaagccctatgttatcggggttggcgcggcactcagagtccagccgcttctcgattcgcgtgcgcatttccgcggcggcggcgtttgtgaaggtgactattaaaaggcggtcggcgtttacgggattgctttcatcggtcaacatttttatgaccctttcaaccaaaaccgcagttttgcccgagcctgcagcggcggaaaccaaaatattcccgcgcgcgtttattgccgctcgctgcgcggcggtaggttcaaacgccatattcatccccctttttcagcttttcaaatatttcctcgtttttaaggtcgggaacacggaagcagggctcgtcctccctgccgcagaccgacgcgaaatcgcagtatttgcaggcgggcgtttccctgccgtcaacagggcttacggcgatatcgccagaggctacggtgtttcccgttcttttcataattctttcaataaaatcgaatatctcggaaaattcctctgccgaaataaacgaggtgcaggtctttttaagctcgccgcttttggtaacggcgtatttcggcacaaaatcgccctgcttttccctgtccattgcggcaactatttcctcatccttacgaataagcccgttcatagccatacccttatcggcagtatcccgctttgagggcatatacagtatacccgctgcgtcttcatcgggcagccccgcgccccgcaccgcggcgtaaaggtacaaaagcatttgcaaattaagcccgaaaagaatatcgggtaatttaaactttttactgcctgttttgtagtccacaacgcgtatatagccgccgaatttatccacgcggtcaatactgcccgaaacggatattttgccgccgtcatacggaaattcaagcttttcgccctcgccgcctattttaagctcacaggcaatcggctcaaagccgctttgggcaaattcctcggcgagccttttcgccacctctttaaccgatcgcgaaattcgggaaaccagaaacctgccccgcgcggtctcaacggcgcggtagccggtaactccgtcaagataatcgtttatgtagccgtctgtaagctcctcgattttctcgggcgataataccgatacgcccttgccgtattccttaacaaatctttcaaggcagtagtgtaccaccgtgccgcgctgcaaaacgtcaaattcggcaggctgcagctttttgaccgaaagtccgtatcggcagaaaaagctgaaacggcagcggttaaaggtatcaagcctggatgcggacattttaatttcttccccgaaaagctgccgcgccgtttccttaccgatagcagcgggtgcgcccgaaagccatttttcggtgtattctgcttttttaaattcctttgtgcccgcaagcgccgcgcgtatttccgccgcgccgccgttttcggcgtttcttctgcggcagagctccgaatacgccgaagccgccgtttcgggcagattttcatcggttattttttcctccggctcggcaacaaatccgtgagctatattctcggttatttcctgcacaaacgccgaaggctccatattctcgcccgtaagcgaccgccgcgcgtaggaaataaaaagcttatccgacggacagcagaggttgcagtaaaccagataattttcatcggtcgccgcagataccgatttatcgggaatatcaacaccgagcgctataagacttttgcggtcggatattccgaaaatgcccgaggcggatatttctttcgggaaaacgccctggttagcgcccaaaataaaggcaactttcgggcgcgaagggcgtattctgtccgccgcaccgaaggtgacctcatcaagataccgcggaacagaccccaccgtttcaaatgataccgcaaggcttaaaacctcgcgaaattcctgctttccgacttcccgtgtaccaaagcatgctgcaatgccgtcaagcagcttcatatatctgtcatagctttgccttaaaacgtcagatgaaaattcttcggaatcatttaaaaatttctgcgacatagcagataatttctccgctgccccgcactcttcaaagagccgcaccagcgccgccgccatatcctcggcggtaccgccgaactccgcacgcagcttttcaagcggtgaaattgccctttttcgcagcttatttatttcaccgagcgctttttcatcgggttctgtatcgtccgatacaaagccgcgcacatccataatccactcgtgccgccacatatccccctcaatattccaaagagtgacataattttcaagctcggatatttcggcggtattaagcgtcccgagccccgttttgtggaagcgcagtatgctctcgctgtcgcctttaagtatcgcctgtattgccgcgtcggcaagggcggcgagcggaaatgccgaaagcgggcggcgcttatccgaaaaacagggaacgccgtaggtttcgcacgcggcgtttataaagtcgtcataccgttccgcgtcccgcgctattattacaaaatcacggtagcggtagccctccgtccgcacaagtctgcggatattcctcacggcaaactccgcttcctccgccgcagtgtccgcggcgcagacggtaagcgagccgtcattctccgttttttcgggtgtgccgcccgaaataagcctttccaccgccgcaatattcgccgaaacggaaatcggcttgcctaaaacaagcggctcctcctcagaaatgcggtaacgcgcggcggcgtaccgtattttctctgctgcggcgcgtatattcgagaaaataccgaattcgccccctgtttcgggcgcgtcggtaagcgccgcggtcaggttgtccgcctgagataaaactctgtcgatcagcgcaaactgctgaccggtaaagcccttgaacgaatctataaaaacatcctttttttcaaaatagcgaaaatcctcaagctgtctgtaaagctttgtaaggcggtctgcggggtctaaaaaccgctcgcccacaagcgcgtcataggtttcgtatataagcgcggtatcgcacagcttcgctttaagcgccgcgctttcggtctcttcggcggcagccttcaatttatcgggtgatacggcgtttattttaaactcgcccacggtatcgagcattgtttttgcaaagcttaccgagcggcagtatttgcgccacaaagtaagctccgcttcaaccgaacgcagcgcgcggctcataaatatgaccttttgcgcgtctgtgagggtaacgcccgcaatgccgcccgagtatctgcccacctcgtcgcaaagccgcgtgaagcttgtaaccgtaacgccgagcgccgccttatcgccgagcgcgcgcaaaaccgcccgctcgctttcaaaggaaaactgctcgggcactataagcacgcactgcctgcccgccttggtttgccgttttattttttcaagtatctgatatgtcttaccggacgccggacgcccgaaaataaatttaagcaattttctcacccgattatattttatgcttgtgtcaaccgaagacaaatcaacactcatcagagggaggcttggttatcagcaaacgccgcaacttgcaaaagtcattttcacaagttaataatttcgcataacaacaagcgttttcttaaattaactataacatttttcgtttgatttttcaagatatatataagaatagagccaccccgaaattatgggataactctgtttagatgatactataaaaagcattataacggttatttctgctgcaatcagatagacaaagccaagattactgcaagcaccacggcaataacggctaataccgctgaaaatttatatgcgggattttcggatttgagatttctctttattgtcctcatcttttccttatcttcttttgattttctgttcaatccgtttcgcttaaatgccctttgcaaatttgaatcgggtgaaagcgcaataaactcggctgccaggcataatattacgccaacccacatatttatcaaaagccaacaaataatgccgagcacaattgcaacggcacttaaaatagcggtcgtcactgcgactttgacgcatttcgcataggagatttccgtcttttcaatttcttttgcaaccgtgcagccgcaccccggacaaaacacttccccgtccataatttcctctccgcatctttgacaggactacacaattcaacctacttaaaaacacaacaaaaagaattattaatatcattatatgacaaacgtcataacagccaagcataaatatgacaaaatgtcatggggaggatgtgattatgaaaaacaatctaaagcttttacgaaaaagcaaagggtacacataaattgccgtgcaaatgaaaacagaaattgagcaggcgttgctttcaaaatttgaaaacggagaaagagtgccgcctacggaaacgctgatcaggcttgcagatttttatgatgtcagtattgattatattttatgacgaacaaacaatccgcatatagaaaaataaaagccgtgaaattcgcggctttttcataacattcaatgcggagttgtgcgtcttagtgtaacaggatcatatttccggtatgtaattcgcattattccttttgaacgactttacccgaccactcgcagggcaccttgccgcttttgagcaaatgcaatgccgtagacttgctgatatggcagagccgataaaactgatccttattcatcacatcgggcacgctgtcccagtcaatcggtaaattcttcatctgatacacctcaaaaatagatttcgtcggtttgaagtcctttctgcggtgtatgtaattttgtattgccttctctcgtgattttctcctgtcttccccgatttctctccaaaatcggggaaatgtcgatttgaacccactaaaaaaagcccgtcccgcaaggcttttcgagcgaaaaagccttattttatgcagcttttggctcagacgaaacgacctgaaaccggcacgaaacgaccggaagttgacacgctgactaaaagacttgaaatctttcggcatgattcaggcttgatatgcgcatatgacatctttatgcgttccgcagccaatttgcttaatccatttatcaactgtttttccgcttggtacaggtatatcggcgacctctctgccgagcgctgaatatttgctttcgccgagcgggtggaacggctcgatttctatatgctcaattccgatgaatttttcagccgtttcgcttattcctttaaagtgctccgcacggtcgttaaagcccggaattatggggcaacgcagaattattttactgcccgcgtcgcttaaagcctttaaattttcaagaattatcttgttgtcaacgccggtatattttttatgcagctcttggtcggtttccttaaagtcaaacaggaataaatcaacatattttgcaatttcaagtattttggatttttccgcatagccgcaggtctcaaccgcagtatgtattccgttttcctttgcttttttcaaaagctccagcgaaaagtcatattgagccagcggctcaccgcccgataaggtcacgccgccgcccgaattttcataaaacggcttatccttaacaatttcttttaaaacctcatctgttgtatattccttaccgcaaattttgcgcgcgtctgacgggcagtaaagctcgcatctgccgcaaaaatcacagctttgcaaatgattagggcatacttcgcggcatttgccgcagccgacacacttactcttataaaacattatttgtttttcaaatgactgactttccgggttgtgacaccatacgcaggaaagcgggcagccctttaaaaataccgctgttcttattcccggtccgtcgacataagaattgcgttcaatatcaaaaatcatagcggaaagcattatattactccttttgaattgttcgtctgataatatcatcctgcagcggctcattaagatttacaaaataatccgaaaagcccgaaacacgaacgcgcagatttttatatttttcgggcgcttttttagcgttaagcaggtcttcccttgaaacatatgtaagctgaaaatgaacgccgccgtttttaaaatacgtttcaagcaaatcagctgttttattaaaattggtgtcgtttttaattaactgctcgtcaagcattatattggtgacggtactgccgcagcctatggcgttcgggtcaatctttgcaatggaattaagcagcgctgtaagtccgtttcggtcctttccctcgctctgacccaaaccgaatttgagcgcgtcacctgtgtatcttccgtccggcgttgccgccgtattttcaccgaaccactgatgatgcgggtggtaacctattaaatcgcctacaagccagtggtaaccgaataaatttgttttatccttgaaaaattcatacagactttgataaaacctttgcgctatgctgtttgaacgctcggtatcgtttccgaaaaaatcacctttcttaattatgagcgtgcgcagctcctcaaatccgctccagtttgcctgaactgccgctgtaagctcttgcatagtaacgattttttcatcatatacaaattgcttaactattatcagcgagtcaattacatttgctatacccacatattggggcgaggctattgtaatatccccggaaccctgggtagggcttttggctttttcaatgcagccgtggaaaaacggcgccgataaatagtttatatcccttgcttttacgctgttatatttatcatcatattcgcatgcgatcgtaagatcggaaaaaagttcttttgaaaataccttgtagtattcttcaaacgatttaagatgaattatttcattgctctttttgtggaaaagcgtttcggtggagcgcgcaatatttactaccgaattaccgccggtaacaactcccggaaacgccggctcattacagcccacagttgtatatctgactgcttctttaaaggggaatttgcaaatttcggtgtaacactttatccttttttcatcattttggaaggcaattcttttgttagggtctttgcgttcgcagtcaagtgcgaatctgaaagcctctttaggcgttttggctgtccatcgcaaggttacctgcggtatccatgtgggcaattcaagcaagctttcaagaataagccttgaaagaccggtaaatccgtcgcttccgtcgggcagataaccgcctatgcaaaagtgcgattctccgccgcgcgtgaaccaagccgaggttatgggcgttgccgcctggagcattaaaaacagctcctgcaggtactcttttgcctcttcgcgggttaaggtgccgttttttaagtcattagcgtaaaacggctgcaaatatctgtcaagcgttccaaggctgtcagggtctgccgcaaaacaaatataaattgttaaaaccgcctcataaaacgaggatggcgccttctcaggcactcttttaagtgtctcggataaggtaataaggttttgtttatattcgccgttttcagtgctttctgctgcttcggcggctttttcggagcatttgtgcgcccaatttataagcgttaaaacaacatttctgaccgcccgcaaaaattctttttctttattatctgtatgttcggtaagggagctgtcaatttcctctattatccccgataagccttttttcaataccttctcatagtctgccgttgcgtgctgccattcaaatgttgataaattgtaaatcggttttaagtaaaagtcgtttgcaaccagattgaagtttttgtttcccattcgtctgaaaatatcgcccacaaccgattcatcacagttgaaaaagccggtcatttttgagcattcgtataaaacaggctcttgattcattataaattcgcataaccgttttgattccatttgctcccgtgataaaaatatatctctgcggtcgaattcagtcttctttggctgtgcatacatttttccgccgagagtcagctctgtgagttttttaattcttttattcataaaatacaccctttcaagcatattttaccgaatattgattgaaagtaaattcataaaaaagcatttttatacttttcggcataaaatattttttatcggcttgctttttttcaccgaacaccttacaatattaaggtcggggggagaatatatgaattcaaattttataattacaaaaattgaaaacataatatatgttgataaaaaccaatatcccgaaagggtttcggcattttgcggcaacctgcctaattgtgagcttatatatcatatttcaggtaaaatgagcgtttattttaacgggaaaaccgaaatgtgcgatgataatacgttaagatttttaccaaatggtgaaaatagaggatatactgtaacaagagaagaaaacggtgattgcattgatatatttttcgacaccgataaacccatttcatcagaaatgtttacaataaaattaaataacggtacagcagcggcgcctattttcaagaaaattttttcattgtgggttgcaaaacgtgacggatattattttgaatgtatttcattgctttacaaggtctttgcaatgcttcaaaaacaaacctatctgcctgaaaagcaatacaaaaaaatcaagcccgccatagattacataaatgaaaattttacaaacgggaaattatcggtcggcaagctttccgcaatttgcggaataagcgaatccgcgcttaaaaagctttttataaaaaaattcggagtgcctcccgtaagatacataatacagcttaaaataaactattcatgcgacctgctgcgctccgggttatattctgtttctcgggtttctcaaatatgcggttacggcaatgtgtattttttcagccgacagtttaaagagaatatgggaatttctccgtcggaattcattaaaaaatataaatcctcgaaatagcggtgaaaaatattcgcatcatcgcccgacgctttccttccgatacctgattgttttggtatcgggagttttaatatttgcatattttctgccgagcgccgaatattttttgtgccgttcggggggatttttttcaaaataagcgccaaacggtaacctttttccgcttttttgatatactgttattaagagccgacggagagcggatatatcggagggatgcgaaatgcgaaggcaaagaggctgcggctgcaacaagggacttatgggtctgacatttgcctgcgggcttctcataagctgcttttgcccgccgaaatttcttgtcgcggtgcttgcgatatgggttattattctcggcttctccggcggacggtgctgattattttctcgggaggtcttttttgtgaaggttgttttatttaagagccctaaatttttaagcggaattttaagagtgcttttcggaatcaaaaagcaaaacggttaatacatagcagttcacttactgttttgcctgaatttcagcttcggtgtatcgaattttaacttcgcaccgaagcttttttgttttttttctgtaatttatcgtgaaaaagtaaaaaaacaggcgattttccgtcgattaccgatgtcgaatggtgataaatgcagtcttttaatgctatttttatggaattatgcactatttttgtattatcacttgaaatttatgtgagaatgtggtaatatgtgtaaaacaagttaatttgggaggaacttgaaaatgggaaagaaattaaaaattgtaattgcggaagacggcacagagcttgggaaaagctgcgagaaggctcttaaaagctacggtatggatgtgatcatgtgcgacaagagcggtacgcagctgcttgaaaagatcaaatcggagaagcccgatgtagtgcttgccgatatttttatgcagaatctcgatattttgggcgtgcttgatgccattcacaaaacggacgccgcaagcaggcctatggtaatggcgatgtcgagctttgataatccgcgccttgaaaaggaaacgcttgaagcgggagcaagctattattttttaaagccgtttgatataaatacaatggcggaaaggataatccgtctttcgggctggcggaacgaaatttcgccggttgtggtaaaggacaatgtggtaaccgaccccgagcttgagcttatggtgaccgaaatcattcatcaaataggagttccggcgcatataaagggataccattatttgcgggaggcaataattctttcggtcaaaaacagcgagataataaattccgtaaccaagcttttgtacccgacggtcgcaaagcaccacgggacaacctcctcccgcgtggaaagggcaatacgccacgcaatagaggtggcatgggataggggtgatatcgatgttttaaattcatatttcggctataccattcagaatgaccgcggcaagccgaccaacagtgagtttatcgccatgataagcgataagctgcggttgaggctgaagataagctgaaatacatacggctataagtacgacgataacggcacccgcaccgaaaaaaccgcgaacggcgtcaccacgcattacctcacggttgacggcagaatcaccgttcagtatgacggaaccgacaccctttatttccgttacaatgccgataattcacctatcggcttcagcttaaacggcgaggaatatctttatttaatgcctgctgaacaattcaaaagt

SEQ ID NO: 440 - DNA, 2697 bp, Unknown
  16S sequences of unknown bacteria
ccggcttgttcctgttctgccgccccgccggaagggccttttccttattttgctccgcaaggacgggaaaaaccccttatacaaacgaaagagcgggaaaccccactctttcatcatccatcctataccgttgtcattgtaccactttcgaagccaccatgcaacccttttttcttgtttttatcggcttttcgtgaaaaacagcacttttttcttatttcagtctactttttcggtgaaagcctctttaaaaaggcagcaagacgaacagatcgccgctatgacctggcaaaactgttcaaactccatcttctccgttctccaccttttcataatcgatcacatagacaacctcgttatcatactcgctttttccaccagctttttcataaactcggcaggcgcggggattttctttatccgtgatgacaaacagttctgaacagcgcagttttcggtcgtaatccgctaaccaaaccataaaacggctgtcaactccacgtccttgccaggcgggtaaaatgtccagcgaatacagaaaaaacatggtctttccatccaaccgcaacaagagataacagcaggccattcctactggtctattttcttcgaacgcgccgaaagcgcaagctccggatgacacaaaaaatgggcaaggtactgcggatgataaagcatcccgtcattttccaaaagctcccgcagatcgccaatatcctccacgctcagtagacggaacgaaattcccatcgactatttcctttccttttttgcctttgtctgcggaagttttactttttgaaactctgccaaaaaacgcagaataaactttccacaggcatccagcatctgctccccccactgagcggtagcacatttcggatcgtccggtccataccatcccccaggggaaagattccgaaacaaccgcggggtcattaccgccacgccatccaattccacctcagacattcccgcacaccgaagcgtgtcggataaattctgtggctgcagtgggatataatcctccatatggacgcaatccggatcaatcgccagcatggctgccgtttcttctgccccgccgtgtcctcccttccaatcgggattcagctgccccgcaatctgccaccagttgacaatggccgaaacggcgccacggccgttcagatcaatcccaatgtgctgtaaaaccggattgtttccgccatggccgtttagaaaaatgaatcggcgtacaccgtagccgtaaagcttttccacaatttttgacacaatgcagtatagcccgtcgtatccaatggagatggtgcccggaaagccgccgtgatggtccgccactccgtacggcaccgccggaagaatcagcacgtcactttcccggtcaagctgctcggcaattttagacggaaccagaaaatcggtgcccaacgccaggtgagaaccgtgattttcgatgctgccaataggcaatactgccatatcgtgggtttgaaaataccgttccgcctgtttccaggtcattacttccagccgcataaaccatacctcctattcctactcattcgtttgaccgatcagcggttttccgtcccggtctaccaatactgtcatgccgccggaatatccgttccggcgatatagatagttcacgccggtatctcgatccatccagatctccagcatcgtggtgagcgtttcctgtttataaattctgacaaaccgtttttcatccatggcagtgcgtcctttcattaggaaaatttcggcggttctttcatttcaatcaccgttttttccagcatactctccatatactccaagtattgctctttgctaaacagcggtttaaaaccatccttgagtttttgagcctccgccgcaccgtctttcagcagccggtaggtgatcagtgcaaacaatttagccgtcagaagatatgctgtgtcttcattttccacatcataactgggattgtggccgctgccgcacatgccgccggtatgaaattgcaaaagaggcagtacataagagatatcaccataatcggtggaaccgcccccaaccgccatatcgtggtcattcgggtcacggcgtccacctgtgacagccaaaacatcgtcgatggctttttccagcagcgtcgtatcgtacaaaggaacggtaggaagataacctggtgtagtcgaaatttccagcccggcaccggtaccaaccgcaccggccttcatagcccgatccactttataattggcatcctgaatggccgggatatttcccgcccgaaccagatactgcagcaccacatcatcggcaatgacatttaccgcctcgcctcctttggaaataaaaccatgaacccgcaccgtgtctttgtcgcggaagctctcccgctgcaattccagcgcatgcatacccaaagcggcggcgttcagcgcatccactcctttttgcggtgcgcccgccgcgtgagaagcttttcccttatactttactgttttacttacaaatccagtagaaggactgttgcccatacccgcttcaaaatcaccagttgtagaatgatgccccaccaccaaatcaatatcatccatcacgccaatacggataaattcacatttgccgccgaaataacgaatttttccttcttctgccaatttttccttgaactccaaatccacacactcttctgccgga

SEQ ID NO: 441 - DNA, 12222 bp, Unknown
  16S sequences of unknown bacteria
atacagcagcgaagagattatcacagcttccggcatccagcagggcgacaatctatttttattgaataagtatgagatttatgagtctatcctggaaaagctgccatatgtatcctccgtcagcatcagccgcaaactgcccgataccttgctgatcgaagtgacggacagtaatcagggcggtgtcattgaggatcacgggacctactgggttctcagcgcagaaggaaagatcttgggaaagcgcgccgaggctggccacggcgcattgatcacgggactcactctgtcagagccggaggtggggaaaaaggctgctgtggaggaagggcaggagcgcgctttgaagcagctgctcgatctgctggcggcactggaggaaaaagggatgcttcagggcgtcggaagttttgatttctctcaggagtctgttatatcgatcaaatacgcggatcggtatgtggtaaaatttccctacggcgccgattttccctataaactcacgcggttgagccaggtgattgagcgtctggaagagcagggagaccagcgcgcaggtgtgctggatctgacggctgagggtgagatccattttattccggactgatacaaaagaaaagaggatacagttatttcatgaaagagtcaaaacacatcggcaaggtgtccatcagtgtggtctgtgtgatcttgggcattctgctggcgctgcagttcaaaagcgtgcgggaaaacaaccagatagacgctttgaatacgacccgtgtgcagacgctgcagaatctgctggatgaaacgcgggaacagaacgaccggctttcagagcaggtgaaagaaatgcgcaaagaggtgcagagttatcgtgaagccgccgccggcagcagcgagcaaagcgatcaggctctgttggacgagattgcccacctgcagttggcagccggcatgaccgacgtggtgggaccaggcatcgaggtggtgctcgaggacagcacagccgccaacatcagcggcgatgaggcggattatctgatccacgacagtgacattctttccgtggtcaatgagctgcgcgacgccggggcggaggcattgtccctcaacggcaaccgtattcttgccacgtcggagatccgctgcagcgggtcggtggtcaccatcaacggacggcgcaccagcgcgccctttgtcattgatgccatcggtgacacggataccatgtttaatgcgctgatgatgcgcaacggcgtagtagatgtgctcaagcagtggtccatccaggtaagcgtcacagaagtggacgagcttctcgttcctgcttacgacggtaccatcgaataccgctatgcacagaccgccaccgaggataatgtgacggacgaagaaacggaggcgtcctgatgtatattgtactgagcgttttgctgggtgtgctcatcggcgcgctgttgccatggagcatccctgcgcagtattcgatttatgcggcggtgatgctgctggcagccctggatgccgcggcaggcggcatcaatgcgcggctgcatcataaattccgcggctccctctttgtctctggagctttgggcaacgggctgattgcggtattcctcacctatatgggcgagcgcatcggcatttcgctttatttggcggcagtggtggtgtttggtacgcgattgttccaaaactttggagaaatccggcgagaactcttgaccttgtctggaaaccgtaatacaataggtaaaaatacggacaaaacacaagaactggggcaaagcgaccatcttgacccgctgtaaaacgcaacgtcttgtagtttgcataaatttaaggaggaaccatcatggcatttggtttggatgtcggtcctgaaaacgtagtcaatattaaggtcattggcgtcggcggcggcggcaacaacgtggtcaaccgcatggtgcagactggagcgaagggtgtggaatttgttgcggtgaacacggacaagcaggtcctgtcccgttccggcgccacatataagatccagatcggcgaaaagctgactcatggtcagggggcaggctccaatccggagatcggccgcaaaagtgcggaggagaaccgcgcgcagatcgcaaaggctctggaagagacggacatggtgtttattaccgctggtatgggcggcggcaccggcaccggcgcggcacctgtggtagcagatgtggcccgtgaagcgggcgtgcttaccatcggcgtggtcacaaagccttttggctttgagggccgccgccgtatggtccaggccgagcagggcatcgaggacctcaaagacaaggtggattccctggtgatcatccccaatgagcgcctcaagcatgccaccgatcagaaaattacctttgccaatgcttttgccattgccgatgatgtgctgcgccaggcggtgcagtccatttccgatttgattaatgataccggcttcatcaatctggactttgccgacgtgacctctgtgatgaaggacgcgggctttgctcacatgggcgtgggacgggccgaaggcaaaaacaaggcggaagaagcggcaaaaatggctatttccagtccgttgcttgagacctcaatcaacggggccaagggtgttctggtcaatgtgaccggttccatggacatcgggcttgacgaggtggagcaggcggccacactggtgcagcaggcggcgcatccggacgccaatatcatcttcggcgctacgttcgacgaagcgatggaagatgaaatccgcgtgaccgtgattgcgacaggctttgatgaaagtaccggaaagagcactatgacggaaaagcccttcaccgaggcggagaaaaaagtggagcagactgctgccgcgcagaaggcggaggaggagacggcggacgcaccgcagcagccggaaccggccagtgtttcttccggcgatgcagaagatgatccgtttgatgcaatttttaatattttcaataagcgtcaataaaatgggacaggctaagtgcggtaggagaatctctcctgccgcatttttgtttaacatcaaaaagcagcggttctccgatgctctttgcaggagtcatatggaaaatggctgttgaatcaatggcagttttagcggaaagcagaaaaaatttgctccgcgcctttgcgatctggctgcggcgcggtgtttttccagattgtgccatccaaaatcgcctgattttgttccttgttttttgctgctgcggtgggcaacgtaacaacgccgcagaaccgtgcggcaaatttttgacaaggggtgattgaatggatgaacctttttctttgcaatcgattcgctgcagggcgccggctttccggcgtcgggccgccgctgttctgggcacgcttattttcattttttgcatggcggccccggcttatgcagccgtatccagcgccggaagcgtgtcgggccagtcccggacgctggtgccgctgggacgcgccgtgggcgtcaagctgttctccgacgggctgctggtggtgaatctgtcggaaagcgtgacggaggacggtaccgcttctcctgcgcggcaatgtggaatccgtacgggggatgtcctgctggaactgaatgacgaggacctcaaaagcacagagcagctgcagacggcgctgcagaaaaacggcgcgcagagcgtttcgctgactgtgaagcgcggcgcccggacgttatctttggaagcgacgccggaaagcggagccgacggcgtgtaccgactgggcgcttgggtgcgggacagtatggccggtatcgggacgatgacctattatgacccacagacggggacgtttggcgcactgggtcacggcatcacggatgtagacacggctcagctgatgcccatttcctctggcgcgctgatgtatgccgatgtagcgtcggtaaagaaagggcacagcggcacgcccggtgagctgacgggagatttcaagccctcccaggagctaggcgagctgacctgcaatgcctcgtccggcattttcggtacgctgagcgacacctctatggcctccggcgaggcgctggaagtggcgcaccgggacgaagtgaaatgcgggaatgcggtgatcctttccaatatccgcggtgataaggtggaagagttttccatcaaaattaccaaaattatggaaaatgagggcggcggacgtgacatgttgatccgtgtcacagatcagagactattgtcttccactggaggaatcgtacaggggatgtccggtagcccgattttgcagaacggtaaattggtgggtgcggtgacacatgttcttgtgagtgacccgacaaaggggtacgctatcttgatggagcacatgcttgaggcagaaccttaagatttgaccaaaaccccgccaaagcgacagattcactgaaaagccatacggaggccgtcgaacgaaaaactgcacaaattaccaaaaattaccaaatactccttgaaaatactgtccgattatgctaccttattaatatagcaaagacgaagcttcgcaatgcggcgcagtagctgagcgccaatgtgacgggctgcggaccagccaaaaattctttgtagagggtttggtatacaaatggaatcgaaatggacagtactgctggcggatgccagtgaagagttccgaggcctactgatggcggccttggcggaaacagaggagtttgaagtggtcgcttctgtaggcgacggtgcggaggcggcacgcctggcggaggaaaagcagccagatcttgtggtgatggatatgatcctgccggggctggacggtcttggactgctggatcagctttccatcatgaaagagaagcggccggaggtgattgtgctttcgcagtttatgagcgagcggatcatcgccgcagctatggagcacggcgtttattactatatgacaaagccctgccggacagaatccttgctcgaacggatgcgtcaggcgctgacgccgacgggcagcgcggctgggcggggcgcggtcgaggaaggcgtggagttgagcagccagattacttcgatcattcatgaaatcggtgtgccggcccatatcaagggatatcagtatctgcgcgaggcgatcctgatcgccgtggaggatatggaggtcatcaatgcggtgactaaagtgctgtatcccgaggtggcccgtcgttataacaccacaccgtcgcgtgtggagcgcgctatccgacatgccatcgaagtggcctgggaccgcggcgacctggaaacactgcagaagttctttggctatacggtgtccaacaccaagggaaaacccaccaacagcgaatttattgccatgattgccgaccggctggtgctgcagaaacagcacgcctgaagaaatgcaccaggtggaattctgccgtctacctggtgcatggccgcctgaattctgcctgaaggcggcgaaaaaagacgtgtcctctgaaaagagggcacgtctttcctgttcaggcactgcggtattgcctatggaaaaatgccgctttcgctgttatgctttccggatgatccccataggcgtagattcccgggattgtcccaggggattgtctttcagaatacgggcgtagagatcacggtccatggaacagtctgaaacgcccaaaatatttccgcccaaatcattgatatctacgataataacaggatagccgatgtgtttggagatatcggcggccgtttcgtccgggttcagaggacccaggacaacgcattcattgtaaggcggaatggtgttggggcagggaccgtcaatggaagaagccttgggtccggcgatgatataaaaccagccgcgtttgcggaagagtttgccgatggcgccgataaaggcggcgaacaggatacggagcgtaccgcattcccgcagggccatttccatcgtttccggaataccaagaccaatgccgtggggcgttttggtgacaaagcggctcagcagcacagccaggcggcggggatggatatctttcatgtagatagcacgcttttgtgtgcaggccacgcatttttcggaaatgaacagcacgtcgccttccaccatggaaggagcggcatatgtggcgcagacctcgttgatcttgtcctgatcggtcactacgtgagtgcggataggatggcggcggtacgaaacgccgtcgacctcgatgatctcgtttttcccttcgttgttggtcagctcattcatatcatatacctgtctttcttctggtaaccaaaaatagcacaaaaatggaacccctttggcaatatcagcattatagccagaaatcaaaaaaaatacaagccgcatcctacacagaatccgaaaaaagtttgtgcgcatctttgttcttcgtgcaatattcctcttgcatatgccgtgtcaatggcatacaatagcggtatcgttttttgcggaaggaagtcatttcatgaccggtgaggaagctattgcctatattgaacacattccctggcagggggtccggctgggtctggagcggacgcgggagttgctggaaaagttgggcaaccccgaaaagaatctgcgttttgtccacattgccggcaccaacggcaagggcagcactgccgccatgctggccgccgtgctccaaagtgccggatatcgtacggggttgtatatttctccctttttgcaggtgttcaacgagcgtatgagcgtcaacggaacgatgatttccggcgaggagctgggggaaatcacggaacaggtgcgcttttccgcggaggccatggaagaccggcccacagagtttgagctgatgactgcaattgcgttcttgtatttccgtcggcagcattgtgacattgtagtgctggaggtgggcatgggcggccggttggattccaccaatgtcattggttcgcctgaagctgcagtgatctgcaacattggattggaccatgtgaaagagctgggcggtactgtggaacagattgcctttgaaaaagcggggattatcaagccgggctgcgaagtggtgttgtaccagccggagaaagacagcgtggcgcaagtcgtgcgtactgcttgccgggaacggaatgccgcgctgcacgaggtggatttttcccaattgcggcttttgaagaattctattgaagggcaacggttttcctatcggcaatgggaagatctgcatatccggctgctgggtttgcaccagctgaaaaacgcagcggtggtgttggaaacagttgccgtgctgcgcggacggggatggaacatttctgacgaggcagcgcgccggggtctttccgaggcccggtggcctggacggtttgaagtgctgcgtgccgacgggccggtgttcctggccgacggtggtcataaccgccagtgcgccgaagcagtgacggcggcgctgaaagcatattttcccggcaaaaacattcatttcattatgggtgtgctgggagataaggattatgcgtccatgcttgccgttttggcgcccttgggcggacggttttataccgtaacgcccgacagtccccgcgcgctcagcgcggcggcgctggcgcaggaactttctatttatggtaaaccgaccgatgtgtgccaaagtgcggcggaggctgtggcgaaagccctccggagcgctggaaaggacgatgtcgtctgctccgtcggctcgctttatatgaccggagagatccggtcggccgtgctcagcctacctgtacaggcggagcaggggtaaaaagttcatacaaatgctaacagagtaggaacaggcgcgttaagtgctggtcggacgggaagttgccggccggacgagtgggccggaggcccagcggtgcctgttccgcattccgctgttagaaaggggaaacaaccggcgtgccatgcatgcttcggagcctcctttttgacaacgctatgcaaagaaggaggtaacgaacatgcaatccaaaaaaatatcatccccgcatctgcagatcctgctccgcgtggcggttctggctgccatggacgtgctgctgatgaattatctcggcatccacacacagtattttaaaatcgggttttctttcgtccccattgccctgtgcggcatgctgtacggcgccaaatggagcacggcatgcgcgggattgggcgatttaatcaactgcctgctcggcccgtacggctggtatccgccgctgacgctgagtgcctgcctgaacggctttttgttcggctttttcctcaaagggcgcagtgatcatctgggtgcgatcattgcagcagttgtaacattccagttgggggtcagcctgctgctgaacacctggttcctttccctgctgtattccacaccctttttggagttgatgatcacccgtgtgccgcaagtactgctgatgttgccaattcagattattgtactgcgcctgattggttccaagcggctggtgacagcactggccggcacggcagcctgaaaagaagcgctctgccggcgcgcctccatcgccagggaggcgcgccggcgttttttgacgaacggaagcattcacaatttattcaaaaaagaaatacaaattggtcaccattgccgggtggggctgtggtatgttatagatgtgcttgagaaagaccaaaagaacaagaacatcacttatttctcctatctctcttttttatgaaacaacaccctccgccgcggccgaatggctgtgcagtgctcatggcggagggaccaaaaattccatgtccccggaaagggcatgtttgaaggctgtgcctacgggcgcggccctttttattttgtgcgccagttgtccgggccttctggagcaggcttagggtaggggagtgggtggccgtgctcagaaaaactggcccggatatactgccaatagttctgttgatgtccctggttcattcggatccgggactacggcagtggcagcggagccggcagaaggcgaacgatacgaatcgtccataaaagcaggcagccgccgcagacgaggtacagtctgcggcggtcttctgtttaccaggcagtggggttgttggtgcaggggcggctcatcagggcaaaacggttgcccgattcactaaattccacaaatcgcaggctgttgctatcgcccagcacatagcggccgacttcctgctggtaaatgacgatgtagttattgcctacttcgtacagtcgcccttcccagcgcaccagctcaccgttacccatcagaaaagtggcggcaatgtaagcgccgatctcgcggctgagcataccgcgcatggagccttcgaaggcttcctccacagagattgggctgccgatcacatcgctgctcagtccgtggcgcatattgagatggttggcgccggaggggccctgagtggatgcggcagtgccggcggctgcgctgctttgtgcgctcataccgttctgtgcagctgctgcggcgttcctatttctttgggcggcggtgttggctgccatagcgtcctggccggcggctgctgacattgtgcctggtggtgcagccatggggtcgtttgcaccctgtacataaggatcctgcataaggtacctgtcgttctgcgttccgttcatgctgttgatcagctccattcattaagtttggtagtacgcgtcggtggggttataaaagcagtggtcgccgatgcgtatctgtaagtacccgacattcgagggaaactggccgcggcaggtggggctgaaaggattataaaaccaaagagcctgccccaggtcgggcagacggttgccggccaaggcccagtccgcgatcgcatagtgttcggaggtggggttcatattgtatatgttctgtggattatatgccccagcttccgtttccgaagcacatacaaactggcccggctggaaaacgatgttgcgcaggctccctctgccgatccgcgcatattctccgccgacagcgttgacacggttcatgaccacgctcgccacggctttcatgccgttttcaccctcgccgcccgcctcgcactgcaccaggcgcgccaggagttcacggtccgtataagccataaaagtcctcgctttctgctcttgagcgggaatgagattgcggcatcccgcttccatttcatcctatgcgctgggggcgaaaaggtgaaaagcgctcagaaagggcgtcggctgcagtgcagccgacgccctttctgagcggaagagtgattctcaaacggtctgttccagcgcttcctgcaaagcggtggcaagctggtcgggacaggaagtggggcgcatgccgcagcggatccccttcatgcgttcaatggcatcctccacctgcatgccctgcagcaggctggcgatgcccttcaggttgccgttgcagccgcccagaatatccacatgcttgatggcgccgttttcaatttccactgtcatctgccgggagcagacgccgtggggggtataagtataggtcatggtgatcattctccttttctttcccaatttcctgcgtttgcggcgctgggcaccacatttcgcgcttttctgcattatagcgcagacgcagcgcgtgtgcaagaggggataacgttggaagcataccggcacagggcagtgcatacagtgacacaggaacttttgcgctgcggggacagtttgacgttttgcatcaaaaagaaatgtgaatattatgtaaatttcacgttatgaacatggcgcttttccagtaacatgttatactaaaagcttagtaagtcgttttttgtcgcggtttgtcagaattaagggaatcttaaaggatttaccgctttgtttttcgtgcagtgtgtggtatgctttcaaacaatctaccgctccgcgcgcgaaacgattcggcgggagaaacacaaaggagtatgcgaaaatgtccatatggaaaaaggcgggcattaaagttcagattacaggccgttctaaaattgcggcggcgatcattacgggcgcattggccgtattcatcgccgtggagctggcggaatttttcaagcccgaggttgtgcttggaaaatggcagttgttgtggagtgtgctgtgcgccttgggcgccggcgcggcggaactgatttcggtccagtggaccggggatcatggccctgtccggcagcgcagggccatgattgtgctttttttactgctgcctgtggcaacccttaccatgatggaatttctgcacggcacctttatttacaattggacgccggcggtctttgcggaaaattatgtgttcatgctggtgatctatctggtgttttttgccatcaccggaaatatccatacccccgttaccctggcgaatattctgtgctacatatttggcatggtgaaccattttgtgctggaattccgcggcaccgtttttgtgccttcggacattgccagcgccaaaacgggtatgagcgtcgccggcggttacgccatcacgccggacaaccaggtggtgctggctacggcgctgtttgtgctgttgctggtggtggcgcataaaatgcgcatggaaaatcctgcgaaaatcctggtccgcagtgtgcgcatcggtggcgcggcggtagcgctggtcttctgcggccttctgtataacacagactggtttgcagatcacggtatgaaaccggattttttcaatcaaacgcggggttataccaatcatggttcgctgttccacttctggatcaatacgaaatatctttctgtgcaggagccgaaggactacagtgccgaagaggccagcagcattgtggaagagatgctgcccgcagtggacgctatgggcgaagtacaggtgggcgaggaaagcggacagatgcccaatatcatctgcattatgaacgagacgttttccgatttgagcgtggtgggcgagtttgagacaaacgaggattatatgccctattggcattcgctgacggaaaataccgtgaaaggctatgtccatgtgccggtgtacggcgcgggtacggccaattcggaatttgaatttttgaccggcgattctattgctttcctgccggtgggcgcctgcgcctatgaatcctatgtcaaaggtccccagccttcgctggtttcgtcgctgggcgcgttgggctatgataaaacggcatttcatccctattatggaaataactggagccgcgatgtggtgtatccctatctgggatttgaccggtatgtggatatcg

SEQ ID NO: 442 - DNA, 18910 bp, Unknown
  16S sequences of unknown bacteria
ccctgcgccgcagccgccgcggagagcaaccatcccgccaaggtgggcctgatgcaggcgctgggcgtgtttatcgatacgatcatcatctgctcatgcaccgctatgatcatgctcctggctcccgccgaagtcgtggacggcctgacgggtatggatctgctccaggcagccatggcttatcatctgggtgagttcggcgtggtgttcattgcggcaatcctgtggctgttcagcttctccaccttcatcggcatcctgttttatgcccgttccaatgtggcttatctcttcggcgacaactggctgtcccagacagcctataaaatcctggctctcatcatgctctttgccggcggcctggcaacctacacttttgtctgggatttgggcgatgtgggcgtggggctgatgacagtcttcaatatcgccatccttttcccgctctccggtcaggctatgaaatccctgaaagattacgagcagaaccaccgacttcgacgctgaaactccaaggcagcagttcgctgaaacacaagtcctgtggttcaaataaaaaagaagggcatccgcagtgcggatgcccttctttttttatggagcagggtacgggagtcggacccgccttaacggcttgggaagccgctgtaataccgatataccaaccctgcaaaattcagtgtgcttattatagcagaagcgccgtcattttgcaacaggttttctgtcgaagatttccttttctgttttcagggaaccccctattgaaacactgaccggcaaactttttgtccccgcatggctgggacaggcataagttttttcccccggcatacgctctttatcagaaaacagaacatgtagggggagatttttatgccaaaaaagctgctttcgctgtgcctgtgccttctgctcttgctgggcagcctcgtgccggcggcgcaggctgcgcccatcacttccggcgcccagagcgtggctctgatggaaaaggaaaccggcacgctcatttatgccgagaacgaacacgaacggctggagccagcctcggtcaccaaagtcatgacgctgctgctggtgatggaggccatcgatgacggaaggctgcactatgaagacatgctctctgccagcgaccacgccgcttccatgggcggaagccaggtgtatctcaaagccggcgaacagatgagtgtggaagatctcctgaaagccgtctgcatggcatcgggcaatgacgccgccgtctgcctggccgaagccgtggccggcagtgaagagagctttgtcgaacgcatgaaccagcgcgccaaagatctggggatggccgacaccacgttccgcaactgcaccggcctgcctgcagaagggcatctcacttcagcttacgatatcgccctcatgtcccgggagctgattctgaatcacccggatatccgccgcttcaccacactctggatggactctctgcggggcggagaattccagctggccaacacgaataaactgattcgctattacgacggcgccactggcctgaaaaccggctccaccgattcagctctctactgtctttccggcaccgccgagcgtgacggcatggaattgatcgccgccgtgatgaaagcccccacctctgccgaacgctttgaaaccgccaaaaatttgctttcctacggcttcgccaactacaccctggtggatgtatatcccaacgaggccttgcccaccattcccgtcagcatgggaaaaaaggactctgtgcagcccatttttgccagtcgcgacaaactcctggtggaaaaaacaaaagtctcttcggtagaaaaaaacatggaactggttccccatatcgcagctccggtagaagaggggcaggagcttggtacactgaccattacctctgaaggcgaaacgcttattaccatcccgcttgtagccggagagtccgtagaacgcctctcctactgggatattgtacaaaaattattgaagcagtctctatttgttgtataaaatcacctccttttcggcgattttcccttgactttgcccctgcctatgatacactcaaagaaagaacaggcggctgccgcagcggtgccgctcagggggaggataaccacatgattcaagtcaatacgaaaaactgctctgcatttgttcccaaagactatttttcccttcgggaagacgccctgtcccaagcccaggcctggcttcaggacgcaaccggtgaaggcaatgactttgtgggctgggtgcacctgccccgggattatgaccgcgaggaattcgcgcgcatcaaagccgccgcccaaaagattcaggcccaatccgccgctctggtggtcatcggcatcggcgggtcctatctcggagcccgtggcgtcatcgaagccctgtgttcccccaattataaccagaagcagaaggacacgccgaacatttactttgccggcaacaccctcagcaccgatgcgctgacggaaatcgcagaactgatcggcgagcaggatttttccatcaacgtcatctccaaatccggcaccaccacagagccggcgatttcctttcgctttttccgtgagctgtgcgaaaagaaatacgggaaagaaggcgccagggagcgtatttatgccaccacggacgccaaacgcggcgtacttaaggccctcgccgatgccgagggatatgaaacctttgtcgtacccgacaacgtcggcggacgctacagcgtgctcaccgccgtgggattgctgcccattgctgtgtgcggcgtagacatcgacgcactgatggccggagccgccaatatgatggaaaactgtgcacaaggcggcgcgcagtgccccgcctggcagtatgccgccgcccgcagcgcgctgtatgaatgcgggaaaaaagtggagatcctggcctgctacgagccgtctttccgtttcatggccgagtggtggaaacagttgtacggcgaaagcgaaggcaaggacggcaaggggctttttcccgccagcgtggagttcacagctgacctgcactccatgggtcagtacatacagcagggcgagcggctgatgttcgaaaccgtggtgcgctacgatcagccccggacaactctgacagtccctttcgatgaaagcaacggcgacgggctcaatttcctggccggaaaggacatgtcctttgtaaatgaacaagccatggacggcacgcttttggcccatgtggaaggcggcgtccccaacctgatcgtccgggccgcacgcaacgatgcgcaaaatatgggtgagttgatttatttttttgaatacgcctgtggtctgagcggatatctcctgggcgtaaaccccttcaaccagcccggtgtggaatcttacaagaaaaacatgtttgccctgctcggcaagcccggttatgaggatatgcgcgcggcgctgttggagaaactcgggaaataagcatatttttcggttgtcatttcttttgaaatatgatatgctaaatgcacaaaagaaaccacctccatcttttattatctaaaggagttgaacaattatggtaagagtaattatgggcgtcaaaggcaccggcaaaacaaagcagatgatcgacctgatcaacgaagccgccaaaaccgaagccggcaatgtggtgtgcatcgagcgcggttccaaattgacctacgatattcataacagcattcgcctggtggaagccagcgaatacagcatcgacactttcgattccctcaagggtttcatcagcggcctgtatgccggcaattacgacatttcccagatctttatcgactctctgtgcaagatcgtccccagcgatatctcgcccgaagtcgaaaagtttttggactggctggagaacttctccgaaaagcacaacatcaagtttgtcgtcaccatcagtgccgaccaggctctggccaccgacggcatcagcaaattcttttgagcggcacgcctctctttctgctacaaaacccggacagtgtgccactgtccgggtttttacaaagcatgctctcaaaaaatacgattgcaaaaggagaaataccatggaaatcaaaagcatcgaccatatcggcctgatcgtacaggacatagaaaaagccgtccggttttataccgacgtcatgggctttgcgctcaccggtgagatcacgccctgggctggctcggcggaagagtgcgcggccatgcaggtgccggcgggtacggaataccgctgcgccatggttcaggcgcccggcggcatcagcatccagttcatggaattcagcgccatgcagtccaatgtgccgctgaacacccggggcgcacactacctgaccttcatggtggacgacatccacggctgggtcaaaaaactggaagagaacggctgcacagccatgagtcagcccctgtcctatgacgaattcggccagactatccaatggtgctatgtcaccgatcccaacggcatcatctttgaactgaccagcgctgtatcttgagtctgccgcacacatcgcccaaaaggccggcgggagcacggaacatgatgttccgtgctcccatttttattgttttcggatcccgaaacactgctccgcattcaggcccacgtgccctttctgcacttggaggaagggatcccctgctcctcacggtatttcgccacggtacggcgggaaatatggattcccattccctcaaacctcctgcacagggcgtcgtccgacagcggagcggcaggatcctccgccgcgatcagttccaccagtctgcgtttgatgaccgccgcagacaccgctccggacaggcccccggaagcatacccggacgtgaacagcgacttaaggctcaccgtgcccgccgcgcagacaatgtatttccccgcaatggcgcggctgaccgtagacacatgcacgcccagcgcttcggccacttcggacatcatcatgggctgcaggcttttgccgtcggtaaaaaacgggcgctggcaggccacaaccgcacagatcaggcgctgcagcgtgctctgccgggcggaaatatcggatatcagtcctttagccgaggccaggttgctccgaagatagctgcacaaattctcatccttgctctcggcgagcagcgcctcatagtccctgtttaccaccaaatggggaatcatactgtcgttcatctgcacaaacagttccgccccctggcggataacaaccgcgtcgggcaccacataggcgctgtcctcgccggtataaaacccgcgggtaggaatgggcgaaagcgcgcgaaccgcatcgcagcaggccttggcctgcgccgtatccacgcccaaaagcttcgcaatggcgccgatccggttctgagacagcagttccagcccttctttcacaatgcgcaccgtgtaaccattgaagcagtctccagccgccagctgcaaaatcaggcattcctgcagatcccgcgcaccgatgcccggcggatccaggctttggataacatagagcatctgcgtcagttcaaattcatccgtccccagcagctgcgccgcatccgccagcggttcccggaaaaaaccatgctcgtccagcatggcaatcaaatgccggcagatctgcttctgcgcttcactcagaggataatccgccagctgaaacgccagataatcctccagcgattcgggcttataagtataacggagaaagtccgccggcgcttccccgctttgcccggcgcggtaaaaggtcgccccgctggaaaccggcagcgcaccgtcgtcaaacgattcgctgcgcgccagcgttccctccagcgcgtccagcgacagatcggaaaaaggcgagtccgccgcttccgccccttccgccacctccagcatcggattggactgcagctgttcattggccagggccgctacctcctgcagcgtcatgtgcaggattgccagctgttgctgcagccgctggctgatcaccaatttctgttctgttttcagctgtatgctctgggacgcttccataaccgcgtgtgctcctttccccgaaaccacgccgccgctcaggtggcggtgttttccctctctttcacgttgttatagtataccccaattcgacaaaaaccgcaagaatatgccgcctgtttttggtaataattacggctctggtgtccagaaaatacacaaaccgtccttttccatgtctccggaaggctccgctccccaaaaatgcccgcgcgcaccaaaaagcgcgcgcgggccgagcgtaccgtacagcaccaccgcaagagcatctccccggcagcttacagatcttttgccttcattttgtccagctcccgccggcgccgctgcgcacggccgtccacccagagcagcaattccaaccccagaatcaaaagccccggaaccaccagctttgccgacagcggcaaggaccatattactgttgctccaaccagcaccgccagcgaaagcagcggaacgacagctcccagctgccacgcctgccgcgtactcagatatttctgcgcgccaacgatcgccaccgtgagcgcaatggtacacaaaagctccaacactgtattcaacacgacaaattccccttttcttttttatatttttccataatcatctttgccgtttccagatcaatccgcgcatccaccgcaagccccttgataaacgccagaaacggttcttcttccttttgctcgctcagtgaaaccttctgaatcagcttatccagccgcaaacgtacggtgggataggagacgccatacagctttgcaatgtctttcagcgatcccgacttcatcagaaaattttttaaaaaagcagcgtcttcttcctccagtgccagcatccactgtggtattttatccagctccatattttcatctcctcattttttattttaactatttttagtatatcataaatattattcatgtcaataagaaaatgtataaaataaaattcacagttcccgatacggaaactgtgaatttttcagaactcgttttttgttccctcatcgcccgcggcagtgtatctctgccgcgtcgacccttatacccggaaaatgccgcgcaccccgctattgggatcggtgaacagcggcaggttcggcggcgccagtgtaaaggccgcgaacagggccagcagcagcgccagaagtgccaacggcagcacccaggatacgctgctgccccgctgataaattttcccgcccacaatctgccccagcagcaccgccaggaaaaacagcagcacatccgccgccagggattccaccccgaaggctccggtataaaaataaaacagcagcacaatggtgatttccgtcgtcagcagcgcgcccagcgccgccgcaaaccaggccggcgcatcgagttccctaccgcggcgctgggcccaaagataccccgccgtccaccacagcgttgtgggccacagcgccagcttgaggtgctcccacacgctttcattcaccggcgccagcagccccaccaaaaagaattctccgctcagtccgtataaaaagtggagcaatgtccccgccagaaacagcaccggaacccccaccaggatctgccgctccgcctttcccaaaacgatcgccttcatgcgcctcgcccctctcttgaaactactgcttcgatcatacactttcccggcggtgaaaccacgcatacgctgtcgagcgggggacgattcacaaaatttcgccgcaggcgttctctttttgtagcattccgccattgtccgcagcggtgcggcacggtataataaaacccgtatggaagttttgggtggccctgggccgccccacaggatggagaaacgattgttatgatgtatgaaactgccccagccaagcgcaaggtggacaccctggatcatctgcccagcggaaaaagctgtgaaatcctgtccctgtccaaccggtccggcgcggtgaagcgccgcctgatcgacatgggcctgacccccggcacccgcgtcaccctggtgaaggtcgcccctttcggcgaccccatggaagtttcgctgcgtggctatgaaatgtccctgcgcaaagctgatgccacccaaatcaccgtgcgcctgctgcgtgagggagaattgctccgggaacgtccgctgcctcacgtggaccgcgcccagcgcgagcgcatgcgcctcgcccacagccacgaagccgctgcccaccccagaacctatgatgccgccgcccacgacacccgtcagtggaaaattgccctggcgggcaatcccaactgcggcaaaaccaccctgttcaacgcgctgaccggctccaaccagtatgtgggcaactggcccggcgtgaccgtagaaaagaaagagggcacggcacatctgggcacgcaggaaatgaccatagtggatctgccgggcatttactccctttcgccgtattctatggaagagatcgtggcccggcaatttattattggcgagcatccggatgccattttgaatatcgtggacgctaccaatctggagcgcaacctctacctcaccatgcagctgctggaactggagcggcctatggtgctggcgttaaattttatggacgaagtggaaaaagccggcgatcatattgatgtggagcgtttgtcccagcatctgggcgtgccggtgattcccatttctgcccgggacggcacgggactggacaccctgctggaagtggcccaccgccagatgcatacggggctcaccgtggagccggacgatttgtacgacgactacacccatgaaatccaccaccgcgtgggcgaagtgatccacgacaaagcttatgaagccggcattcccgcgcactgggccgccatcaagctgatcgaaggggatgcagacgtggcagaacacctgcatctttccggccgggaagcggctaaaattgagcagatcgccgaggaatatgaggcctcctcccccctgggcgaccgggaaaccctgattgctgacagccgctaccgtttcattgaagcggtggtgcagacctcagtgaaaaaagttcgccagaaaggggaaaaaacctggaccgaccgcatcgacgccgtggtcacccataaattctgggctttcccagtgtttttggccatgctggccgttatgttctggttcaccttcggccccatcggcagcgggctgagcgatctgctggccgccgtcatcgaaaatggcgtggagcctgccgtgcgtagcgccctgggaggcatcggcgcagcaccctgggccgtgtccctggtgtgcgacggcgtcatcgccggcgtaggcggcgttctcacgttcctgcccatgattgccatcctcttcctctttttgagcattctcgaggactcaggttatatggcccgggccgcttttgtgatggaccgcaccctgcgccacttcggcctgtccggcaaggctttcatccccctcctgatgggctttggttgcacggtgcccgccgtcatgggcgcgcgcaccatggaaaacgaaaaggaccgccgtatgaccatcatgctgataccctttatgtcctgttcggcccgcctgccgatctacggattgctggtgagcgcctttttccccggaaaccgggcgctgatcgtcatctccctctatctgatcggcatctgccttgccattttgtcggggctgattctcaaacgctccattttccggggcgaggccgccccgtttctgctggaacttccgccctaccgcatgcccaccgtacgcaacgtgggcactcacgtgtgggaaaaagtgaaggactttttaagccgggcggccacactgatcctggccatgagcgttgtgctctggctgctgcagagcttcacgctccacggacagtacaccaccgacgtgtcccagtccctgctggctgccctgggcagcgccatcgcgcctctgtttctgccctgcggcttcggcgtgtggcaggccgccgtggccctgctgaccggcctgattgccaaagaagccgtggtatcttccatgagcctgttttacggcttttccctcaccgcctccggcgctaccgtagctttggccctgggcggcacgtttactcccgtggccgcctacgcttttctggtgttctgcgcactttacaccccatgcgtggctgccatcgccaccatccggcgagagatgggcgacatcaagtggacgctggcctgcctcggctggcagctgggcatggcgtacctggcgtccatgctggtctaccagatcggttcactgctgttttgaaaggggatttccgtcatgctgctgacattgctgtacctcgttctggccgggctgatcctgtggtcgttctgctatatcattgcccgcattgtccgctccttccgcggaaaaggcggctgttcctgcagcgcaaaaacatccggcggatgcagcggatgcggatgcagcggacagaactcctgcaaaaagagcgacccctccggtcccaaatcctaaaacagccgcgcagccgttttgaaaacggctgcgcggctgtcctgtttcattcaactgccgaacacacgcacacggtactctgccccaatgtcttcacagacctttcggcaggcctcgatctcctccgccggaatacagtccaccacagagagaaccacatggggcacataggtttgaatttcctttgcaaaagaaagcatggcctcgtagccattttcatagtccggctcacagcggcggttataggtctcccgatcctgggcgttgagggagatggacaccgtatcgaaacgcccccggaacagcggcgccacatcctcgccccagataagattgccgtggccgttggtatccatgcggatggggatggaggaaatctcccgcacccggtcgcacacccacaaaatgtcgtgcaggcggtaggtcggctcgccataaccgcagaacaccagctcggaaaaagcgttcaggtcgcgtttttggagatcctcccagatctcctcgcgcgtcggctcccgctcaagccacaggctgtccgcttctcccacaccgtctccgctctggcgcaggcagaaatcgcagtgcatatcgcagcggttggtggtattgacatagagattttttccataagaataggtgatggtcattgaaaacacctcgttgtttctccgaaagtacccccgattatagcacggcgccgaaaaagagtaaagccccgcttccgccgggaaatccagttcagaatcggcaaaatttatagacagaggaaatttatttgtgctatactgaatattatatatttaatgcctttgtagtacgccggcgcagcgcacagccgcgcgccggcgaagctgtggggagaagctatgaacatcgagtttggatacgatacaagcacacagactgtcactgtaccggaagagcgtcttctggccgttttggagccgggcgcctttccgccggccgccggaagcgaggaggatcttgtccgtgcagcgctggcagcccccatcggcgcgccgccgctgcgggaagtggtccatgcgggagagaaaatcgttctcgtcacctcggacatctcccgccccatgcccacctggaaagtaatgcccgccgtgctggaggagctctatgccgccggtgtgcagccggaagatatcaccctggttttcgcccggggcgtccaccgcgcccacaccgacgcggagcgccgccatctggccggagagcaagccttttccgagatcacctgcatcgacagcgacccggaggactgtctctgcctgggtacgacgcggcgcggcaccccggtggagatcatgcgcactgtggccgaagcagaccggcgcatctgcctgggcaacattgaatttcactactttgccggctacagcggcggagccaaggccatcatgcccggcgtttccacccgggccgccatccgcgccaaccacagccacatggtggagccgggatcccatgccgcggccctggctggcaatcctgtccgggaggacatcgaagaagccgccgccctggtcggtgtggactacatcgtcaacgtggtgctggatgcgcacaaacatattgtccacgccgtggccggagacgtcaccgctgcccaccgggccggctgcgcttatctggaacaattctaccgcaggcccatcccggcccgggccgacatcgtcctggtgagccagggcggcgcgcccaaggacgccaacctgtaccagctgcaaaaagccctggacaatgccaagcacgccgtgaaagacggcggtgtgatcgtgctggtgggctgcgccaaggagggctttggagaatccaccttcgagcagtggttccgccaggcgcaaagcccccgcgccatcatcgagcggctgcgggaagattttgtcctgggcggacacaaagcggccgccatcgctctggtggaagaacgcgcggacatttatctggtgtccgactggccggacgaggccgtacggggcctgttcatgacccccttccccaatgcccaggccgcctttgatgcggcagtgcagcggtgcggcagctccgccactgttatcgccatgccctatggcgggagtaccctgccccgggcagaaacctgaaacggcccggccgttttccccaatgggtagtttttccggaaaggactctgaaaacaatggatgaacatcagctgaacgatcctgcacacaccacagcccccggctcggatgccgcgtcgaaaacggcacagcccgaagctgcggaggaatccccccagaaatcggtcctgcgcagattgtgggactccaccggctaccttctggtgccgctggtatcagtatttctcctgctgggcgtaattttctctctggcctgggtgcccaccggctccatggaaccgacgctgcccaccaaatcctattttctgggctggcggctgccctatttcttcggcgaccccaccccggcacggggcgacatcgtcatgttccgcagcgaggagctgggtgagctgctggtcaagcgcgtgatcggcctgggcggcgacaccatcacttttgccgacggcgacgtatacgtcaacggcgaagcactggaggaaacgtatcttcccgagcagcatatcacctatcccaccggcgcaaccgaagtgttcgaggtgccggagggctgcattttcgtcatgggggacaatcgcacaggttcctacgacagccgggcctggctcaatccctacattcccgtggagcagatccgttcccgcgctttggtggacattgcctttctgccggagtgtacctggaaaggcgtccgcctcctgacctgacggacggcaaacagagcgaaggaacgcaaaaggaggcattttatggacgagcgaaagccctaccgccgggcaaaggttccggcagcagacagcgaaatccgcgtgcgccgcacagtgtgcgacatttgcgccgcaggctgtaacatcgacgcctatgtggaaaacgggactgtcatcaaggtcacaggctgccgcaacagcgcctacggcaacgggtatctctgcgcccgcggccatgccaaccgtccgtacatatatcataaggaccgtatccaaacgcccctgcgccgcatcggaaaccggggtgagggcgcctttgaaccggtatcctgggacgaagcgctggacgaaatcggaaaacggctgggggactgccgccgcaaatataatgccagcgccgtagccttcaccggcggattcagcccctggaaccgcgccgcgctgcagcgcctggcctattccttcggcagcgtgaactatggcagctcctggagtctggagcgcagcggcgccgccattgccggcggcgcggccgcaggctgcatgagccgtccggacatccaccacgccggcgtggtggtcatatggggctgcaaccaatacaacaagggcaacaccgtggtggatgacgcgctgacgcagaagcgcggcgccaaggtcatcgccgtggacccccgcaccacggtgagcacctaccgcctggcagatctgcatctgcgcccccgcccggggaccgatgcagccctggcccacggtctgggccgcattttcatcgaaaaaggctggattgaccggcgctacgtcgagcagcacgtgcagggctttttcgactaccgcgcctacgtcagcgatttcacgcccgagcgggtggaaatgctgactggtatcagcgcccgggagttggaggccgccgcccatatgatcatgcgcagcggtcccatgtccatgctcatcagcgaagaggcgttttctcagatgcgcagcggcgtccagacgctgcgggccattgaggcactgtgcgccattacgggcaactacgatgtccgcggcggcatgctgccccacgcgcagccgagcgtggaggagcgcgtactgcatgagttcgtcgccgccgtccagtgcaatgtccctcatgaaagcgcggggagccgacgctatccgttgtttgcccatttctcccgccaatgccagctctcggatctgaaccgccagatccggcagggttcgccgtatcctatccgcgcactgtgctctttcgggctgaacatcaacggctatcccaacaacaaaagctggacgactgcgctggagtccctggacttttttgtggatacagacctgtttctgactcccacagcaaaatacgccgacatcgtactgccggcctgttcttcctttgagcgggaaatgctgcatactacgccggaacaacgcatttactacacgcctcccgttatcgcccccctgggccagtcccgcgccgatctggacatcatctgcgctctggcccgccgcctggcgccggaggatacgctgctgtgcagcggcgccgcagcgctgtacgattattggctttcccagatggacctgtctctggatatcctgcgccatgcggacgagccaatccagctggcccaggagccataccgtcccggcagctatacctctgccggctaccgcacccccagcgggcgctatgaactgcgttcgggcctcatgcttcaaatgggctattccgcgctgccggaatatgaaccgccccgcagtgacgcggaaattcgggaatttccttttgtcctctcagtaggaaaccggcaaacgttcgggtttcattcccgcactcaccgcatcggctggatccgagccatgcagcccgctcccgctgtggagatacacccggaagatgcgctgctgctggggatcagcgacggcgaccgggtggagatccgcacagcgctgggcagcgtaaccatgctggcacaattgacgcgcagtatccagcgcggaatggtaagcgttctgcccgactacgaagaagccgacatctgctccattctgcccgacgactgcgtggatccctgctcaggcgttccagcgttccggatgatgagctgcagcctgcatccggcccaggcgtaacctgcgtttcatactacaaagcggacagccgatctccggttttctgccgccgggaaaggatccgctctgaaccgtttatcatttctctgcacctgcaggtgctgttgacatcgtacgcaatcattccgccgcggcggaaaagaggagggcttgatttgggtattcactgcgaagtgcgcaaatgcaccggctgcggtgtgtgcgcagtggcatgcatggacgaaaaagatattcagccgccgctgctgcgcaagatcgtgcgcaaagagcgcatggaaggcggcgagctgcagctcacttttaattcccagagctgctttcactgcgtcaccacccgctgcgccacagtctgccccactggcagcattctgcgcgacacggaaacgggcatcgtcattcatgacaacgccccctgcatcggctgcggcaaatgcgccacagcctgccctttcggcgccatctttttcaacactgaccacatcattcaaaaatgcgacggctgcatcgaccgcgtacggcaagggctgctgccggtctgcgtggaggcctgcccgcagcaggcccttgaatgggagccgggcaccaaatagcaggccgcgcacaatccacaaacgttcgcagcagaaaaacattttgcatcgtctctatacttatcctgcagtcattctattaaaaatccgttaaatctgtcaaataaagcgctcttactccactgcgtccggatagatttgcaacttctcacactttgtattgcaaaacaagccagtttgtgctatactgggtatcacgatactttgcacggagccgccgcgcccgtttccgcgcgcgggccgctcctccggccgcgccgcggaaacgggcgcggcggtgattttatgataaaggagaagatgatatgaccgaacacccgatcaagaaggttctggtggccaaccgcggcgaaattgccatccgcgtgttccgcgcctgcgcggacctcgatatccgcacggtggccatgtattccaaagaggatacctacagcctcttccgcactaaggcggacgaatcctatcagatgcccgacaccctcgggccgcttggttcctatctgaacattcccgccattatcgacttggccaaacgccgtaatgtggatgctatccatcccggttacggatttctgtccgaaaacgccgcttttgccaaggcctgcgaagaaaacggcatcgtgtttgtcggcccgccgtcccatgtgctttcccagatgggcgacaagcttgccgccaaagaaacggccatccgctgcggggtacccatcatccccggcggcaccgagccgctcaaaagcggcgaggaagccctggaaaaggccagggaatacggcttccccattatgctcaaggcggcagccggcggcggcggccgcggcatgcgccgctgcgacagcgaggaggaagtgatccccgccttcaacctggtgaaaggcgaggccgccaaagccttcggggacgacagtatcttcatcgaaaaatttcttgagcagcccaaacacatcgaggtgcaaattctggccgaccgatacggcaacgtcgtccatctccacgagcgcgactgctccctgcagcgccgtttccagaaggtagtggagttcacccccgccttttctgtggatcagaaggtgcgcgacgccctgtgcgccgacgcagtgaagatcgccaaggcggtgggctttgtcaacgccggcacagtggaattcctggtggaccgccaggggcaccactacttcatcgaaatgaacccccgcatccaggtggaacacaccgtcaccgaaatggttacgggcgtggatctggtgcgcgcccagctgctgatcgccgcgggcaagcctttgagtgaccccgaaatcggcatcacctgccaggaggacatccagccccggggctacgccatccagtgccgcgtgaccaccgaggacccggccaacaatttcgcccctgacaccggaaaaatcaccgcctaccgttcctccggcggcttcggcatccgtctggacggcggaaacggctattccggcgcggaaatctctccttattacgactccctgctggtgaaagttacctgctgcgacaataccttcgccggcgcctgccacaaagccctgcgcgccctgagcgaaacccgcgtgcgcggtgtaaaaaccaatatctcctttatcaccaatattctgaccaacgagaccttccgtaaaggacagtgctataccaaattcattgacgaaacgccggagctcttcgatatctccgagtcccgcaaccgcggcaacaagctgctggaatacatcggcaatatcgtggtcaacgatccccaggccggcgccaaaatgtatgaaccctcccgcgtgcctgaggtggcgggcgagattcccgcaggctacaagcagtatctggatcagcacggccctgaagccctgtccaagctggtgctgggcgaaaagaaacttctggtgtgcgacaccaccatgcgcgacgcccaccagtccctgctggccacccgggtgcgcagccgcgatatggtccgtgccgccgacggcaccgccaaaatcctgaaagactgcttctccctggaaatgtggggcggcgccaccttcgacgtggcctaccgcttcctgcacgaatctccctgggaacggctggatgcactgcgcaaggccatccccaacattcctttccagatgctgctgcgcggcgccaacgccgtgggctacaccaattaccccgacaatgtgatccgggaattcgtccgcctggcggccgagggcggcatcgatgtgttccgcgtgttcgactcgctgaactggctgcccggcatggaggtagccttggacgaggtcatccggcagggcaagttcgccgagggcaccatctgctacaccggcgacgtatccgacaccacgcgggaaaagtacaccctgaaatactacgtggatatggccaaagagctgcagaagcgcggctgtcacgccatcgccattaaggacatggcaggtctgctgaagccctatgccgcccgtgagctggtcaaggcgctcaaggacgccttggagatcccgattcagctgcatactcacgatacctccggcaaccagaacagcaccatcctcatggccgccgaagagggcgtggacatcgtggatctggccattgcctccatgtcgtcgctgacgagccagccctccctcaacgccgttgtggccgctctggaaggacaggagcgtgacaccggcatcgacctgatgagcctgcaaaagctgacggattactggtctgacgtccgccagcgttatgccgaatttgaatccgacctcaaaacgcccgtcaccgacatctaccgctatgaaatccctggcggccagtacaccaatctgaagcctcaggtggaaagcctgggcttgggcgaccgctttgt

SEQ ID NO: 443 - DNA, 9954 bp, Unknown
  16S sequences of unknown bacteria
aatacttctttccttccattccttccatagttatttcctctctttctttccatagaatggcttgatgccgttatatcacatatcatggtctataaaccggacttttggcgtaattaggcatagaattttggcacctattggcacctagtttttgtgtacattgtaacgttgacttattagaacatgggttctattatgtatttactgcatcagaaaaatagaagggaattttgtgaaatgaatgagaaaacgaatgaacgaattgcattggaggctgaggcagaaatgcttatcgccaaactaagcgatacacagattgcggagctgctcaagagtatccgttcacatccaaaataaaaaatagcatttctttttgctttgtacaaaacaggtgaatgcccagcgcggcattaaagcctgttgcagcaaacacgctgaaacgctcgaccacgccgaaatactcggcagggacgattttcatacccattgcgcccacaagcatcatggccaatgcgacagcggcgcagacaccataggaacgacagtttttgctcttggctcctgcgacggtgatcatggtcagcgatacgatggacagcagtaccaccaaagcggttgtgacaatgtgcatcacatcctgaaaggccccggcatagccgctgctactgagcgggaacatccgatacccgactgccgagatccattccatgatggcgaacagataaatgcccgaacggagcagcttggttttctgtccttggatgccgatacagacgacggtcgcgcaaacgacctcgcacgcattgtaaagggcgctgagctgattccagagtgccagcgatggcgcattggcggcactcaggtcgctgacggcctgtgccatccagtgatagccgggataggccagcggcgcaaacacgaccgccgccgtgtacgaaagaaagctgacaacgcccagcagcccaagcttttgtatcaaagatttcttcatgttttttctcctaaaaaagatgcagtgcataaccacagaaattgcgatcagcactgcgtcttagcgtctggcttctttcgtctcaatcgtgaaattctttgcgttgatgatgctttcgtgtctgcactttgggcagaacaaagggaagtctttcaactcagtttcccgaaatatttgcagccgcgttttcgagccgcaccaagggcataaaacccaatgttttttctcttcaaggtcctttatatcgtctccctgtcctttctgcaacaggattcaaccttggcaatgaactgcccaatatgtgcatccagcaaaggcgcaacggaatctttatcctgcgcaccgtcgtagacgctgtagaggaggtacattggcccatagaattccagcgccagctgcatggcggcttcgtcagtatctgtcagcttacgaaaaattgcggccatgtactccagaggcccgcccgccaggtagtcgtgatggagctgcgccagcttgggatcgcggtattgctccagtgtcagcatcttacggaaatttgatgaaaatgattccttcgtccaatggtcaaactgtgccatgctgtatgcgcggatcttctgcaccggcgtgtgcaggtaggcctccgcaaagccgtccggctccgtctccggcatttcgtagctttccgcgcgttcatagtccatctcattcatgcgttctacaatccggtccaaaatctcctgtttgctggtatagtgcttatataaggcggcttttgtgaatcccaactgccccgcaatatcattcatagatgtcccaaggtagccattctgcgcaaacaattccagagccgtttctaaaattcgttctttcgtatctccagccataatatcctcctcgataagtaaccgatcggtaacttctattatagttaccgagtggttacttgtcaagaggtaaaaataatttttctccgaggctactcgcctgtttcaataaactcgatcttaagcagctcacgaaaacgcatattccagacctccttatttatcacgattcgaccgaaaaacaataatatgataagaatttcaaacttttgataggcaaaaaaatgttatggctgatttaacggttgcgtataattgccgatatcggcgaaaacaaagtactcttccatcatgtgatattgatattttgccgataatgtgctatactatccctgtgcagaaagtgagggatctctatgaaatatatttctgtcgcggaagcggcgaaaaggtggggcgtttccgaacgcagcgtgcgcgggtattgcgccgaaggaaaaatcgacggtgcatttctgaccggcaagacatggaacatacccgaaaccgcagagaagcccgatcgcattaacaagaaaaccgatacaccaaagacacttcttgaggtgctgaaggccgagaaagcagcgaagctgcacggcggtatttatcataaaatccaaatcgatctgacctataactccaaccacattgagggcagttgccttacccacgatcagacgcgctatatctttgagacgaacaccatcggcgcatcggacgggacgatcaaagttgacgatgtggtcgagaccgccaatcatttcaagtgcattgatatgatgatcgatagcgcaaatcatatgctgagcgaggcgttcatcaagcagctgcacgccgttctgaaaagtggaacttccgattcccgcctcgattggtttgccgtcggggtttacaagagactgcccaacgaggtcggcggcatggacacaactgcgcccgagaatgacggcttggagatgaagaagctgcttgccgagtacaacgcgatcaagcgcaagacctttgacgatttgcttgactttcactaccgctttgagcgcatccatccgttccaggacggcaacggcagagtcgggcgcctgctccttttcaaagaatgcctgcggaacaacattgtgccgtttatcatcgaggacgacatcaagatgttctactaccgcggcttgaaggagtggcagaatgagcgcggctatctgcgtgatacttgtctagctgcacaggacagatttaagaagtatttggactatttccgagtcccgtatgacaaataagcagatccgcccctgtgcgatacagaggcggattgctttttcgtaataaacccgtgcgtctatgccgtaaaaatgtaggattttcaacgtgtttttgcgtgttgctcacgcttccgtatcacgcttctggaccaggttgcgtgttcttaccgtattggaaaggctgtaagaacactcgctttttatacagcgagttcacagggggcgtagttaacgactacgccttttcttgtatgttcagttccttttccttcagcttgcggtctgtctgtacagcttgctgggaatgaccgatcaccgcttttacaaattcgtccgcatagaggctggcgaatttcgttaagcgtcatatctctcccagcgccacttcctccagaaagtccacacagacataatggatagaggtacaggtgccgcgattgcccttgtagttggagcagttgaaatactcgatctccggattgccctgattgaagtgaaagtgaacattctcgttcaaatccggaaagaagcgcacgctgaaagaagtgttgatgctatgccaagtttctgacagtacttataaaaggacttgaacatcatgtctaggcactgcctctttctgatgctaccatgctgcagatcgttattccaaaggtatcctaccgcggtcaaatgtgccaatcacggaaaaaagattgcgagtagaaaagcaggcggggggagcatttcttctctactgccggtttaaaacgtttgcggcccggtcagggtagtcggtgatcagcgcgtcggcgccgatgctggcgaggtaggccatgtccttttcagaattgacagtccagtactggatggcaagatcgtgggcatgcgcgtagttgatgattttgaccaggcccagattgatgccgtagctctcctttgcgtcgttaaacggcagctggagcacatcataggagcaggtgaagtcctgcttgcccgtcagcgcggccagatagaactgcaggacctcgtccgggctggcgctgcggtgggtgtcggggtagtgcgccgtgatataatccgcgacttcgtcccggaagctgccgatgatgacccggtccagcaggtcccgcgcctgcagtgttttgtacagctggtctgccgcggcaagaccgacgtcgccgccctccttgatctcgatgatatagcgatagtccccggctgcggtcagatagtccagtacctcatccagcgagagaattttcagctcctccggcaccgcgtcgccgtggaggtcggcgtaaggcatctcgcccgcatcattgacaaactgcgccgccatattcagctgcttgagttccgccagcgtcttatcccgaactaggatattctccgcgccgaaaacgctgaccgcgtccgagacccgatccagcgtgtcgtcgtgggagagaaccagaatgttgtccgccgtcatatgtagatcaaattcaaagtagtcgacctgccgcaccggattctccacgcagccccggaaggcggccagcgtttcctccgggaaatcgcccgcgccgctgcggtgcgccgagatcgcagctgtgccagtgataaacgggttgtttgtatcgtactgcttgcggtttttcgggtcagagcgatgataaaactgcgccacgccggcaatggcgatggcggccacgatgcagagcagaacgagcaggcaccgacctagaactttttttgatttcacggtaattctcctatcttgctatacattacagttggataaacaatgggataccactgcaatccatcttccgtataccagtataccatagtgccggtggatttgtcatgtatgaaaagtcggtgtgggtgcgtttttatgaaaacccacctgtgccgcaggaagcagcagtagagcttgccgcgttaagaaaaaataaaaaaaggagacagaaaaatttttcaaaacccaggggcttgatttttggggcctgctgtgctaaaacgtagtgtgaaaaaagtttagcgagacctgtcgaaaggatggtgaacaggtggaatatgtgattggtgggctcgtcgggctggcgtttggcagtctggcggcatttttgagcagccgattgacaaagctgtacctgaaaaagcaggcggaggcccgggaaaagaatacggcagcaggcgaaaatggaacgcccggcagttatttggcggtatccttgggtcgtcagggcattgcaattctggcattggcgctgatcttactgctgcgcaaccagatgccgtggccgtttaccagtgtgatcattggcgcggcgatcggtctgacgggcgtttctgtggtgctgtcgtatcgcgttgcgaagcaatttgaagaataatcagcgcggcgcgggcaaatagcccgtgcggcgaaattccagatagggggtgcaggcggagcatgcacgattctgttgtttttaaaatctttggtctggaggtcaccaacgtcattgtcgccagctgggtgatcatgctgctgttggtcgtcttttccatcctcgccacgcgaaagatgaaggatgtccccggggtgctgcagaatatcgcggaatgggcggtagaggcgctgcagaatttcttcggcgggatcctgggccagtggcgaatgcggcgctatttcccggcattggcgacattctttatttttattgtcatttccaactactcgggcctgcttcccggtatcggccatttcaaaggctatgccacgccgacggcgaacctctctgtcacagcggccctcagcctgtgtgcatttgtgatgatccacggcttgggcttcaaggagcggggcgtgggcaattatctcaagagcttcctcaagccgtttgcggtgctcctgccgctgacgctgatcgagcagatcgtgcgcccggtctccctggcgctgcgactgtatggtaacctgtacggtgaggagcaggtcggcgagcagttggcggaggtatttccgctgatattgccgctgctgatcaaagtgttgagcttgatcttctgcctggtgcaggccatggtatttacgatgctgctggctattttcctggcagaatccacagaaggggcagaggaacgtctgccgcagcatggataacagataaaaacagaacgaatatttaggaggaatttactatgggttcgggtttgatcgcgctgggcgcagcattggcaattgcattgagtaccatcgggccgggcatcggtcagggcatcgcatcgggtaaggcactggaggctatggcccgccagccggagatgtacggcaagattcagacgaatatgatcttggcgatggcgctgatggaagcgctggcaatttatggcctgctgatttcctttatgctggtcgcaaagatctgattgggtaagaagcggggcggaacgtatgagtattaacctctcagaggtcatcttgaccgttgtgaattttatcgtgctgatgcttttgctcaatcagttcctgtataagccggtcgtcaagtttatggatgagcgaaaggcgcgcatccaggctgggctcgacgcccaagcggaggccgagcaggcgctggaaaattgccagcagtcgctgcaggcggagctgacggagacgcatcagcagtccaagcagttggagtcttccatccggcgcgaggcgcatggcaagtgcgatgccctcctggaggacgcggcgaagcgggcccaggcgcagaagcaggatgtcgcggcgcagatgctgcacgaagagcaggtgcaatacgccgtgctccatgcccagctgccgcagctggtggaggcgctggccgggcatctgctgcaggacgaggcagcggcgcagcgcaacgctgcagagattacagcctgcgtcgaagcggccgggcagacggtttaagcggaccgtttttcaagaataaaacgcgtgccgccgcggcggtacggatgctgaagttaccttatttgctggaaagaaaggagggaggtaaatgacgctcaaggaatttatctttgctctgatcaactttttgatcctggtgtttgcgctgtataagatcgggcgcaagatggttgtcaagatttttgcgacccggcgggataagattcgagattctttggaaaaatctgagcaggcaaaggaaaatgccaagcagatcgcgcagaaaatggagacctcccgggaagaaaacacgcggcagtgtgagcagttgactgccgatgcgcagaaagcggggcgggagcgagcggacgcgatcctgcggaacggcgaagccagcgcccagcagaccctgcaggaggtcggcgaactggagcaccagctgcgcgacgagatgcagtcgaagctggcccgccagacggttacccaggtggcagcgctgacgggacaggcgttgcggtccccggcctttgacccgtatcgggcaaagctggtcgatcaggatttaacagcgctccggaaatcgctgcgggcttaccccagtgaccgtctgcgtctgcagactcagggtctgctccaggccagcgtctggtcagcggagccgttgcgggcagaggagcgcgacagcctgcgccagatgctgcaggagacatttgcggagaacgggcggcagtaccgcatccaactgcagacagagatcgatcctgcccagatcgcgggcctgtgcctgcaggtgggcgatacagtttatgacggaacgatccgccaccagctggagctgctgacggagaatatcccgccagtggatagcgccaagggcgaacttctccatagcattacagaaattctgcagcaggcggactgcaatctggatatttaccaggtcggtaccgtcacccaggtttatgacggcatctgccgtatctctggcttggcggattgtatggcgggcgagatgctcaaattccataacgggatcatcggtatggtgcaggatctggagccggacaatgtcggctgcgtcctgctgggcaattactcccgcattcagaagggcgacgcagtgcgccggacgggccacgtcatgagcgtgccggtgggcgatgcgctcattggccgtgtcgtcaatgcactgggcgaaccggtggacggtcagggtgtcattcacaccagccagacccgtccaatcgagagccctgcccccagcgtgctggaccggcagtcggtctcggtcccgctgcagaccggcctcaaggccgtcgatgccctggtccccatcggccgcgggcagcgtgagctgatcattggcgaccggcagaccggtaagacggccattgccctggataccattatcaaccagaagggcaaggatgtcatttgtatttatgtcgccatcgggcagaaggaatctacggtggcgggtgttgtcaagaagctgcgccagaccggcgcaatggagtattccatcgtcgtctgcgcccatgcttcggaagctgcgccgatgctctatatcgcgccgtacgccggcgctgctatggcagagtattttatgtatcagggccgcgatgtgctgatcgtttacgacgatctatccaagcaggcagtggcctaccgtgagatttctctgattttgcagcggccgcccggacgcgaggcatacccaggcgacgtgttctatctccactcccgcctattggagcgggcagcgcgtctaagcaaggaagccggtggcggcagcatcaccgcactgccgatcatcgagacgcaggcgggcgatatctccgcctatatcccgaccaacgttatttccatcaccgacggtcagatcttcctggagacggacctgttccactccggtgtgcgtccagccatcaatgttggcttgtctgtctcccgtgtcggcggcgcggcccagctgggcgcgatgaagcagacggcgggccagctgcgtatggacctggctcagtaccgcgagctggcgtcctttgcccagtttggctctgacctggaccaggcgacccgcaagaccctgcatcgcggcgagcggatgacagagatcctgaagcagaagcaatatcagccgatgtctgcgacggatcagatcattattatttttgccgcgagccacggctattgtgacgacatcgaagtggtggacattgcccgctttgagacggaactgatcgcctacgtacacaagaacgacccggaactgaccgacgtggtctgctccggtaaaaagctggatgaggcggcaatcacgcgcctatcccagacgattgaagcattcaaaaagctgttttaagaaataatcccagccaaaggaggtggatggcatggcaaatatccgtgggctgcgcagccgcatcaagggcattaccagcacgcagcagatcaccaaggccatgaagatggtcgccgtcgccaagctgcgtcggacgcaggccgcaatgaatgccatgcgccccttcagcgcccagtgcggccaagtaatgcatacgctgtgcagcagcggcatggaactgacccatcctttgctgacaccgcgggcaaagccgaagcgggtgacgtatgttgtcgtcgtcggcaatcggggcctgtgcggcgcgtataacctgaatctgctgcgctattttgagcagcgggctgcggcgcagagcgtgccgtatgatgtcatcgtcgtcgggcgctggcagacggatgcactgctgcatctaccgctggtgcggacgtttgataccttcagtgatacgccctctccccaggaatgcaatgaaattttagaggtgtgtcgggcgcggttccttgcaggcgagacagatgcggtctatcttgtctaccagcgctttgtcaacgcgctgacccaggagccgacggagctgcagctgctgcccatcgcggcgccgtcgcagaaaaaggcggcgg

SEQ ID NO: 444 - DNA, 5860 bp, Unknown
  16S sequences of unknown bacteria
gacataagcatcccccctcacccgccgcttagtgctccgcgcacttgaagcgggggaatgcttatctgcgttcaaatgtttgcagaattgcgggagctgcttcgcagcgaagcgattcgcaggcatcagttagcacaaaaaaggccccacactgccaatgcagtacgaagcctcttgattttctgttatttatcctgaatacagaaaaagctaatctaaatactgctcctgaatctgcagcagatcctctggtgactttgcctttacaagtgcctttacaacatcctcattcatcagcattttcgaaagcttcatcaaattctgtaaatgctgatccggattgcaggaagccagcgtaaaaaacagctgtgcatccttctccgggtcattctcatcaaagctgaccggcttctcgagcttcatgaatccgattgcggtcctgttgactccggctgtaccctcctgagaatgcggcattgccacattcggcatgacgacaatatacggaccgtgtttttccacacaggcaatgatgtcctccttataattcgcctccacagtgccatctgcctcaaggctctcacagctcatacggatggcatccttccagtccttcgcttcctcggcaaatttataatgcttctgctctacgaatgtgcgtaacataatttttcctccgccattttatcttccttttcttttaacagtaaccgaagcaggcaagtccccttttttatgccaccgtatacgcacacagcagccggaaggtattctccgccccgatccggtgggagcgctcatatccgtgtgacgcatatacgcccggcccgatcagtccgtgccggatatcatagccagccttcaatgctgcatccacatcagagccatagtgcggataaatatcgaccgcaaacccgatactctgttcctttgccagctctaccatacggctgaccacctgataatcatacggccccattgagtccttcgcacaaatcgacaccattgtctcatcgcaaccaagtccttctccgacgcagcccatgtctaccgagatcatctcttcgacattttccggaatcgaagctgctccgccgtggccgacctcctcataagatgtgatcaggatatagacctggcgctttggctgcacctgctcctccttcagatactttgcataaccgagcagtatgcaggtactcagcttatcatccagaaagcggctcttgatgtacccgtttttggtcacgaccgtacgcggatcaaagcagacaaaatcacctgccatgatgccaagctttccgacatcctccgccgagtgcaccggctcatcaagcagtgcttccatcgtatcataggtgcgcttcgtatcactgtagtctccatttacatgaatggatgcatccgtcaactgaaaggtagcatcgtagcatttaccatcacgtgtatagaccttgcagttttccgcctctgtattgttcgggttcagtcctccgacatttgtcagcttcaatcggccattactcttgatctgcgctaccatcgcaccaagtgtatccatatgcgccgcaagcagcaggccatgctccgtatcctttccgccgaggtcgcagagtaccgcaccctttctcgtcagcaccggctcatatcccataccttccagctctttcttcacaaaattcgccgccatatgtgtaaagccggtcggactcgggatcgcaagaagctttttcgcagtgtcaataatatagtctgtgtatttttccatctgattattcctccacataaagaatggcagctcatcgccgccattctatcgtatcatgtatgtggttgttttgcaacttgcttcactcgtgaataatgaatcactccaccgtctgcgttcctccgaccggtgcattcaatatctgcataaactcctcgccggtaatcgtttccttctcataaagaaacttcgccagctcatgtagcttcggcatattatcagaaagaagcttttctgcctttgcatactcacgcttcacgagctcgacaaccatttcatcaatgtccgctgctgtctctcccgcacatgccagtgaagtgtcaccacccatgtactgattcgtcaccgtctccagcgccaccataccgaacttctcgctcataccgtaacgggtaatcataccgcgcgccagctttgtcgcctgctcaatatcattcgacgctccggttgtgatggaatggaatacaagatcctccgccacacggccaccggtaaacgtcgcgatcttattctccagctcctccttgctcagaaggtttcgctcctgctcatcgacctgcatcgtataaccgagcgcaccggaggtacgcggaatgatcgtgatcttcgtaaccggagctgaatgtgtctgcagtgcagccaccagtgcatgcccgatctcatggtaggaaacgatcaaccgctctttgtctgaaagcaccttatttttcttctggtatccggcaatgacgacctcaatgctctcctcgaggtctgcctgcgtcacgtatttccgtccactgcggactgcccggagcgctgcctcatttaccatattcgccagctctgctccggatgcaccggatgccgcacgtgcgatcgcattaaaatcaatatcatccccgaggcggatcttcttcgcatgcaccttcaggatcgcctctcttccctgcagatccggcagctctaccggaattctgcggtcaaaacgtcccgggcgaagcaacgccggatcaagcgtctccggacggttcgtcgccgcaaggatcacgacaccctttgaaccgtcaaaaccatccatctccgtcagcagctgattcagtgtctgctcccgctcatcatttccggtcataccctgcgtgtcacgtttcttaccgatcgtatcgatctcatcaataaatacgatacacggagctttttcatttgcctgcttgaacagatcacgcaccttggccgcacccataccgacgaacatttccacgaattccgatccagaaatcgagaaaaacggtacatttgcctcaccggctaccgcctttgccaggagcgtcttaccggttccaggagggccaacaagcaacgcaccctttggcatcttcgcaccgatctcctggtacttctgcggagaatgcagaaagtcaacaatctcctgcagggcgtctttcgcctcatcctcaccagccacatcgctgaatttgattccggtctcgctcgccacatagaccttcgcattgctcttgccaaatgacatcgcattgcccatgcctgcgccgcccatttttttcatcagcgaccgtgacagcagctgtccgatcacagcaaagatcacgagtggaacgacaaaggaaagaatcatgctcagaaacggatccatctcctgctgcttgacctgaccaaactcacagccggccgcctgcagcctgtctacaagattcacatcctcaaaggtattcgtgctgtaaagctgattatccttatcttcgaaataaatctcatctccggagagctctacctttgacacctttttgtcgcttagcattgtcaaaaatgtaccgtaatccacctctgtcacatgctgctctaccagcttcgggaacagaaacagattcagcagcacgatgactgccagcacaatgagataatagacaaacaatggttttttcggcttgtctaccttttgcataacatcacacctttccctttttattcttattccggctattacatgtgagcctcatacacatgatcaccctccaactgcactgcgtttcctgcaaatgcaatttaaccttttttatcttaccgcattttcggctaaaatcaaagaaaaaaaggaggaaaattctaaaataaatgtaaacctcttaccagctccgatactgctattcatcatatcaaaaatccgccttctcccatagctccattctactatgaaagaaagcggaacgcaattccctactttttccggaataccagaaacttactcagtatataatttgccaccgtgaccagcacctgcacgatcagctttgccaccttatcattccatcccatcagtgtcaccatcaggaacatacaaaacatatccagcagcagcgtcgtcactcgcgatccataaaacgccgccgcttcctgcagccgtttctcattcttactctcaaacacatacttccggttcgtaaaatacgcaaacgtcaccgccgcgatccaagacagcacattcgccgcctgcagctgcaccggtacctccgggttcaggaatgtcagtacacagccataataaacaccaaggctgacgaccgtggtgaggccgccgacgatgaggtagttgatgagttccttgtatttttggtatagcgttttaattgtattcactcatttgctcctactgtgctccggcaagcgcctccgcaaactccagacgcactgccgcaccattttcatagattactttatacaaataaccatccgcaacatctccacaatccagaacgagcggaagctcacgtgtcaggtatggattcgttgtgtgtacccagacatacgtatatcccccctgcgccagtaatgccggaaaatctgtgatcgacagatcaaactcttccagacgaatattgcagccggtatttgtaaacttccatggcgattgcagataattgctgatccttacatccagatagtagagtgccgaagcattatacagttccgccccagccagatcatctgccggatactgacacagataatataccttatccgcttccgtcataatctcttccagacgattaatttcttccttcgtcgtatgaagcttctcatagcccgccgtattcactttatccagcgctgtattattcggtataaatttttcattcagtcctgaagcaaaaaatgcaagcataccaagcagcagatactcccatatttttttccgctccggggattttcgctgcaacaaattcgtcaataccagcacaaacagaaaaatcgcaaatccggaaaagtaccttgtgcaggagcgcatgttaatactcaactcataggcaaacataaacagataggagaaaaataccgctgcgcaatagcataaggtcgatacgatcccatatgaaatatataccaggctcttgtccctttgatgatacagttctccactaatcctgaataaaatcagtatcacaaatgcaaacggcaggaatgcaatcgtaagatttgactttgttgccatcgtcgcacctatgctctttgtaaaaaatgcccctgtcgtaagggttaccttcgaccgtgaaagctttacagtgttcagcatattcgaaaccccatccggaagctgtacaccagcaagttcccactgctgcggttcttctgccacctgagcctcatctgtttcagcagcagccgttgtttcaaccggatgaagtcccagcgcaatcccaaacagtcctacactgccaagcaacaccagtccaaccagcaccgccgtaatttttactacaaactttcttcctctttcttttgcggcaacgcccttttctacaaggaatgactgcgacagcataaacattcccaccagaaccgccatcagcagcccggctgacgctttgaaaaaatgaagcataatcattcctgacaccacaatcagtgcattctgcttctttttcttccgattgacccaccacccggctaatccgcctgcccacgctgccgtcggaacatcgacatacagacttttcacgccataggtgtacagagaaaacagtgctatatatacgagcacaatataaaatacaacctttttccagtccttccaggtatactctgaaaacggaagta

SEQ ID NO: 445 - DNA, 8280 bp, Unknown
  16S sequences of unknown bacteria
gcgctggccttggtgcttctggaaaacgggcatgaagttacgctctggtctttttctgaaaaggaagcggagattttgcgtacgcagcgggaaaacccgctgctcaagggtgttgccctgcctgcggcgctgaaaatctgcacagagattgcctgtgtggcggagaaagagctggtggtgtttgcaacaccttcttttgctgtgcgtgaaacggctcaaaaagccgcgccttatctgggggacggtacgctggttgtttcggtatccaaaggtattgaaaaagggacgtctttgcggttgagccagatcatagacgaagaaacaaagggacgctgccgtattgtcgcgctgtctggtccttcccatgccgaggaggtagggcggcatgtgccgacgggctgtgtggctgcatcgctggatcgagaagcggcagaaatggtgcaggatgctttcatgaatgaacgctttcgtatttattccagcccggatattgtgggggtggaactggcggcggcgctgaaaaatgtgattgctttgtgttacggtgtgtgtgacggtttggggtatggcgacaatacccgcgcattgctaatgacgcgggggctgacggaaacggcgcgcttgggcgtggccatgggcggcaaaaaggaaacctttgcgggcttggccggcgtgggcgatttgatcgtcacttgcacgtctatgcattcacgtaaccatagggcgggtattctcatcggtcagggcaaaagtgtggaagaggcgctcaaggaagtgggcgctgtggtggaggggtactatgccaccgacacggtacgcactctggcggggaaatacggcattgaaatgccgatttcagaaggtgcctatcaggttttgtacaacgaccgtcacgcaaaggatgtcttgatggaactgatgtgccgcgataaaaagcacgagattgaggatgcaagctggtaacaaacgaaacggccaaagccatattttatatggctttggccgtttttatagatgcagaaaaaagaaggggagctgtttctggtgggggcttccgtttttgttttgcgtgttagttttttgtgatatatccttctgcgcacagcagttccgccagaagtacgccgccgccggccgcaccgcgcaaagtgttgtggctgagtccgacgaatttgtagtcatactgcgtatcagggcgcagacgacccagagaaatggccatgccgccctccagattacgatccaagcgggtttgggggcggttcggctcttcaaaatagtgcaggaactgtttgggtgccgaggggagcgccaattcctgcgcgcggccagcataggcggcccagtctgctttaatctgctccacggaaggcgtacagccctccttaaacttcaggaatacagcggccatatgaccatcctgacaagcaacgcggaagcattgtgcggtgatggaaagatcctctgcgggcacaatttttccgtcagccacacggccgaacactttcaacggttcttgctcgctcttttcctcttcgccgccgatataggggatacagttatccaccatttcgggccagcgctcaaatgtttttccggcgccggaaatggcctgataggtgcataccagcaccttctccacgccgtacttcagcaggggagccagagcgggaacatagctttgaatcgagcagttggacttcactgcgataaagccttttttcgttcccagccgttgtctctgcgcggcgataacgctgatgtggtttgcgttgatttccggtaccaccatcggcacatcctcggtccagcggtgggcgctgttattggacaccacggggacttccagtttggcgtaccgttcctccagggcacggatctcatctttttccatgttcacggcgcagaaaacaaaatccacctgatcggccagtgtttctgcgtcttttacagcgtccagcaccacgagggccttggcctgttcgggaatttctgtttccatggcccagcggccggctacggcctcttcgtacgtttttccggcgcttccggaactggcggctacggcggtcagttcgaaccaggggtgctggtccagaagcgtaacgaagcgctggcctaccatgccggtgccgccgataattcctacgcgatatttttccatgctgtattcctcccataaaagtcgtcagagaaccgtcctgctgcaagaaaagagtagaaattgggttgaaaaacgtccctgattctaatataataaaaaaagttatgcggctcctgcgggaaaattccgcaaattttcctcatggtagcatatttcaggaatgctgtcaattttcagtccacatatggaggacaatatgaagaaaacgatcttttcactctttcttttttttctgtgcctgcctatttttacgcaaattgtctgggcagaacagcgggataccctgcgggtcggcctgtattacagcggttccggaagcaatggggccttgttgtcggcaaatttggaaaattacgaaaacactggaaaaggctactatttcggatattatgatgacgcacgagattttgttctattgggcactacgtccgagacacagatttccatgtctcaggatatcaatctgaccatcaacagtgatgggaattattctgccggcgccagcagcgacggtgtcggatgctaccatctgcagctgaataaaacctatgcctcttacgatctggcctctgcggcagcggccgggctgctggggacgtatggtacggcgttcccggcctatgacaatggccggtttgttgtccgtatggggaactatacttcgcagtcagaagcggaagatggactttccaggactggtgcagacgcttcggttaccagtgggacaagttataccgtaacggtgacaaaaaccggcaccaatcagattttgtttgaatatgacgacagcggcaacacttatctggcggtagagccgcggcccgtgggcagcgcaaaaccgcagacctggttcaagggataccgatattacgggggatttgaatatgaccgatcttcggtcttgtccggcggaaagatcaacgtaatcaatgtggtggatctggaagattacaccaaatgtgtgattacctttgaaatgagtccgtcctggccagcggaggcattgaaggcccagtccatctgtgcccgtacatacgcgctgaatcaaactaagcacaagagccgtaattttgacgtttgttccacaaccaactgccaggtataccgcggcgcatcggcctgccaaaatgcttcggatgcggctgtggatgcgacggctggtctggcgatgtactatgatggcaagatcatcgaggcggattattattcttccaacggcggcgcttctgaggattcggaaaatgtctggacgacagcattgccgtatctgcgcgggaaaaaagatccttatgaaagtactatcagcattcccggctacagctacgaaaagtcgtacagcgcagccgagttgaccaagctgttgcagagcaaaggccacagcatcggcacggtggcgtccgtacaagccagctatacgagaatgggcaatatctattcgatcaagtttacagatacatccggcaagtgcgtcacggtgcagaaagagagttgcaggctgctgttttctgtgccaagcatgcgctttacaatccattccggctctggaagtgcggtttcagcagagcctggcacttccggcggcggaacctattacatcaacggcgaagggagcgcagtttcttcccttgaaagcctatatacgatctccggcagtggaacggtatccaaatgcagcggggatccagtgtatgtgcgcactgcggatggaatatccgcgttggggggtggagaaaacgggaacagcgacatgacggtatcgggcagtacgtttgttatcaaaggcactggaaacggccataatgtgggcatgagccagtatggcgcttatgctatggcgaagcagggattgacgtatcgtgatatcctgacgttctactatacagggattaccattgaataaacagaacaggaagaaatacacagaatgaaaacccatgatttttattatgatttgccagaggaactgattgcgcaaacgccgctggaccggcgggatggatcgcggcttctggtattggataaagagaccggcgcccggaagcacatgcatttttatgagcttccacagttgcttcgtccgggcgattgtctggtaatgaacgattccagggttttgccggcacgcctgttgggtcgccgggagccgggtggcggcgcctgcgaagtgctgctgttggtggatcggggcgaaaagacttgggagtgccttgtgcggccaggcaaaaaaatgaaaaccggcgctaaacttatctttggcgatggaacgctgcgggcagaggttgtggaagagctgcccggcggcaaccggctggtgcgctttgactatgaagggattttcctggaagtgctggagcgcttgggcaaaatgccgcttccgccttatatcaaagcggaactgcaggacccggaacgatatcagaccgtgtattccaaagagatcggttccgcagctgcacccactgcggggcttcattttaccaaagaactgcttgatcaaatcgaatcgatgggtgtgaggctctgttatgttacgcttcatgtgggccttgggacatttcggcctgtaaaggaagatgacattacagagcatgaaatgcatagcgaattttgcatgatctcacaggaaacggcagatgtgatcaatgagacccgcaagcggggagggcgggtggtctgcgttggcaccacatcctgccgcactgttgagagctgggcggaggaagacggcacgctgaaagcctctgcaggctggacaaatatttatatttatcctggttaccggtttaaagtgctggattgcctgattaccaattttcacctgccggaatcgacattgatcatgttggtttctgcactggccggcagggaacatgtactggatgcttatcgggaggccgtggcgcttcaatatcgttttttcagctttggggacgcgatgtttattggatgaaacatccccgtttccttttattcgaaatacgggagagttgtttgtgtttgaagtaatcaagacggagggaaaagcccggcgcggcgtatttcagtgcgcccatggaacggtgcagaccccggtgttcatgaacgtcggtacgcaggctgccatcaaaggcggtgtttctgcactggatttgaaagaaattggctgtcagatcgaattatctaatacttaccatttgcatgtgcggcctggcgacgatactgtgcgcgcgctgggcggacttcataaatttatgcggtgggatggcccaattttgacggacagcggcggtttccaggtattttccctggccaagctgcggcaaatccgggaggaaggcgtgacatttgcctcgcatgtagacggccgcaggatttttatggggccggaggagagcatgcgcattcagagcaatcttggttcggatattgccatggcatttgacgaatgtgtggagaatccagcgcgctatgagtatgctaaagcttcggtggaacgcaccacacgctggctggagcgctgtattcaggagcaccagcggttgaatgccttgccggatactgtgaatccgcatcagcagctttttggtatcaatcaaggttgtacctataaagatctgcgcatccatcatatgcagcaaattgcgcggctggactgcgacggctatgccattggcggcttggcggtgggggagccaacggaggtcatgtatgagatcctggatgcggtggaaccttatgcgccttgggaaaaaccgcggtatctgatgggggtcggcacgccatcgaatatcatagaaggtgtggcacgtggtgtggacttttttgactgcgtgatgcctgcccgcaatgcgcggcacggaaaactatacacttggaaaggcgctatcaatctgaaaaatgaaaaatacaggttggacgaaagccctatcgatccagaatgtgactgcccggtgtgccgtgttttttccagagcgtatctgcgccacttaatgaaagcggaggaagtgttggcgctgcggctgtgcgtcattcacaatctgtatttttataacaagctgatgcagcgcatccgcgatgcgctggacgcaggagttttcgcacagttccgggcggagtacagcggcatgcttgataagcgtatctgacgggaaaactggaaaaagacttgaaatctgtaaaattattctgtatactatataccaatgcgttatgcagagaataatgaatgtgaccacaaaggagttttaaaaatgaatggagatatgacttataccctgattatgatcatcattctgatcgctgtgttctacttgtttatgatccgcccggagagtaagcgcaagaagcagcaggaggaaatgcgcagcaacttgcgcaagggcgatcagatcaccaccatcggcggcgtggtaggtcgtgttgtgaagattgaagacaataccatcatcattgaaaccagtgaggatcgcgtgcgcatggaatttgccaagtgggcggtttccactgtgggtgtacagaagagcatcgaagatacgaacaacaataaaaagaatcgcaaaaagcagacccctgaggagcgcgcagagtctttcagtctggaggataccgcttccgaagaggcgaataaggaataatttctgcccccttccgcatatgcttttcatgcagacggaagggggatttttcatggaaaagaagaagagttcggatcctgcggaattgctgtgtgctgcggcaaaagggcttattgttatggctctactgtttgctgcgggagtactggcttctgcagccttgatctaccgcggcgtgatcccaatggaatatgcgcgcattctgctctgggcgtccgttgctgcggctgccttcggcagtacggttttctgcgcgctgcggcagaaacggcccgtttttttgacaggagttcttgtgcaggggatattcttggcggtattggtgctgttggggatgctggcttgggagagtatgacggactggctggcgctggcagttgcgtttgtggcggcgctgggcgcagtgtttgctgcttctgtgctgtttgggaaaaagaaaaagaagaaatttcagaaaaatgcggcgatacgattgaaaagaaaatgatcttatgataaaatacttatacttatcgaagcaaggagggaaatttgatgaagcatattaagactttgaacggtgctactctgaaaaacagcgcggcaaagggtggctgcggcgaatgccagacctcctgccagtctgcctgcaagacctcctgcaccgttgccaaccagaagtgtgaaaataagcagtaaagctcattatttttgacaccgcaaggacggactgttggactgcctggttcgggcagccgaaaagtccgtcctttctactgcattgcgataccgacataccgaacaaaaggagaaatggacatggtacataccttttcgctgctgggacagaacattgctgtggacgtcaatagcggcgccgtacatattcttgatgaaatcacctatcatgtgctccggcaaatggaggaagctgcaacgcctctggataagattattgcagcgctcggacaatacagcccggagagtatttccgaaagctatggagagctgcaggaactggttgccaaaggggagctgtttgcgccagcggactatgtcgacccggcgatggccatgattaaaaatgcgccggtcaaagcgctgtgcctgcacgtttcccatgactgcaatttgcgctgcaaatattgttttgctgccaccggcgacttcggaaccggccgcctgctgatggatgtggagacggcaaaagctgccattgattttgtgatcgcccgttccggagcaagacgcaatatcgatgtggactttttcggcggcgaaccgctgatggcgatggatgtggtcagggaaacggtagcatatgcccgttcccgggaggcggaatgcggtaaatgcttccgctttaccatcacgaccaatggcgtgctcctggacgatgaaacgatcgagtacattaaccgtgaaatggacaactgtgtgctctcgctggacgggcgcagagaagtgaatgaccgtttccgcgtttcgcccaatgggaaagggagctatgatgtgatcgtgccc

SEQ ID NO: 446 - DNA, 32759 bp, Unknown
  16S sequences of unknown bacteria
gggcagtttgactggggcggtcgcctccaaaagagtaacggaggcgctcaaaggtcttctcagaatgattggaaaccattcaaagagtgtaaaggcaaaagaaggcttgactgcgaggtcgacggaccgagcaggtacgaaagtaggacttagtgatccggtggtaatacgtgggaatgccatcgctcaacggataaaagctaccctggggataacaggctgatctcccccaagagttcacatcgacggggaggtttggcacctcgatgtcggctcatcgcatcctggggctgaagtaggtcccaagggttgggctgttcgcccattaaagcggtacgcgagctgggttcagaacgtcgtgagacagttcggtccctatccgttgtgggcgtaggaaatttgagaggagctgtccttagtacgagaggaccgggatggacgaaccgctggtgtatctgttgcataccaaatgcacggcagagtagctaagttcggaacggataaacgctgaaggcatctaagcgtgaagccgccctcaagacgagatttcccattcgaaagaagtaagaccccttgaagactacgaggtagataggtcagaggtgtaagtgcggtaacgtattgagcttactgatactaataggtcgagggcttgaccgaaaggaagagatgtgttaatatagaaaggcttaaagaagttcatgtttagttttgaaggtgttaaaaagcactggaggatttccggtggcgatgcgcttgtgggaaacacccgtacccatgccgaacacgacggttaagacgcaagcggctgatgatacttggctggagacggcccgggaaagtaagtggctgccggaattaaataaataatcctcgatagctcagcggtagagcatccggctgttaaccggagggtcgttggttcgaatcctactcggggagcttttaaaaaaatatggcccgatggtcaagcggttaagacacggccctttcacggctgtaacccgggttcgattcccggtcgggtcatttattaaatgccgatgtggctcaattggcagagcagctgacttgtaatcagcaggttaacggttcgagtccgttcatcggcttatacttaaagtacatgggtctttagctcagttggttagagcatccggctcataaccggacggtcctgggttcgagtccccgaagacccactttaatttaatatggctcagtagctcagttggttagagcgccggcctgtcacgccggaggtcgagggttcgagccccttctgagtcgccatttgggagtttagctcagctgggagagcatctgccttacaagcagagggtcacaggttcgagccctgtaactcccattttttttgcccgttaaatgacgggcttttttattataagtaaagccgttgaaactatatgcaacggctttgcatttgctataattaaataattacccttttaagttctccttgaaatattctgataaaacatcaatactttcttctctgagaacaccgggagtaacttctatgtttgagtttttgaaaactattttacagcactctcttccttcttcccctagtaatttacataagtcaatatcactggcaccatacactaatcttcctagttttacccatatcattgctccacagcacataaaacatggttcacagctggaatacattgtgaattcgcttaaatccgtaatttgagtctctgcgcaaaatctacgtattaaacctgcttctgcatggaaagtcggatctgttgcggtatatatttgattctcatttgtataaacgatttcattatttttgacaagcaccgctccgaaaggttcgtttccatgttctacagcgctctttgccaattttatagcttctttcataaaatattcatcatttttcattataacttaatcctccgtttttctaataattttatcatataaacagttagattccaaacagtattaaagtgattttgaaacaataatatttgctttataatcattcctatgctattcttctaattagtaaaattacagttgaaaaatcgggtgataatatggcggctccattcagcagagtaagaagagacgagatagcggaagatttgaaaaaatacgcaattaaaaagttagctgaggttgaaatgaaaaaaatttctgttgacagtttagttgaatatgcaggaatttcaaaaggggcattttataaatttttcaaatcaaaagacgagttgtttttggaaatattagaggattggcatacattaatatacggagacgcgcttgaatgtattacggaagacaacggattatcggctaaaaataaagttgctaaggctattttgcagtcgtgtgtaacaatagacaaatattcgctaatgaagtttataagagatgatgttccgccgctgctagaaaatatagaaggtactgacttaatggaaaggtatcacagtgatgatgtccatataaaagaaattataaaattttcaggaataaaactgcttgtaactgaagaagaagctgtagcaattattaaaaatttggtttttacagtactgaatgcggaaatgaaaggttattggtatgcacagaaaataataataaacagtgtatgtgattatatagtaaaataataaattaaagcggatgagagaatttttcatccgctttaatattacagaagcaataatgtagctattttgaaatatattaaaagagaaatggcgtcgacaaccgttgttataagaggacctgccattatagccgggtcaaatccgattttttttgcaagcatagggagagtacagcctattccttttgctacaacgactattacagccatagttaatgatacggttaaatttaccgaaagagaaacgttatcgaaaatcagaagtcttacaaagtttacggctccgagcaaaagaccgcaaagcataccgacacggacttccttccataatactttgaggacgtctttcatttctatttcaccaagagccataccacgtataataagagttgacgcctgtgaacctgagttgcctccggtacctgtaagtattgtcatatatgcggataatgcaagtactgacgtaagcacatattggtaatggcttataatagatgcggaaatagttccggaaatcataagaaccataagccaaattatacggttttttgtaagtgtaaaaacgctagttttaagatattgatcttccgatggcaacaaagcggacattttttcaaagtcctcggtgttttcctgatcgataacgtccatgatgtcgtcaacggttatgattccgacaagacgggcttcattatcgacaacaggtaaactgatgaagttataatccttgaaaatttcagctacttcttcctgatcgtcaagggttttaacggaaattactctgtcttccataaggtcttttacgatttcatcatcttttgccagtatgagcgtcctgagaggaagtatacccattaatattcgcttgctgtttacaacataacagttataaatagtttctttgtttacgccggttgctttaagctgtgccattgcagcctgagctgtcatatcctcgtgaaactggacaaactctattgtcattatgcttccggcagaattatcgggatagtttaaaaactgattgattaatttccttttggattcatcggcgtttcttataacttttgttacaagattggcgggaagctccgaaaggaagtcaactgtatcgtcgataaacatttcgtcaacgatattacgtatttcgttatcgcttattgactttataatatgttcctgtaaatccgagtccatataactgaaagtttccgctgcgttatcttttgtaagcagacgaaagacaataagctttttgtcatcgggaagtatttcaaaaaatttagcggcgtcgaaagagttaagttcgttcaattccgcctttaaatcttttatttttccatcgtttaaaagatttataagctgttcatacagcatatctatatcatccaaattgcgcaccccaattctttgccaaattaaaaaagaccttacaagtttgttcggccgttgtcaaagatttattatatgcacaaaacttatgtctgattattattaaagtacagattttgttggcttataaacaaaaacggcctgattaaattatatatacacaaaggaacatcgtcttgatgaccggtaatgtccataaacccacctctttttatcagtatcatattaaaatacgagaccgatttttaaatactatattattagtatattcattttaaaagtttacgtcaaatatatttttgaattaaaaaagggcaggtttttgttcctgccccatagtagattatattttaaacacgtctgtcttgtctgttttttcccaaggaaggttaagatcgtttcttccgaaatgtccgtatgcggcaacctgcttgtatattggtcttctgagatcgaagtttttgattatcgcagccggtctgagatcaaagttgttttgaacgagtttggttatttcctcatctgatattttgcctgtaccgtatgtattaatgagtattgagacaggttttgcaacgcctattgcgtatgcaagctgaacctcgcattttttagctataccgctggcaacaatattttttgcaacataacgagctgcgtagcaagctgaacggtctacttttgtagggtcttttcccgaaaaagcgccgccgccgtggctggcgtatccgccgtatgtgtctacaatgatttttcttcctgtaagaccgctgtctccctgaggaccgccgattacaaatcttcccgtaggatttatataatattttgtttcatcggttaaaagttcggcaggaattactgctttaattacattttctattatatcttttcttatttgttcctgaatagcctctgggtcatgctgagttgatataactaccgtgtcgactgcaacgggtttatcgtcttcatacactactgtaacctgagattttccgtcaggtctgagatatggaagagtaccgttttttcttacttccgtaagtcttcttgtaagcttgtgcgcaagatgtatgggcatgggcataaagtcttcggtttcatcacatgcaaaaccgaacatcataccctggtcgccggcgcctgtatcaaattcgcttgtatcttcgcctgttttgtgttcaagagctttatcaacacccattgcaatgtcaggagattgaccatgtatagatgtaataacagagcatgtatcgcagtcaaagccgtactttgccctgtcatatccgatttctcttacagtatctcttacaactttttcgatatcaacgtaagcgtttgtcgttatttcacccattacaaatacaacgcctgttgttgttactgtttcgcatgcaactcgcgacatagggtctttgctgagaagttcatcaagtatagcgtctgaaatctgatcgcatattttatcgggatgtccttctgtaacagactcagatgtaaacaatcttcttgccataaattaacattcctttctgattttagaggtaaaagaaaaaagccccgcagggctttaattttttgctgaaccttatcttccgctgaaaacagcgggggaattggcaccgtgctttatgccggttgccgggtttcacagggccctgtccctctaccactcttgataagatattatataactattatgataatctattatacatgcaatattggtttttgtcattactcaaaacaaaatttttgtccgatatgaaaaattattttaaatcttcattgtttttcataagacgtttatagaaaaatcctgttgaataaagggctgcggcaggattgtgtacaagaactttatcctttacaatcatggttgtacacggaacttcggaatatttgtaaaatatggaatcgtgtccgacgcacaggccgagaactatattcaggtctgttttttcatcgtttaatatttttgcctgtagagcgggattgcatacgttttttcctgttttttcgcagtcttcataaagacctatggctgttttgggagtagttccggctttgcacgtaactccgaaaacttcaaaaccgtgtattcttaaaattcttgccaaagtattggcttcttttattaaagcggcgcagttggctatgccgagtttttttgctcccatttttcttgcgaacattattgtttcttcaactcttgtaagttttccgaagccttcatattcgacctcgccggcggcaattgcgagtttatgcgtctcggggtcgtcatagcatgacatagcttcggcatattgctcgggcgtgatatttaatgaaacgcagtaatcggggaattctcccgccattgtatgacagtttatgacgccgcagtcggcgcagcttttacaaaaatccattggtatctctccttatacatttataaagtaaaatcagtattaatattagcatacgattataatacggacaacatttatgcaaatttaattagaatagttttaaaatgaataaattatcttgaccggtctaaccaagtctgatataataaaccgctgtaagggagtagtcggcgcctaaggcgtgatgaagtcaacatactgaaatcaaaagatttctggctttgtattaaatgacgagacttgtctgtcagtggcggatagggcttgtctttatttttttccgctgctgttaataacaacggaggggaaaaattatgggctttactgaactgtttattttggctgtgggacttgccatggacgcttttgcggtgtctgtatgcaaaggtctttcattgggagagacaaaactgaaacattctgttaccgcaggactgtatttcggtgggtttcaggcaattatgcctctgataggatatatgttaggaattaggtttcagcatatgattcaaagggttgaccactggatagcgtttgtacttcttctgataataggcataaatatgataagagaagcaaaggagcaggaagaatgctcgtcttcaatgaagccgaaagatatgctgccgatggcggtagcaaccagcattgacgctttggcagtcggagttacatttgcttttctcggtgtaaacattgtatgggcagtaagtcttataggcgttataacatttatcctgtctgctgtcggcgtaaaagtcggcagtgtgttcgggttcaaatataaatcaaaggccgaaatactggggggagctgttttaattcttatgggaattaaaatacttcttgagcatttaggacttttggggtaaaattaaagactcttatatgagggagtaattccgcaccgtgagtgcgaggtagatcaacaccactggcgataaaagcctggtctatccataaagaatgagactcatatacaaacggcgtttgtatacgagtcttttttgttgggtatgttaatgatagtataggagggaaagtattttatgaaagagtatttatccgaaattaaacaggttctggaagaacagaacacaaaggaaaacggtctttcttcagaagaagccgccggaagactttcaaagttcggacctaacaagctggctgaaggaaaaaaggagtccataattcataaatttcttatggaattgaaagacccgatgataattatacttatcgcagcggcggtaatatcgggaatcacatcggcatattccggagaatccgcggcagatacagtcataattatggtagttgtaataatcaatgccgtactcggagttgttcaggaaagcaaggctgaaaaagccattgctgcgttacaggaaatagccgcggctacaagtaaggtactgagggacggaaaacaggttacggtaaaaagtgaggaacttgttcccggagatgttattgttcttgaagcaggagacgcagtacctgccgacgcacgtataatagagtgtgcgagcatgaaggtagaagaggctgctcttacgggagaatcggtacctgtaaataaacttatagatgtgcttaatctcggagcggaaaaagatatacctctcggagacagaaaaaatatggtttatatgggttccactgtagtttacggacgaggcaaagccgtaatatgcggaacaggtatgaatacggaaatgggtaaaatagcgacagcccttacagacgctaaggaagaggttactcctctccagaaaaagcttaatcagctcagtaaaatattgagtttcctcgttatcggaatatgtatcgccatatttgccatagatttgttcagatattatcctaacataaacggagaaactatacttgatacatttatggtagcagtcagccttgccgttgctgctataccggaaggacttgccgctgttgtaacgatagtgctttccataggcgtaacaaatatgtcaaagagaaacgccgttattagaaagcttacggctgttgaaactctcggatgtactcagataatatgttccgataaaacaggtacgttaacacagaataaaatgactgttgttgaacattccacagaagatgtaaaacttctttcaatgggaatggctctttcttccgatgcggaacttgacggaagcgaagcagtcggagaacctaccgaatgtgctcttgtaaacgacgcttttaaagaaggaatggctaagaatgagcttgtcaagaagtatccgagaataggcgaagctccttttgactcttcacgtaagatgatgagtacagtacacaaatcagacgacggaaagataatacagtttacaaagggagctcccgacgaagttcttaaacgttgtacaaaggcgcttataggcggaaaagaagttgaacttacttctgaaataagagaaaatattttgaaggcaaataaaggaatggcagataaagccctccgtgtactttgcggagctaaaagagactggaacagcgaaccggaaagctttgaaccggatttccttgaaaaagatctctgctatttaggactttcgggaatgattgacccgatacgtccggaagttaaggacgccattgtcgagtgtaaagaggcgggcataagacctgttatgataacaggagaccataaagatactgccgcagccatagctatgcaactcggaattataacgtctgcggaacaggcaataacaggcgcacagcttaacgaaatctcagatgaagaactcagcaagacaattcagaactattccgtatatgcaagggtacagccggagcataaagtgcgtatagtaaacgcttggcgttcgaagggttatatcacggcgatgacaggagacggagtaaatgacgcaccgtcaataaagagcgccgatataggcgtcggtatgggtattacaggcactgacgttacaaagaatgtagcagacatggtacttgcagacgataactttgctacaatagtatccgctgtagaggaaggaagacgtatttacgataacatacgtaaggcaatacagttcctgctttcatcaaacctggcggaagtgcttgcaatatttgcggctacaatactcggctttgttatactggagcctgcacaccttctttggataaaccttataacagactgtttccccgcaattgccctcggaatggagcagagtgagagagacataatgaagagagctcccagaagtgcgaacgacggaatttttgccggcggtatgggatttgatgttgctatgcagggtgttatcataacatgccttacaatggctgcatacttcataggacattttatggaagcaggcgtttgggaagccgtaaacagcgctgacggaacaacaatggcgttccttacactctctatggtagagatattccattcatttaatatgcgttcaagaagaggctccatattcagtatgcctcacagaaacaaatatctctggggcgcaatggtagtttcatttatctgcacaacagcggtaatttatgttcctttcctttcaaatgcattcggatttgaacatatatcaattgccgaatatgcggtagctatgggacttgcgttccttatcatacctattatggaaatcataaaggctatagaaagaaaaatcgaaagtaaaaaataactattatatgcccatgacgaaagtcatgggtatttttatattgataaaaatatgaaatttatataattgacatattaaataagctaatttatacttattttgtcttaaataagacaaatagaggtggatgatgaaagaacttgacaataaaaaacgcaataaatatattacgtcaatgggaaaaaatattcagtttataaaactggagaaagaaataaaggaacttattgtcggagacgagagagcggaatggcttaatttttccaaaaatgaaattatatatgggtatgacagctataaaaagagcctcggcataattttaaaaggaaaagtttcggtaagaaaggacagaacatctaatgttttgattaatacgttagggaacggagatattttcggaggagccgctctgtttagtaaatacgatagatttataggtactctaagggcagaaacagacagcgatatactttttattcccgaaaatcttatggaggaaataatagtaaaatcacctgaatcggcagtaagctatatcaaatatttatcggaatcactgatgtttttaaataacagacttgatgtatttactgccggaggcgcagaggagagaaccctcgaatatataaggaaaaacagtaggacagatgaaaacggaagaactgtggcggacgggatgagcatgacggaactttccgaatatcttgctgtcggaagagcgacgctgtatcgtatacttgatgaatttcaaagaaatggaataatacaaagggatggacgaaaaatatacatagaaaaggagatttagttatgaaaaaaacggcttcgttgatacttgctttggttttggcattttctgcttcgggatgttcggaaaagaaaacggaaatcggtaatgaacctgtgaacataacaatgcttaaaggacctacgggtataggcgcggttaagctgatggaggaaagtgaaaaaaatgaaacggacgggaactacaatataaatgtatccgcagcggcagatgacgccatggcaaagataataagcggcgaggtcgatattgccgcagtaccgacaaatatagctccgcttatatataataaaacaaacggaaatatagaggttttagctgtcaatacattgggcgtattgtatattgttgaaaacggagacagcatacacaccattgaggacttggagggaaaaaccatatattcttcgggacagggagcggttccggaatatgttcttaattatctgctggaaaaaaataatgttgaaaacgtaaacatagtatatatgacggaacatgcggaagttgcggcggcattggcagacggaagagccgatatagccttgcttcccgaaccgaatgtaacggcggttatgatgaaaaacagcgaaataagaatagcggtagatgtaaacgacgagtggaaaaaaactaacggaagcgaacttgccatgggttgcattgtggcaggaaaacaatttattgatgaaaataaagaagctgtggataaatttttaaaagaatacagtgaaagcatagattatgtaaataataatgttccggaggcagcggagcttgtagagaaatacggaataatggcttcttcggacgcagctgttaaggccataccgaactgtaatattgtatataaagaaaaagatgaaatgaaaactatgcttgaatcattttatgatttactttacaaagcaaatcctaaatcggtaggcggagaaattcccgatacggagttatactatgattaagaaaaaaagtataggtgtaattttattctggcttataatatggcagacggtatacattgtaataggcaatgacgtactatttgcctcgccttataataccgtatgcgagattataaagctgattttgagttcggaattttataaaataatattttgctcattttttagaattgccatcggattttttgctggaacggcagtcggaataattttgggaataataacaggagtcaatcaaacggcatacgatttgttcaaaccagccgttaatgttataaaggcggcgcctgtagcgtcttttataatacttgcgctggcatggcttaaatccggagaagtaccggtgtttatttcttttttgactgtaataccgataatatgggcaaatattacagagggcataaagaatgttgacgcaaaactattggaaatggcacaggtttataactttacacgggaaatgaaactgaaaaaaatatatattccctcgttgaagccgtatatgcgttcagcggtgagcacaggcgcagggtttgcctttaaaagcggaatagcggctgaggtaataggctcgcctgcattttccatagggagaaaactttacgagtctaaaatttaccttgaaacctcgcaactttttgcatggacggcaataattattgttttaagcattatttttgaaaaagtcctcggacgactgacggggaggtaaagtaatgaaatttgaaaacgtagttaaactttataacggaaaaaaagtattagacagcttaagctttgaagctgaaaaaggaaaaccggtatgtcttttcggggaaagcggttcgggaaaaacaactgccttgaacatagcggcaggactgtgcaaggcggacggcggaagtataacgggagccgaaggcagaatttcctatgtctttcaagaggacaggcttcttgaatggtttaccgcagaagaaaatataatgatgacggctgtaaatattcctgccgtaaaaaaaattattaatgttgcggaactggaggattgtctcaacatgtatcctttgcagatgagcggaggaatgaaaaagagaactgcaatagcgagggcggtaggatatgacggagatattatattgttggacgaaccttttaacggaatagacaataaaagagttgaggcaatagcggagtttatgaaagactttatcaaagataaaatatgtattgtagtaacgcataataagcacgaggcagatatactcggcgcaaaaataataaaaattatttaaaaatgataataattattattgactaatatttattatttggtacaatgtatttgggtgatataaatgaacaaaaaacaaatcgctgtatatgaaaaaagaggctatgataatgcttcttttgcaacaggatattctaaagaaaaagcagatttatgcgtaagaaaaatatatgaaacttacagaaaaaaactcaaagaagacgggtattacggatacggagaaagtttttccgctcctgagtcaatagaagacgatgaaaaaataaattatattgaccttataaaagatgtcgattttacggacagaaggagtatcttctttaaggagcttgacgcggaggaacttaatttcatggaaaaatacgtaatatacggaaaacatcttcttcaggcaggaaaaattgacgaaagatgcgtatatacaaaggaaacggatgcatataaggatctttgcgaaaatattgtaggtcagcaggagatgaaagagactctctgcaagctgggcgctgtgttctcatatacgcagaaaagaaagctttatgacctcaatactgccgacatacacaaggtttttgctttcataggacctccgggaactgcaaaaacaacatcggcaagatattttgcaagaatgatgagcgaagaaggcgttttaagcggacatagaattgcttatgttacgggtacccagttaaaagcaaaatatgttggacagactgcggcaaaagtacatgacattttcatggataatgatataataataattgacgaggcttattcgcttgtaaattataatgaaacatcaaggacagacagtttttctcaggaggcgttggctcagctttgtatcgaggttgaagaccacagttatgataagcttataatttttgccggatacggcggagacatagacgacaagcataacaaaatgaaaaaattccttgatgaaaatcccggaataagcagtcgtattacttttacggtcaacttttcttcctacagcgaagaggaaatgctggacatattcaaactgcttgcaagtaacgcaagttaccgcctagaggacggctggagggaaatacttcttcctttctttaaagaaagaataaaagctcctaacttcggtaacggacgagaggcaagaaggcttcttgaacattccatgtcaattgcagcgcagagctatatagaatgggagagaaaacctcatgattttgccagcgagggagaaaaagaaaaggcggaaatcgaacgtcttacaatgttgacctgtgaagaccttaaacaggctgttaaagaattcctttatgccgaaaaggttataagaggaagagagtaaacaaattagaggaggacgattatgaacgcttttacctattacatgccggccaaagttttattcggtaaagattgtgttatgaataataaagaggaattttgtgcgcttggcaaaaaggctcttatttttacgggaagacgctcggcaaaattgaacggttctttaaatgacgtaactgacgcgctcaatgccgtaggtataggatatgccgtatttgatgaggttgaggaaaatccctcgcttgagacgctcgaaaaagcggctaaactgggcatagcggaagaagcggattttgtaatcggtataggcggaggttctcccatggacgcagccaaaggcgcagcttatctgattgccaatccagaaatgagcgcagatatgcttatgaaggacggaacatacagacatattccaattgcggagattgccacaacagcgggaacgggaagtgaaactactcagtatgcggtgtttacactccataatcagggaacaaaaaacggcgccgttcagaaggcgtttgcagacgtttctttccttgacgcaaaatatacggaaagtctttcggataaagttaccgtgaatacggctatagacgcgcttacgcaccttatagagggatatacttccaaaaaggctaattttataagcgacagaatagcagaaggcggattgaaaatatttgcggaatgtatacctgccataaaagcattggattttaattacgaaataagagaaaaacttattcttatgtctactatggcaggaatggtaatcgcgcaggcaggaacatcgttgccccatgcatgtggatatatgcctacctatgaaaaaggcatacctcacggaagagcaaatgcaatatttacaagagcatatcttgagcttttccccgatcagacaaaaacaaatacaatattgcagatacttggatttgaagatcttgaggagtttaacaacttcctgaagtcggtgcttgaagagagagaagactttacagaagcagatgtagaaagatatacagacgcattaatggctaatcccggaaaactggcgcttcatccacatccccttacaagaggcgaagtatatgaaatgtataagaagagccttcttctttactgataaaattatatataagcagtaatataaaaagagcttttgttcaaaataattatgtgaacaaaggctcttttttgataaaatgtattttttaatttattgtactgaacatttttaacgatcggaatcctttttttgaataacttcattacctataaaggttaatcctacggcaatcgcaaagaagagtagagctgacgccgcaaatcgcataataaacagagtgaaatggtgttcagcctgccattcgttatcaaaggcatagaatgtgccgtctacatcgatgttgtattctttgtaagaagcggaaagatgcttttcggcggcatcgggaattgctactctttgaccgatgggaagagtaattttttttcctttttcaatcgcgtcgactgctgattggggaatttgagccggtatataagtatgatctggcagttccaaaagataatattgattataatttcccaaaatgtcaaaacctgacgtactgacctctgccctgcggcttccggtttttgttctgcctttatagacgtcggtattatagcgatctacccatggtttcagactgtaaactcctgtggggatgattccgacaggttcagctgtcatgtaatccgtatcgaagctcatttttgaaaaatcttctgctccgtcaaggcgaccgatatcattgcctgccaaagaacctgtaaagtcctccgtggggcttttgcttatatcattcattgtgattggcaattcatcgcgccgaagcagcatttcaggattccggtgaatgaaaagctgagaagcgcataccagagcaataagaacgcttactgtcggaacaacattttttattttcatgggcagagactcctttgctgtcaaatatcggataaaaagatttattatttgaatttatggatttttatttcagaataaagaaattcccgattatgttattgattatatcatggacatacacaaatgctcaacatattccacagcataggtactgtttttataaaatatgggtttatgataatttcttaacattattgtaatattattttatttgcgattgtttgaaatatatggtattcttttattatatgataacctagcggtaattttaatttttgtcggggaaaataaggctttgttgtcataatatttgcaaaatattaacagggaggtgagaaaggtgataaaaaagatattcaggtatgtaataacacttgttgtaatgactgtagctgtcggacttttatacgcactttataataacaatatatggggaatacaggaatacgtcgctgactatgccgttattctcttcggaatatttatcggaatcatttattttatattattttcagacgtggctgcggacgcaataatgaaacaagttggaatagctgaaggaaagcttgttaagatggagataaaggaacttataaccggagtctccggaatagttataggtcttattatagcgaaccttataggcgttgcgcttaacggatacggtatagtcggaacaggcataacggtaatactcaacataactttgggagtactcggttatagggttgcaacaagaaaaagagatgagcttgaaatgcctatgttcagcaaatcggcgcagacaaaggtttcggcaggaagaccgaaaattctcgatacaagcgtaatcatagacggaagaatacttgatttgcttcatacgggtttcatagaaggcaaaatagttattccgacctttgttctcgatgagcttaggcatattgcggattcttctgattctcttaaaagaaacagaggcagaagaggacttgatatacttaacgagatacaaaaacaattggatgttcctgtcataataaaagaatttaatacgaaagagaaaatagaagttgattccaagcttttaaagatggcggaaaagatggatgcatatgtcgttacaaacgattataatctgaataaggttgccgaagtacagggcgtaagggtgttgaacataaacgaacttgccaacgccgtaaagcctatgcttattcccggtgaggaaatgacggtaacgattataaaagcaggcaaggaaaacggtcagggtatagcctaccttaacgacggaacgatgatagttattgagggcggctccgaaagaataggagaaacacttcaggttgtagttacaagcgtattgcagacatctgcgggaagaatgatattcacaaaaataaaagagtgatagttatgtttaaagatgtaatgtgttcggcagttatagttgcggcaggggtcggaaaaagaatgggttccgacagaccgaagcagtttttaagcctgaacggaaaaacaattatagaacgtacagccgccgtattcggcggctgtaacgctgtagacgaaataatactagtatcgtctgaaaacggtatatcggaatgctattctcttttcagcgcatatgactggaataaaaaggtcaaatacgtttgcggaggaaaagaaagatataattcggtatacaacgggataaaagcggcggacaaaaacagcggtattattataatacatgacggtgtaagaccgtttgttacagaaaaaattataacggattccatcgaatgcgcattaaagcacggcgcatgcgctgtgggtgttccgtctaaagatacgataaaaatatgcgatgacagcggttttgtatcaagtacaccagaaaggaaatatgtatataatatacagactccgcagacgttccgaactgaaataatagcggacgcctataaagtggcttttgaaaaagaaattttcggaacggacgatgcttctttggctgaaaacgcaggatattcggttaaaattacagagggaagctatgataatataaaaattaccactccggatgatttgattgtcggagagaaaatactgaatgggggcggaaaatataaaaaagattgatatatataccgacggagcatgttcgggaaaccccggaagcggcggttacggcgttgtgctgctgtataacggagcgagaaaggaactttcggcagggtacagaaagacaacaaataacagaatggaagttttggctgttataaaggggctggaagcgcttaaggaaaaatgttccgttaatttgtacagcgattccaaatatgtggttgacgcggtaaataaaggctgggcaaaaaagtggagagcaaacggttggagaaaatcagacaaaagcaaagctctgaatgttgacctttgggaaagactgctgactctgctggaataccatgacgtaacttttatatgggttaaaggtcatgcggataatgcggaaaacgagagatgcgattttttggcgagaactgcgattgaaagcggaaatttggctgaggataaaaattatgaaatacagtgcggcaatatgtaaaattctgtctgctaaaaaatggtaaaaaccacattagaaggctaaatatttattgacaccatttccaaagtatgttattcttcatttgtaacattttcttagctgtaatccgtattccgcgtcaagatatattttgagagcggatgtttccgctgtacgtcttatcggtgtccggcaacagccaaaagcgaagacgttaataaacggtgtcgcaaggcggcaatttaaacggcgttacagtgttttatttacatttagtaggaggacgcaaaatgaaaaaaggtacagtaaaatggttcaatgcagaaaaaggtttcggttttatttccgtacccggcgaggacgacgtatttgtacatttctcagctatccagtcagagggttacaaaactcttgaagaaggacaggaagttgaattcgaagtagtacagggcgctaaaggacctcaggctgcaaacgtagtaaaggcttaatcttagtattagtatccaaactgtgaaaacaggttttttgaatatatatataacaggttatgcaaacacccctcattgattgaggggtgttttttgtgcaaaagaaatagatataaccgatttatatgccgaagtttggctagatgattattgtaatgacattttatatatgctaaaattattcagttaagtgttttttaatatagacattaaaaggagtaacataaatgagaaaatcaagggaagacattaggaatatagctataatagcccatgtagaccacggtaagacaacactcgttgacgaactgcttaaacagagcggaacattccgtacgaatcaggtcgtacaggacagagttatggactccggagatattgaaagagaaagaggaataacaatactttcaaaaaataccgccgttcattatggagatacaaaaataaatataatcgatacgccgggacatgccgacttcggaggagaggttgaacgtgttctgaaaatggtaaacggcgttgtgcttgttgtagacgcatttgaaggtcccatgcctcagacaaaattcgttcttaaaaaggcattggatttggatctccccgtagtagtatgtgtaaacaaagttgacagaatagaggcaagacccgaagacgttgtagatgaagttctggaactttttatggatcttgacgcaaacgaaaatcagctggattctccgttcgtatttgcttcggcaagaaagggaacatcatctcttgacccgatgaaacagaacgaaacgatgaaggatttgtttgagactataatcaaccatattcccgcgcccgaaggcgatgaagaagaacctgttcaggcgcttatatccacaatcgattacagcgagtatgtgggaagaataggtataggaaaaatagagacgggaacactccatgtaaacgatgacgttttccttcttaatatccataatcctgaatataagcagagagtaaaaataagcaaactttatgagtttgaaggacttcagaaggttgaagtaaaagaggcaaaatacggttctatcgtcgctatctccggtataacggatataagcatcggcgatacgatatgttctcctcttaaacaggaagcacttccttttgtaaagatagaggagcctactctcagtataaacttcagcgtaaacgacggaccttttgcaggacaagaaggaaagtacgttacatcacgccatttgagagaaagactttataaagaacttaatacagacgtcagcctcagagtcgaagataccgatacgacggaaactttcaaggtaagcggaagaggggaacttcatctttcaattcttatagaaacaatgagaagagaaggatatgaattccttgtatcaaaacccgaagttctttacagagaaatagacggtaaaaaatgcgagcctatggaacaggtaataatcgatgttcccgatgagtttgtaggaagcgttattgaaaaactcggaagcagaaaaggcgaaatgacaaacatgactccttctgcaaacggaggatatacaagagtagaattttccataccgtcaagaggtcttataggatacaaaaacgaacttcttaccgatacaaagggtaacggtataatgaacactatttttgacggttatcagccgtataaaggcgagatacctactcgtgcccagggttctcttgtggcgtttgaaagcggcgatgcagttgcttacggtcttttcaatgcgcaggaaagaggagacttatttatcggagcgggtacaaaggtttacacaggtatgatagtcggaagaaattccagagtagatgaccttgacgtaaacgtatgtaagaaaaaacagcttactaatatgcgttcatcaagcgcagatgaagcgcttaaacttacgcctcctatagttatgagcttggagcagtctcttgagtttatttccgaggacgaatatgtcgaagttactccgacaagcataagaatgagaaagaaagtccttgatcccggacttagaagaaagataagaatacacggataagagggaaatattccctcggaatatgaaggtgttttatgacagctaaagataaaaaacgtggctcgtttgtcgttcaggccgcagtacttgccagtgcaagccttatagtcagatttataggctttttatacagaatgccgctgactgagttgattggggacgaaggaaacggcatatacagcgcagggtattatatctatacttttttgctcatactgtcgtcagccgggctgccggcagccatatccaggcttgtctcgacaagaatagcgaagggtgaatattccaatgcccacagggtttttaaggtttccatggctgtggcaggaacactgggagcaatcggaatgatcgttttgttcttttttgcggagcctattgccaagtttgtggataatccagaaagcgtatattgcatacagacattggcgccgacattgcttgttgtcggaattatgtctgtctacagaggatatctgcaaggaatgaacataatgtacccgactgcgatgtcccagatagtagagcaggtattcaacgcagtattcagcgtatttttggcatgggtgcttgtaaaagacagcatagctctgggagcagccggaggaactgccggaacgggaataggagcgtttgccggacttattataataatgattttttattataaagaacgtcgtacaatacgggaaaaaatatatattgaagacagaggcataaagcaggagacaaatcgtcagatacttataagtcttgcgtcgactgccatacctattatagccggaacggctgtattcagcatgactaacctcatagatatgaagatggttaaatcactgcttcttgcgtcaggatatactgattcacaggcaaatgtgctttacggacagctttcgggcaaatatgtaacgctgactacacttccggtatccatatcatctgctatggctacggcagcaataccgacgatagctgcatctattactgccggagatgtcaagatggtaaaaagcaagataaatgtcgcgctgaaactggcaatggttatttctataccggcggcattcggaataggagtattggcagacgaaatactgcttatgcttttccctacgcaacatgaaggcggagctttaatacttgcaggggcggtttccattgcattcctatccatgtgccagatagttacgggagtgcttcagggaataggaaaaatatatattccggttataggcgctttgcttggcgcagttgccaaaattatatttaacgcactgcttatacctatacaaagcataaacgtcgtaggggcggtaatttcaactgatgcatgctatttggtagcggctgtattcgatcttgttatgcttacgaaaataactggagtaagaccgtattacggacaaatgattataaagcccgtaatatgttcctcgataatgagcgtaggctgcgtgctgtcatataaactgtttgatattgttttcggaaacacgatatcgacattaggttctatagccgtaggaatgattatataccttgttacaatgctgttgataaacggtataacggctaaagactttaacaatatacctaaggggaaatccatggtaagatttttcagaaaaataggtttgatgagataaacactttttgatattaataaaggcgcttccgtgaagcaaccggttttttcggttttgcggaaacgccttattttttataatcttttatctttttcgtatactgcgtcaaaagctttgcaaagggcggtttcaaatccgttggcttcaagagagcatacgccttctattgttgtaccgccgggagagcatacctgatctataagttcccaaggatgttcgccgctttcaagtaccatttttgcgctgccgagaactgtctgtgcagtaagctccagagcttgttttttcggcattcccgcttttacggcagcccttgaaagagcgtcgatataaagatatgcgaatgcaggagcggctcctcctattacactatgaatagaaaacattttttcggaaagctcggttacagctcctacagtggaaaaaagctttttaacaatatccttttgttcatcggatacggtctctgttgtgcaaaatgcacttgtggcacagccgacttttgcgtttatattgggcattacccttacgatagggaagtcctttgctatgagcccttcaaggaattccagtgattttccggcggcgatagatattacaagcggtgatttttcgattattttattttttaactgcattacaacgtcgggaagaacattcggtttaacggcaagaacgagaacgtcggaagatgctataacatcctctgccgaactgcatacgtttactttgcacatatcggcaaggcttcttgcagccgaagtattgaggtcatagacaaatatgtcttttccgtcaaaacttcccgtaccgacagtcataccttttataattgctccggccatgttgccggcgccgatgaaaccataattcataacaatctctcctgtcttttttgattattatacaacaaataattgtgaaatccatctgttttaaaaaatttatattatacgtattttgtgttacactgtaaataggagatgataacgtggaaaaatatactgatcttcatacacactctacagcgtcggacgggacttttacacctgagcggttggcggaggccgcaaaggaagcgggactgtcttctatagcattgactgaccatgatacggtcgaggggatagacagatttatgtatgcaggaaaaaagttcggaatagaaaccataccgggtatagaactggcagcggcatacaaaaataccgaactgcatatagtcggattgtttatagaccataaaagcgacagcctcgtaagaagcatggaatatattgttggggaaagaaacgaaagaaatctgaaaatgataaaggctcttaaaagaaacggaatggacgtaacaatcgaagaattggaagaaaatgcaggaggagcaataataacaagagcgcattacgccaatgttcttgtaaaaaaaggatatgtaaaaaataaagaagaggctttttccaaatatatatcggcaggaaaaccgggatatgtaaaaagagaaacgctgacaccgaaaaaatgtatagaaactattttggaagcaggggggataccggtacttgcccatgcgactctttacggatacggatatttggaaatacacaatctcataggagaactgaaaaaatacggtcttatggctgtggaaacaatatattcgacatacaatgaaaaacagtctgatgaaataagaaaaatatgtttgtcttacggacttttgcaatcaggcggaagcgattttcacggactgaataagccggatataaagcttggcgtcggaagaggaaacctgagaataccgcagttatttgccgaagagatgaagagagggcttatgtaataattatgttcttccgaaatataaatgtaataggaatattattattttgggaggaactgttttggaaaagaaaaataaaaagaaaacttcaaaaaaagaaaagaatgtttgtatggataaaaataacggaaaaggaagtccgttgttatatgccgcattaaaagggacgggagtaggtcttggcataacgtgtattatatttgcggcatgcgcgcttttgcttacatataccgacataagcgactcgtatataggaatagtgtcgactgtatgtactgcgctgtcggccttggcttcgggagtcataatgtcgaaggcacgtggcagaaacggacttttgacaggtgcggctgccggaataatatacggagcggtacttctggctgtcagcgtaattgccgggggaggcccgctttcacttggttgcgccacatgccttattgtagccgctgcaggcggagggataggaggaatactcggagtaaatacaaaatagaaatctgaacgagcgatttgaaatttatactttgcaaaaataaaaaaatatgttacaattgaaaaaaatatatatattttatgggaggttttataaatgaaacatgtaaaaactttaaataacgcaatgcttaaagagtctttagtaaagggcggttgcggagaatgccagacatcttgccagtctgcatgcaaaacaagttgcacagtagctaatcagccttgcgaaaacagataatgagacgaatgggagtggcgattatatcgccactcttctattgtacggatgaaaggaagaaattttatgcttcataaattttccatgaatggtattaacatacttatggatatattaagcggcgctgtccatgctgtggacgacgtagcgtatgacatagctgatatttaccccgatgaaggcgttgacgccctttgcgaaaggttttcggataagtatagcagagagcagatagaagaggctgtaggggaactggaagaacttaaagaggcaggacttctgtatacggaagacgaatatgaacaggtgcttgaacaggttaaaaacagagctcccgttgtaaaagctctttgccttcatgttgcgcatgactgtaaccttaagtgcaaatattgttttgccgaagagggtgaatatcatggaaaacgctcattaatgagtacagaagtcggtaagaaagccattgattttataatagccaacagcggaaacagacgcaatcttgaggttgacttcttcgggggagaacctcttatgaactttgaggttgtaaaggaaatagttgagtacggacgtgaacaggaaaaactgcatggcaaaaactttagatttacaattacaacaaacggagtacttcttgatgatgaaaaacagaagtatataaatgaaaatatgcataatgttgttttgagccttgacggaagaaaagaaataaacgactttatgcgtcccagagcaggcggacagggaagctatgaccttattgtaccgaagttccaaaagcttgccgacagcagaaatcagacggattattatgtaagaggtacgtttacacatcataatctggatttctccaaggacattttccattttgcagatgatttaggttttaaacaggtatccgtagaaccggttgtagctgattcaacagaggactatgctattcaggaggaagacctcgaaacaatatataaagagtatgaaaaaatagcggaagagctttacataagacacaaaaccggagaaaaggatttcaatttcttccactttatggttgaccttaccggtggaccttgcgtggcaaaaagactttccggatgtggaagcggaacagagtatatggctgtttcgcccgaaggagacttatatccgtgtcatcagtttgtaggacagcctgagtttaaactcggaacggtatttgaaggaataaagaacaatgaaatacgcgaagagtttgcgaactgcaacgtatatacaaaacccgactgtaaaaaatgctgggcaaagttctattgcagcggaggatgtatggctaacgccagccattatgcgggaagcataatgggaacgtatgacataggctgcaaactccagagaaagagactggaatgtgcaataatgataaaagcaaagcttatgcttgacgaagccgaaaaataataaaaatgacttttcacggattttgtaccgacccccaaaagttagacctaaaaatctaacaattggaggtcggtacatttacatggaaggtcatttttatatatggtcattcgattttgtttctaatgatatcaatattattttttattcgtacgttatcaggataaaatgataaggctttttccgcttctttaacagcttcatgatattggcctatattgtagaaagcaatggaacgtatgtcgtgcggcagaccgccccatgaagcttcttcacatatatatgttttagggcgctcggaaattttcagtgcacagtcggtaaaatacagaaccccgttccactcattttcattgtataacataagggcagtatcaacatacggttctctcaggtaaggggcttctatgattgactgcaagtaccaattcatagcggaatttttatcatttttcattaaatatgatttggcaatatagcgcattgaagccgctctttcatccctccaagttgctttcggcatggacaaatgaagtttcagtgttttgatacagtcatcccacatggaattatacatatattctcttccgagataatgcatatttctgtcatcatcgggatcttcctttacggataactctaaaagaggaagatactgactgcgtggttttgaaaaatcgggatagtgatttaactgaactccttcagccgttaccatattgccttgaacaccgtctccgcaccattccaatacctcgtgtacagggtgagtccatttatatccgtgtcttgaatggattttttctgcccaaaatacaacgccttctttaccttccttagtaaaactccatgtatatctgtaatttgctcttgttacgccgtctttccatactttttccaaacttttgcgccagcctttatcaaatacttcgtcaagatccgtacagacgcatatatcagcgtcatcgggtacaagagataaagaaatattgcgggcggtatcaaagcgccaaggtattattttttgttctttaacatatgctccctttgaacgaagacgattaacggtatcgtcagatgaacctgtatcaagtactacaattttatcggcttcggacatggaattcatccaacgctccacaaattgtgattcgtttttacaaatggcgtatacaactacatacatataaaacctcccaagactatttatgctatgtaaacagaggggaagtttcccctctgtaagaaaatggttatatgcttaagaacttaataaaccggcaacacgcatatttgcaagaagctgattaaattttgttactacatctgttgtatctgtagcatctgatacagctgcagccggagttacagcaccggcaggaccagtaggaccagtgggaccaatatcgccggtaggaccagtgggaccagtaggacctatatcaccagtagcaccggtgggaccagtaggacctatatcaccggtagcaccagtagcaccggcagcaccagtggcaccggtaggaccggtaggaccagtgggaccggtgggtccggtagggccggtagcaccggtaggacctgttacagtaactaaatcaaaatctggtgaagttccggggatacctacagcaccatttctgtttgcacggaacagactgccgttatagtaaaccatgtcgcctaaattgtaaaccattccgggtatataaggagaaacatcatctaatcctgcaccggcaggtccggtaggaccagtaggtccgattggacccggcataccgggcatgccggggagaccctgaggtccggtagggcctatgcagcaattgttgacaggatggcatgagcagcaagaaccgcactgatcggaacaacagcacctgttttcgtatagattcatttcatcatcatataatgacatccgtcgttcgtagaattcataatcgttattcatatattttgtcctttctaatatggttatacattacaatattcataatggataagctgtgttacaaaatataaagataatatattatttttgtaaatattatgaaatggggagtaattataagaaaaatgccgtattacgcgaaataacatatacaagcggattttgcgcctatttagcatcattgcgtaaaattttaaattatactataatttaaaattgttgggttatattgggtggaaatggagaaaaataaatgattgccaagaatgaagacacatgcatatatatcattgacgatgagtacaggatagtaagttttaacgatcctatgaaaaaaacttttcctgagctgaaatcaggagatatatgctataaagttttatttggggaggactgcgtttgcaaagactgccatttggaattggacagcaaagaaaaatccacagtgttttataacaaaaagaaaaataaatggatagaaataagctcggcaataatagattggccgggaaaagggaaatgcagccttgttcttacaaatgatatacatgaagggaacaaaaatctgctgtataacctgacaaaatcgtctgcatatgatgaattgtttgaattaaacattacggaaaataaatataaattgatgtatcattccgaaggcaaatatataatgccggcagagaacggaaagttaagttgtcttctcagaaacgtatcaagaagtatgatacatcccgatgacagacggatttttgatgagtttttcaatttggaaacaataatggagaggattaaagacgccgcaccgaataatacaatcaaatgtcaatgcagaaaaaggacaattgacgggagttatagatggacgctttacactataatagagattgaacacggtgtaaacagcgatgatataacaatgtgctttatacaggatataagcggacaaaaaaatgttgaaatcagttcttcgggaaaagaggataaaataaataatctgacaggactttataataaagaaactttttttgacaaagcggaaagcattttaagaagaaaaaatgataaggaatattgcgttatagcgatagatatagagcattttaagctttttaacgaatggtatggaagaaaagtgggagacaatctgcttaacgacatcggaaaggaactaaagccgatacaaaacaatggcgacggagcggccggatatatgggcgaggatgatttttgtataattatacctcaagatgataaggctattgagagtatacaaaaaaacatcataaatatagttaaaaactacggagacaatgtcggctttcttccgattttcggcatatataaggcttcggataaaactatttccgtaaaagatatgtatgacaaggctcttatagcggccatgtccgttaaaggaaattatgccaaacgatacgccgtatataataaaaatatgtctataaaaatggaagaaacgcaaagaatacttactgaagtaagaagaggtctgaaaaacggtgagtttactttttatgcgcagcctaaatgtaatatgatgacaggaaaaataataagtcttgaatcattggcaaggtggaatcatcctgaaaagggattggtttttcccgattattttattcctgttcttgaaaaaaacggactgattacagagttggacttatatatctgggaagaagtgtgcaaaagcatacgaagctggatagacaatggctataatattgtgcctatatccataaatgtttcaagagcagatatatattccatagacgttcctaagacaattaaaaaacttgttgaaaagtatgatatagaaccgagactgttggagatagaaataaccgaaagcatatatgcggaacagtatgacaccataacggagatggtaggaaaactcagaagctacgggtttaaggtgtttatggatgatttcggaagcggatattcatcgcttaacatgctgaaagaagtaaacgtagacgttttgaaaatagatatgcgatttctgcaaatggacgaaacaagttccgataaaggaataggaatactggaagcaatatcaagtatggcaagacttttgggattgagcgtaatagtagaaggcgtagaaacagagaagcaaatggatatattgcttaatttgggctgtatatacggtcaggggtactatttctacagacctatgccgaaagaattttttgaaaacctgcttagggatgaaaataacatcgacttaagaggaataacggcaaggcagatggacaggctgagcataaaagagctttttaatgatgagctgttcagcgatacactgatgaacaacatactcggaggaattgctttttacagtgtaagcggagataatgtggaaatcataagggtaaatgaggaatatttcaaagttacaggaacaaatccggtagacttggaggcaagaaaaggaaacgctcttcaagatgtctataaagatgacaggaaaaaaacgctggaaatatttgacgatgcttataaaaatattctatccggcgccgacggagatataagacgaaaaaaagacgacggctctataatatggatgcatataagagtattctttttaaaggaagaaaacgataggaaactttattacggaacaataagcgacgtaacggagcaaaaactgaaggagcagatacttgaagagtctcagaaagaattatcggctgttataggaatatcggaaaatgacgcgtcgtttatgcaactggcagaggagaataggaaggctgccgccgctatgtactctcgtatgacgccgggaggaatgataggcgggtactgtgatgatgactttactttgtattttgcaaattccgaaatggtaagactgcttggatatgataattatgacgattttgcgaatggtatagataataaagtaattaatacaatacatccggatgacagagaaatggtttttgaggcaataagagggaaatactatcccggaatggagtatgaggtaaagtatcgaatgcctaagaaagacggaagttggttctggacgcaggataaaggaagagttgttcaggcggaaaacggacgtatggcaatagtaagcgcatgtatggatatatccgagacaatggaaatacagaaacagataactgagaaaaaccgcattttaatgaaacagaacaaggaactgaatttcctgcataacgaaacaacaggcggataccaccattgtatggataccgacgaatgggattttgagtatataagtaacagatttttggaaatattcggctacacacgggaagaaattagacaaaaatttgataacaaatatcttaatatggtgcatccgaacgacagaaataaagtaagaagaagtgttgagtcagtcagaggcaagaaaaatgaaataaatacggagtaccgtatgctcagcaaaaaaggatatatatgggttatagatcagagcagatttatggaaatagacggaaaaagactcatacaagg

SEQ ID NO: 447 - DNA, 3964 bp, Unknown
  16S sequences of unknown bacteria
ttcttgagcatggcgtttcctatctcccgcccgaaacggtataatttaaaaaagcatcggaaagaacggctcttccgatgctttgttttttaatatcgacatttttaatttatgcctgcttttttcggaatgtgccgcaggaaagctcgaacacggtgccgaaaagcaacgaaccgacggcatttcccgccgccacaacaagcaaaaatacaatcgcctcggcggaaaacacccgcgcattcgcaaggtaaaaggcgtcggcaatcgaatgttcaaatccgcaaagaatgaaggcgggaacacaaaacaaaacggcaatgggatttttgtttttcttaaaaacatccacgcatatgtaaatcagaattccgcacagaattccgtcggcaaacacacaaggaagcggctttgcaagctttgcggcaacaatgctccgaaccgtaccgacgggagtctttaaaagccccgccgcaacgcatcccgcaacatttgccggcagcgagataagcgtatcaagcctttgtccccggttttgagaaaaaacatagcctatgcgcccggtgtataaattaagaccgaaatacaaaacggtcagcaaccccaccgaaaaaagaaaggctccgacatatttgttttcacagcttagataaacatatcctcccaaagctatggcaacgcccgccaaaaaggactttaaaatcccgtttactctttcattcatgctctttttcctttcaccttgactgataaagacattctatgacacaaatcacccgatttcaagtctttttgcaaaataaaaccgaacagaaagagaatggagaaactttctgttcggaaaaaaagaggattgaaacgttttatttaagaaagaccattgtctttctgcgccgccgcacgctcaagctcggatacgacctctctttcggtggaaaggctcatgaccctgtcggcgatttcgtcggcgtcggccttcgaccatttggaaatttctctcctcgtggcgagaaccgatgtgggggttacgctgtattcgtcaagcccgaaggaaataagcaaaggaataagcatggggtcggcggcgccttcaccgcacattcccaccgttatacccgcttttttcgcctcggatattatatattttatcgatctcaaaactgacggattaaagggcgaataaagataagcaacatttgcgtttccccggtcggccgccatggtatatccggtcaggtcgttggtgccgatgctgaagaaatcggcttcctttgcaaaaatgtcagctgtcagcgccgctgcgggcgtttcgatcatcacaccgaccttaatgtcttttttgtaggacactccttcgctttcaagctcgctctcggcctgagaaagcagagccttgaccgctctgagctcgtccacacccgtcacaagggggaccattatccaaaggtcgccgtaaacccccgcgcgaagcagcgcgcgaagctgagttttatagaactcagagtttttaaggcaatatctcacggcgcggaatcccaaaaaaggattttcctccttttcgagattcatatatggaatatccttgtctccgccaacgtcaagggttcttatgaccaccgtcttgcccttcataacggtgagagcctttttataggcctcaaactgttcctgctcgtcgggagcggatgttctgtccataaagaggaattcggtgcggaaaaggcctattccctccccgtcgtattccgaaaccttaagggcgtcgtcgggggttccgatgttggcaaaaagcattaccttttgtccgtcggcggttaccgtttccttgcccgcaaactttttgagcgccgccttttccttgtcaaaatccacacgaaggcggatgtattcggcggtcacgtcatttgaaggctcggtgattacctcacccttcaccccgtccacaacggtaagctgaccgctttttatgacttcacaggcatttttaaggctcagcacggcgggaatttccattgcccttgcaagaatggccgcatgggaggtttttgaacccacctcggtcacaaatccgaccacattggatttgtcgatacaggctgtcatggacggcgtcagctcttcggccacaagcacggtgtccttcggaaggtttgaaagatccacagtttgaattccgagcagaatggacagcatttctttttttatgtcccgcacgtcggcggcgcgctgtctcgtcatttcgtcgtccaccgaggaaaacatggcgataaaggtgtcgcacaccgtctctacgccttcctcggcgcacttgcccgagtcgataagcttttcgatttctgagcacatataagggtccttcatcatcataatgtgacccattatgatctcggcggccgcatctccggcggttttagccgcctttttatgcaaagcctcgtttcgggaaaagaatgtttcgagagccttttcaaggcgttccttctgctccttcgggtcgcagccggactttttttcatatttaagatcggcctctttgtatataaccgcccgtcctattccgtagccctttgaggcgcctattcctttatacatggtttatcccctttcaaggcggactattcgccgaagccgtcctcgatcatggcgacggcctcatcgagagcctgctgctcctgctcgccgtcgcagacaatttcggcgtcggttccgcatttgatacaggcggcgatgatgttcataaggcttttgccgtcggtgtcgttgccgtttgccttaatggtcaccttgcagggatatttacccattgcggcggcaaaattgcttgcggggcgcatatgaaaacccattgcatttgttatagttacttttttagataccattttcaattctccttttttatgtagcgggcgaagggttgcttcgcccgattttgtttttattcggtgacctttttcttgaaaaggccgagaagcaggcaggaaacgaccgaaccgacaacaagggaaagcagatagtagggccaatttccgaccacggcaaagacgaatattcctccgtggggcgccataagcgtgcatttaaagagcatggacagtccgccggctattcccgagcctatcatgcaggcgggaatgactctcaaggggtcgcttgccgcataaggaatggcaccctcggttataaagctcagtcccatgatatagttgacggggccgctctttctttcctgctcggtaaacttgtttttaaagaatccggtggcaagcgcaattgcgatggggggaaccattccgcctatcataaccgccgccataatgtcatagttgccggaggtaatggccgccgttccgaaaacatatgccgccttgttgaaggggccgcccatgtcaaccgacatcatggctccgagcacgatgccaagcagcaccttgcttgttccgcccatggaattgagaaggttggtgagtccggtgttgagcattcccattatggggttgacggcgcacatgataaccgctatcataccgagtcccgcaagaggataaatgagaaccggctttatgccttcgagagccttgggcattttgtcgcacagcttttcaaggccgagcatgagataaccgcccacaaatcccgcaaagagagcgccgaggaagcccgagggaatgtctcctccgacggcggcaaaggtcgcgccggtggtggcaagatagccgcccacaagtcccacaagaaaaccgggacgatcggcaatggaacggccgataaagcccgcgagaatgggaaccatgaagttgaaggccgcaccgcctattgttttaaagaatgcggcaacgggagtcgcagtaccgaaattggagtcctggggagcgcccataagggtatcgatcaaaaaggcgagagcgataaatataccgccggccacaacaaagggaagcatattggaaacaccgttcataaggtgctt

SEQ ID NO: 448 - DNA, 32759 bp, Unknown
  16S sequences of unknown bacteria
agtcccgcgccgacgatggcggaagtgggggagagcatttcgcgcattccggggccgcccatcgggccttcgtagcggatgaccaccacgtcgcccttgacgatcttgcccgtagagatggcttccatcgccgcctcttcgctgtcgaatacgcgcgcggggccgctgtgtctgagcatttttttatccacggcgctctttttcacgaccgcgccttcacgggcgagattgcctttcaggatggctaaaccgcccttggcggaatagggggtgtccatggggcgtatgatatttttatccagaacttcggcattcttcacgcgctccgcctgcgtcacgccgctcgccgtcagggcgtcgccttcgaacagccccgcgtcgatcagttgtttgattaccgcggaaatgccgcccgcctcgttcagatcttcgatgtaatctttgcccgcgggcgcgagtttgcatatattgggcactttcgagcccatttcgttcatgatatcaagggaaaaatcttcctcgctcatgcccacttcgttggcgagcgccagaaggtgcagtacgctgttggaggaggcgccgattgccatatccaccgcgagcgcgttcctgaccgccttgggagtaatgatgtcggaagggcggatattttccctgacgaggtgcatgaccgcctcgcccgtgcatttcgcgagcgcgagacgcgcgctgtaaaccatggggatcgtgccgttgccgggcagggaaatgcccagcgcttcggtcagacagttgaggctgttcgcggtgaacatacccgagcacgagccgcaggtggggcaggcggaacattcgaaccttccgagttcgtcctcgtcgatcctgcccgcgttataggcgcccaccgcctcgaacatggaggagagggaaagccgctcgccgtgcattttgcccgcgagcatggggccgcccgaaacgaatacggcgggaatatccagccgcaccgccgccatgagcatgccgggtatgatcttgtcgcagtttcccacgaacaccaggccggaaaatgcgtgcgcgcgcgcgaggatctccgcgctgtcggcgatgatttcgcgggaggggagagaatagcgcattccctcgtgccccatggcgatgccgtcgcacacgccgatggagggaacgacgacgggcttgccgcccgcggcaatgacgccctctttcacggcctcggcgatccggtccaggtgcatatgaccgggaatgatctcgctctgcgccgaaataatgccgataatgggctttttcatctcgttatccgtccaaccgagcgccttgaacaaagagcgctgagaggacattgccgtgccttccgcaaaaatattgtttttcattttatatacctctgattcagattaaatcgttatagtcgttcaggtctttgatacacacgccgccgcggctcaatgctgtcacgcccgtgcgcgccatttccatgatgccgtaaggctcgatcacgcggataaagccgtctatcttgttcggctcgcccgtgatctccaggatcatgctcgcgggggacaggtcgacgactttcgccttgtaaacttctttgatctctataatttccgaacgcttttcgggactcgccttcacttttaccaggcaaagttcgcggaatatacaggatttttcgtccgcatacgtaatttttttgatatcgatgagtttgtccaactgcttgaccatctgcgtgagcatgtattcgtcgccgtccagttcgatggtgatgcgcgaaaagttttcgtcctccgtcgagcaggcggatatggaatggatattataaccgcggcgcgcgaacaatccgctcacccgcgtgagaacgccgctcttgttggcggccagcgccatgatcgtatacgtcatttttttactctcccatctcggtgatgatgctgtcgaaggattttcccggggcgatcatcggcaatactttgtcgtcgatgccgatcttgcagtcgatgagcacgggcccgttctccgcgagcgccgccctgaggacaggctctatatctttttccgcagcgatcgtcatgcccttcgcgccgaaggcttccgccagtttgcagtaatcggttttgcggttcagagtcgtctgcgaatagcgcttgccgtaaaagagcgtctgccactggcgcaccatgccgagcgtgttgttgtccatcaataaaatgatcaaaggaaggttttgcgaaaccgcggtgcacagttcgttcagattcatgtgaaaactgccgtcgcccgtcacgagaaacgtgcgttttcccgaagcgacgcaggcgccaatggcggcgcccaacccgtatcccatcgttccgagaccgccgctggtcacgaacgtgcgcggcttttcgaatccgtagaattgcgccgtccacatctggtgctgcccgacgtccgtcgcgacgggcgtgtcgggcggcgtcagtctgcatgccgtctgcaatatcttgcgggcgaacaggggagaaaggttgtccttttcgtcgcgttttttgacctgtatcgcctcgttcagccagtctttgcgttcggcttgcggcaaaaggggaaggatcgtctttaatatttcgttcacgtccgccattacggaaatgtcggtctccacgtttttgtcgatctccgcggcgtcgatatcgaactgcacgatcgtcttttgttcgcggaactttttgcggtcgcccgccacgcggtctgaaaagcgcatgcccagcgcgatcacggtgtccgcacacaaaaacgcctgcgcggccgcgttggtgccgtgcatgccgagcattcccaaaaattcgggcgccgaagcgggatacgcgcccagccccatcagcgtggaaacgacgggcgcctgcaatttcttggcgaaagcgcatatgttttcgcccgcattcgagccgatcgcgccgccaccgagtatgataagagggcgtttcgcgttcgcaatcgcctccgcagcctgccgcacgctttcgggttccacctttttgggctcataacgtacgggttcggcgggcgtaaattcgcacagttccgtctgcaaatttttgggcacgtcgatgagaacggggccttttcttcccgagtttgagataaagaacgcctctcggatggtcggcgcgagatcgcgcacgtccttgacgatatagttatgtttggtcacgggcatggtaatgcccgcgatgtccacttcctgaaaactgtcgcgccccagatttgcgagagtgacgttgcccgtaatggcgacgagggggatgctgtccatgtacgcggtggcgatgcccgtcacgagattggtcgcgcccggacccgaagttgcgaggcacacgcccacctttccgctgacgcgcgcgtagccgtccgcggcgtgcgaggcgccctgttcgtgcgcagtcagaacgtggcggatactgccgtccctatacagagcgtcgtaaatatccagaacgcagcctccgggatatccgaaaatggtgtcgacgttctgttccttcaaacagcgtatgataatatccgctccgctcaatttcatgacaaaaaactcccgtaattgtttgactatcattatatatacaaaaaatattgtaataaaaaacggcggaagtgtcaagtgttttgttttccatgcgaaaaagggcggcaagtgaaaaaaatattttgaaagttcatctaaaacagttgacaaaagagggcgtataagataaaataagaaagcatcttttaagagatggcaatatcgcggggtggagcagttcggtagctcgtcgggctcataacccgaaggtcgtaggttcgaatcctgcccccgcaaccaattttttgttatggcggcgtagcttagcccggttatagcgatcggttcatacccgataggtcgtaggttcgaatcccaccgccgctaccaaagacaattttattccgcatttcttgcggtttttattcggccccgtggtcaagcggttaagacatcgccctttcacggcggtaacacgagttcgattctcgtcggggtcaccaaacaaatattttctcggaaagccgctcttacagagcggctttttttcatacatcaaaatattttaaatgaagcacgtgggacagggccgtaatcgcggctacgatagaggacgaaacataaatttcatatcgcttttcaggcggacaaggaattccttgcccgccttttttggaataattgtacaacaaattgaagtgatttaactataattttgtcaaatcgcatgatactctatatacaaactcgtgaaggaatcgatcagttatgaaagaaaattctgtctgttcaaaaggacaagtgcccgaaaacgaacatattacgtttttgggaaacggaaagcgtaaagtactgattttcggcaattccataacccgccacggacgtgcgcccgctctgggttggttttctgactgcggaatggcggcgtcgtgcgcggaaaaagattatgtgcatctgctgtacgatgcaatgcacgatgtccgtttttgcatcgtacaggcagcggatttcgaacgggagtttttgagggtaccgtcgtctttcgccgaatttcgcgcggtaaaagattttggacccgatctcatcgtcggcaggttgggggaaaacgtatcatccgaacgcgtacaaaaaggcaaatttacacaaacttataaaagactgctcgattattgccgccgcaaagatacgaaattgattttgacgacttgtttttgggaaagtcccgtggtggacgacgagatccgcgcattggcgaagtcggaaggctgtgcgttggcggaattgaacgatctgggcgcgcgcgacgagatgaaggcttgcggtctgttttcgcatacgggcgtcgccgcgcatcccggcgacaggggaatgcgggagatcgccgaacgaattttacgggccatggagaaatcgcaatgagaaagaggatcaataccctgaacgcctcgctgcttttgaacggcgtgagttacggcgaacacgtcatgaatcccggaatggtggtcgaagacgtcgaaaaacttgtccgcaactgctcgaatacctttatcgtgcgctgtcagcccgacagacccatgacggacgaaacgtactgtgcgctggcgaagttcgcgaaagaaaaaaatctgtatttcggatttttatatgcctaccaattcccgcccaaagggaaaagaagccatttgaacgcggctttggtgcaaaaattagatgaactcgctggcgatctgttcctcggagaattttttggcgaggcgggcagcgacaaagcggcgaaggacaagggctattacgtagaaggcagcgaagtgatcgccctgcaaatgcccccgcaagattttaacgatatgctcgcggcaaaagaaaattttgtgcggtttattcgaagtatgactgcatacgacgatgagatcggattgaaaaagacgtttttagtagaggcgaccgcgctttcgcgctacgagatggagggcggaatacgcactccgattctggaagtgttgccggggaatcccgaaaatctgatcccttttacgcgcggcgcggcgatcggctacggccgtgaaaactggggcggatttatcgccaacgaatggtacggaggctaccgtcacgaggacgaactcaaacgcgcacggctggaactgacctataaatatctgtatttgtcgggcgccaaccttacgtttttggaaagcgggaatcacgagatcaaatcgttcggctacgatctggacgaaaacagcgatctatgccgctcctatcgcgcggcggcggaaaacttcgaaaattttatcgaaaacaatccccgtccgccctgcggtccgcttgcaaaagtcgcctttcttgcgggaaatgcagacggatacacggattttatgggcggcagcagttggtgccagttcggacgcgaaacgtggggcaacggcgacgccgaaaagagttgggatattttatccgaaatattccgctgccgcgattggcacgatccgtcggcatttgccgttgacgggctcgatctgaataatgcgcccgcatacgggacgtacgacgtcattcccgtggaaagtcccttgcgcgttctcgcggggtacgattatctgctgtttgcgggctggaacacaatgacggaagagttatacgcaaagttgacggaatacgtgcgcggcggcggcgtattgtttgcttgcgcggcgcatctgaatgaaaatcccgtccgcggcggcgctgcgagatatatttgcggcggcgattggagcgaactgttcggctgcaaggcgggcgaaacgttgcgcatcaacagcggcgtaaaattcgggaaagacagttttgtgaaaaatcttcgctatcccggcacgagcaatctgtggtgcgacgcgaattacgccgcgggctttgccgattacgtccgcgtgacgctgtgcggcggtacggcgcgctgcgtcttttccgacagttttcaacctcccgccgagccgcatatccccgttgtcgtcgagcacagtctcggcaaaggcacgtcgatctttctgaccgcgcaaaactatcccggcgcgcccgccgtgatgcccttgtacagacagatcgtgaaagcgattttggcggcttcgcatgccgatgcggatatccgcgtgacgggcagcgaccgcgtccgcttctctctcttttacgacgacgtcacaggcgaagaaaaactgtatcttctgaacacctcatatgcagccaaaaacgaagttacgctgcatattgcgggcgggagacagcagttttggctatcgccgttggaactgaaaacggtggagttgaaaaaaaaacgccgttaaaatcgggtcagaatcgtctgccgatagtttcgcggcgtcgtgccgcggtatttgctgaaaacgcggataaaatgcgagcaatcaaaaaatccgcatgcctgcgccacgtcggtaacggaaagattggcgttttttaaaagttcgcaagcctttttgatgcgtatttccgccagatactcggtgggagtggtcttgcagatggctgtaaagcgccttaaataggtggaacgcgacatatttgccttgcgcgccagatcgtcgatggaaattttttcggaaaattctttgcgcatatattcgatggtcttgacgatcgacagcgcgtcgggctgggtggtgtccggcaattgcatgcggtaatctgtgtcgatcagccgcgacagagtgcagatgagcagaatggcgcgcatttcgaaaatgaggttgctctcctcgctctcctcctgctgtaaatcatagagaatattttccatttcgggacggagccttgcaagttgttcctccgttaaatgtaaaaaaatactctcgtcgtagtttttgcggatatacggctcgatttcgaagagcgtatgatagccagagaacttttccaactcgtccgaatatttttccaacacatagtggggtaagagcagatgaaaaatgttcagatcgttttccgaccagtaaccgtgacggtttttcggcggtatggcgaacacgtcgccgggttttgccagacacagattgtcctcgatatagtgcacgccgttgccctcgacgacgatgttgatctcgtaaaaattgtgcgagtgcatgttgatgggataatcatctttgtgatagtacgccttgcggatgctggtattgtcgggcagacgctcttccagtcggaaggtttccgtagtatggttcggaagtttcttcggatacatgtttaacctcgcatttgaaacgtttatacaatataatggtttattgatgctataatcataccacattcttatgataaaatcaagatgaaaattcaaagatgaagggaagaaaatgaaagaaagcaaagctgtaaaaatatttctctgggtatcctttgcgatgttcatgttatacattctttcgctgacgataccgctgtattacatgatcctcaattcattcaagacaaacggggattacgtggacaatcggtgggggcttccctcagtgtttacgctgcaaagtttcgcgaaagcgtttaccatgcgcgcgggagaaacgacgcttcccatgatgctattgaattccgtgcttttgagcgtgggggcgacggtcatcagcgtcacttccatatcggtgacggcgtatacgctggcgcggttccgctttacgggcagaaatcttctcgtggtcgtcgccatctcagcgatggcgtttccctcgctgggcggcggagccgctacctacaaactgatggtcaatctcggtctcgtgaacacttggggcatcctgctcatgttcggcgggccgttcgggttttcttttctgatcatgtacgcctatttcaagggcgtatccaaaacgtacgcggaggcggcgcggctggacggcgcgggagaattcctgatctttttcaggatcatccttccgatgacgaaggcggccctgggcgtgatcatctttatgggcatcgtcgggtcatggaacgattattacacgccgtacatgtatctgcccgaaatgaaaacgctggcgacgggattgcaggcgttttcgatcaccgcctccacgacgggcgcgtacacgcagatgttcgccgccatgatcatcgggacggcgcccatggtgatcttatttgtctgtatgcacaagaccatcatcaacaatacggtaacagggggattgaaaggatgaaaaagatcgttcgcgggctgtgtcttttattgacggtttcgctcgtgctgcccgttgcggcgtgcggaaaatttcaggcggattcgaaggacgtgcccatatatcccgatgcggagcctttccgctttgttgcgtatatgtcgccgccgcccgccaattcggggtcgggagaatttgccaccaatcccgattatatgacgttggagcattatcggaacatggcggactgcggattcaactatacgacgggtatgtacgagaatacgaaagaactgtacctaaaaggcatggatctcgccgaacaggtcggcatgaaatactacgtccgcgattacagtttcgcagacggctgtatcgaagggatcattgccgcggcgaattccgagcaagaggcgcagacgatgctggaagcgcagaaggaaagtatcaaggcgcgtttcgacgagtattcgcagcatgaaagttttgccggagtcctcgccgtggacgaaccctcgacaaagcgctacgacgcgatcgcggtgatgaacaaatggtaccgcgaaaattttcccgataccgaatttcaggtcaatcttctgccgacttacgcttcggcatcgcaactgttcgggacgaacgccagcgataaaaaatacggcgaagattacgtaaaatatttcaacgaacatgtggatccctccgtcttgagttacgaccattacgccctttccaaagaaggcacggtcaacagactcagcgcgacgtatctgcaaaatctggaatactttgctaacgaggcggcgcggacggataaagacttttacgtttttctgctgacgctgggccactggaattaccgcacgatggaatactaccgcgacatcgcgtggcaggtgtatacggcgatggcatacggcgccgtgggcgcacagacgttcacctactggacgaatttgagcaacggcgcgagcgagaagatcacgggcgcgctcgtcgacagggacggcacgaaacttcccgcctggtatgccatgcaggaagtcacgaaagaagtgaacgcctttgaaaacgtctatatgaatttcgattggcaggggactctgcccgtcgtcgcggacaaatatgagagcaatcccatggtggatatgatgctaacgcccctgacagaacacgaccgtatcgcgtccgtttccacgacgggcgacgcgatcatcggcgctttcaaagataaagaggggcgtgacggatttcttctttccaacataaccgaccctgccgataacacaaaggcggccgtcacggttaaattcaacgacgcgaaaaaagtcgtcgtctataaaaaagggcgcacgctcgtctgtcctctcagtaaagggaaagcaaccttcgaactcggctctggagagggctggttcgtaatacccgtataaggagcaaacatgaacgaaggtaaattactttttgtcgcgtatctttcgccgccgcccgccaaagtcggaaacggggaatttgccgacaatccgaattatatcgacgaaaaaaattatcgcaccatgatcgactgcggtttcgaccgcgcgatcggactcttcgaaaatcaggtgcctcactatatcgcgggtatgcgcgccgccgaaaaagtcggcatggattatctggtgcgcgatcagtttcaagacggctcgatcgaggggatcatcgacgatctgcaaagatcgggcaagtcttgcgaacggcttttgcgggaaaaggagcgcgcgatctgcgatcgtttcgacgaatatgcgaaatatcctgcattttcgggcattctcgcatccgacgagccgcccgcttcgaaattcactgcgatccgcaccgtgcaggattggttttgcgggcgctatcccggaaaagagtttatcgtcaatcttctgcccacgtacgccaacgcggaacaactttcgggcgatgagggaatagaaaatttcgattacgaaaaagactatgtgaatgcttttatcgatattgttgatccgcagatcctcagttacgaccattacgcgctcatctatgacaaaaaaaacgacgagaacgtgatgcgtgcggattatctgcgcaatctggaaatttttgcggaatgttccagaaggacgggtaagcctttctataatttcatgctcaccatcgggcacctcttttataggaccgtccgcgcatacgaggatatcgcctggcaggtctatacctctctcgcttacggatgcacgggaatgcagacgttcacttactggacgcttctgagcaacggcgaagcggaaaatatcacgagcgcgctcgtcctccgcgacggcggcaagacgcaggcatggtattccatgcggcaagtgatttcagaagtgcgcgcgttcgagaaggaatttttgaaatatcgttggtgcggcgcgatggttgcgggagggcccgatgcgaatttcggacaactgcagcatacgctctccgcgcatcccgcgatcgcgggactgaaagcggacgccccctgcgtcgtcggcattttcgaaagagaaggaacgtacgcgctgttgatcgcgaacttcaccgacccgatcgaaaagcggaacgtgcgggtttcggcaaagatgaacgccgacgggacaacggtgtattaccgaggaaaacggcaaaagtctgcttcgacgatttctttggaactggaaagcggcgcgggcgcgttcgtgctgctcgaatatttgtctgataaggagaacgatctatgaaaaaaatctggaaaatgctcgtgccggtgctcgcgctgtgtatgttcctgcctatggcggcgtgcaaaaaggacgatgaaacggcgggtaagaccgtcgtaaaagtagccttttatgcggcgggtttcggcacctcctggatggaggacgccaaggcgagatacgaggcggaacattccgacgtgtatctcaaattggagggggatccttacatcgaagagaccgtaaagcaacgcctcgataccaaaaacgccaaccttgccgacgatctttgcgtgttcggcggcgggtattaccgttatatggtcagaaacgatttgttaaaagatcttacgtctttctatgacgaaaccgtcgagggcgaggacacggtggacgatcttgtcaaccaacaactcaaaaattactttaccgtcaacgggaaagtatacggaataccctggcaggacaacgcgatgagttttgtgtataacgcgaatatgttcgatcagtacggctgggaaattcccgaaacgatggatcagtttttcagactgtgcgaaaagatccgcgacgatacggacggaaaagtcaatccgctcacctattgcggagcggcgaatcagggctatttccccggggtcatggaaaactggctggcgcagtacgaaggcacgcaggcgatgtacgattttctggactgcgaaaacgccgaagtatatcaggcgcaggagtccggaaggacgaaagtatatcagacagttgccaagatcattcacggcaccgattccaagggccgccgctatgtagacggcaagtcgagaggttatacccacctcgacgcgcaggcggagatcttgaaggggaattccgccatggtcgtttcaggtccctggatgcagatagaaatgagcgaatatctcgtggattatccggggttccgcatggggatcatgcccaccccgcatatcaatggggacgcaagggataaaaacggcaacgattcccggtacgtgcgcacttccagcacgggcgtgatggtcgtgcccaaacttgccaaaaatgcggacattgcgctggatttcatgaaatttatgctgacgcagacaagtctggaacggtttgtcgaaacgacggacggcctgacgcgtccctttactctgaaaaatcccgaaaattgcgatttcggcagcaattattttgccagtaccgtgttcgatcttctctccgaaaaaccagaacgtatgatctatacggtcagcacgtccgatatctggctcgcgggagaatcgtccatgtggatgtgcaacgacggcgcacccgtcacggctctggcaagtctgacatacgaacaggcgatgagcgaagccgccgaacttgccaaggaagattatcgggtagtcaaggacaaatggaacagttggcaggtcggctgaaatacaaaagcgacgggggcggaaaatggctttgaaaaatattcttggcggcgtaaaaaataagatcaaacagcattatgaaaagagcgggctcttagagcattcgagcgtaaagatcaaaaatccctggaagatcaaactctttattttctgtatgctcgcgctgcccatcgcgcagtttctcgtatttacggtctatatcaacatcgacggcatactgatgactttccagaacgtagatttttccaccaacgaagaaaaattcgtggggtttggaaacttcgctaagtttttccgcaatttcacggcggtcaaccgcgataattttataaagtctatttggaattcgttcggctactggcccgtcacgtttctgatcgccattcccttgcagttgctttcggcgtacattctgtataaaaaagtacccgcgtcgggatttatcatcgtcatgatctttttgccgaacctgatcccgcccgcggtgcttgcacagtcgttttccgaaatgctctccatccgcgagggcccgctcaactcgatcctgatgcacattttcggctatacgagcgaaacggtccccatctggctcagagacgaaaaattcgccatgcccattctgtatatgtacagcgtctgggtcggcatcggttacaacgccgttttgatgtggggggccatgacgcgcgtgcctgcggagatcgtcgaatcggcgcatctggacggcatcggctttgtcggggaatttttccatatcacactgcctatcatgtggcccacgctgtccatgatcttgatgacgagcgtcggcattccgttttccgtctatatgcattccctgctcttgacaaacgggggacaggcgggcacgggtacgctggggctgatggcgatccagacgctgcgctcgggcgatatgtattattccgccaccatcagcgtgatcttgtcgatggtatccattccgctcatgctgctggcgagaaaagtgctcaaccgcatctacgaagatgtggaagtataacaaattattcggaggaaaagatgaaaaaaagaaggattatgctgatcttggcgctttcgctcgtattcgccctgtcgggcgcgggcatcgtctcctttgcggcggaaacgcccgaggacggagcgctttccatggccaccgttttacagacgaaagagggattccgcgaaaacggcaccgcgcaggtacgcacgaaaaaagcgctcgcaggtgaatattcggtcacatataacgtttccggcgtcacgcccggcaacggctggatcgcgcagcagtatatcggcatcgacgatgcgggcagttttctgcaaattaatctattcgtagattccgccgtcacggtgaataaggtcggcggcgaatcggcgggcgcgctcgtcatttacgacgccacaaccgatcagccgatggcaaatccacgttcgctggaattgggcggggattggtttacgggcgcaaattacatttttaaatacgagatcacgaaaacgcggctgcatttctattttggcctcgcgtccaagatcgtagaggggacggacgcgcccgtcagccgcggctatgtgcttctcgatgacaaaacgtacggcgaatataccgacgggatcgcctctttcgcgccttatgcggcggacaggagcggtttttcgatgactgtcaattcgatttcggtcaaaggcgaacaggcaaacctcgatatgacgtctatggaaaaagacgccgaacgcgaaaacgtgatagccaaccaagacgcggaactttttctcgcggacaaattcgaaaaccgctcctctgcgcagacggattttgcaaagggcggcacgttctccaaaaaatgggtgagcgaattgcccgtatccacggacggattgccgaacgacgcggacgtgttcacgagttcgtttgagatcgcgctcacgacctccgcgggaaattatatcccgagcggactgcaattcggatttgcgttcggtatgcccgaaaagacggctactcccgcaacggagggcgtgactgcgatttgcgggaaacttcccatggcgggtctggatctttccgtagggaacggcacggacgcgatcgtccatgaaacgaccatcggcgacgcgagcaaaatattttccgcgaacgacggcggcataggcaggctgtacgtttccctgatagggaaaaaggacggctcgctcaaagtaacgtataaaacggatcacccgagcgacgcagatgcgacgttcgaatatacgggcatcggtttctacggttttataacctttttcgtgacggcggacgatgtcgccatcgcaggcgagagcacggggggaagtatagcgtttcaaaacattttgctgccttcggcgcagaaggtagacgctgaaagcgtttcgctttcagatgagagcgcttccgtcagaatcggcgagagcaaacagctcaccgccaccgtgaagcccgacaataccacgatcaaaacgcttacatggacttcctcggacgaaaccgtcgctaccgtcgacgaaaacggacttgtgaccgggaaaaagagcggcagtaccgtcgtcaccgcgacgacggagaacggcttgaaagcctcttgcaacattctcgttcccgtcgaggcggaaacggtgacgctcgacaagacgagcgcggtgataggcgtcggcgcgcagttgcaactgaacgcgaccgtttcccccgagaatacgaccgataaaaacgtcgtctgggcttcttccgatccgtccgtcgccacagtggacgaaaacggtttggtgaaggcgatcgccaagggcgaggcgaagatcactgcctcctcatccaacggcaagagtgcggagtgtgccgttaccgtgtcggtacccgtatcgggcgtaacgctgtcggagacggaaaaaacgcttgacgcgggcgattcctttcagttgacggcgacgatcttgcctgccgacgcgggaaacaagagcgtttcgtggagttcgtctgcggataacgtggcggaggtggacgaaaacggcaccgtcaccgccaaggcggcgggcaccgccgtgatcaccgtattgacagccgatggatataaagaggcgacttgcaccgtaacggtcaaagcgcccgtcgtacccgtcacggggatctctttgaacaaagacgcattgacgctggacgtcggcggaacggaaacgctgaaagcgagcctttctcccgaaacggcgacaaacaagggcgtcaagtggacatcttcggacgaatcgattgtaaaagtaagcgacaaaggcgtcgtcaccgccgtcaaggcgggcacggcctcaatcacggtaaccagcgaggacggatcgttcagcgcgacttgcgcggtcacggtgaatgggaccgaaaagggcgggtgcggttccacagtcgcgggcgtttccacgattttcggactcgccgctgcggggatagccgtactgttattcagaaaaaaagcaaaataatcagcatttaacggagcaacggactgacatgatcattcaattcaacgattacaaagacaaggttttgggctgcctgtacggcaaaaatatcggcggaacgctgggcgcgcctttcgaatgttaccgcggcgtgcacgacgtgaatttttacacgcaggatacctccaaacccatacccaacgacgacgtggacctgcaactcgtctggctgcgtgcggtggaaatggagggaaaaaaactcgacgcgcaggtgcttgccgaatactggagcacatatatttcggcgagcctcgccgagtacggcacgggcaaaaataatttccgcatgggcattcggccccctctttcggggcatttgagaaaccgcaaccgcgacagcaacggggcgtggatccgtacggaaatatgggcatgtcttgcggcgggtcatcccgacgtggcggcgcgtttcgccctggaagacgccatggtcgatcacagcggcgagggcgtgtattccgcggtgtttctcgcggcgatgcagtccgcggcgttcgttgaatcggataccatgaaactcattgagatcggtttatcctatattcccgaagattgcggcatcacgaagggcgtccgcaccgtgatcgaatgttacggcaaggggatggactggaaacaggcgagaaaggtgctattccggaccgtacccggaagtttcggcatgatggggggctatttcgaagggcagacgcccgaagaggacgtccctgtcggtgaaaacggctacgatgcgcccagcaacgtcggaatcattattcttgggcttttgtacggcgagggcgatttcgcccgctccatctgtctcgccaccgattgcggtgaggataccgactgcacggcgggcacgctcgcggcgcttctgggaatcgttttgggaaagaaaaagttacccgaaaaatgggtcaaaggctgttccgatgaaatttcgacctggtgtctgcgcatcgacgcggcgctcaggcttcccaaaacggtcacggagttcgccgaacgcatcatccgccagacgcccgtcatgctcaacgagtactgcgacgtgacggcaaagggaggctttaccatcgagagcgccgcaaaactgcacagaaacggcgacgtcgtcgcaccgtactggaatactttcgaaaaacttctcggcgacgttccccgcgccacgcgcgatcgatttacgctgtacgacgtggtcgtcgagtacgatgagaatttcgtgtcgctcaaagaaggaaaagaaaagacgctgtcgctgcgctttatcaataaactcttcgacccgcagtacctcaccgtgcggtttctggattttcccgccgaattcgtcatggaaggcggcacggaacattgcgtggggatcgagcatctgcacggcagtttcaacgagagccgccttgagatccgtttcacgccgcagtcgttgctgcgcggccgttacgatctggtcatggagatcaggagcgagggccgcatgacgaggaattatgttcccatgacttttattaacggcaactgtctggaaatcgccaaataaaatacatacttcatcaagagcaaaaggggaggatcacatgtcaaaaacattcatgggcagggcgctgttagccttgctcgcggcgatcgccgcatcgttttttctggctcccgtcggggcgcgggcggattccggcaagtacgtcaactatgtcttacaggacgcgatgtctgagtacaacgcgggcaactggtcgctttatcaggaaaaatatctcacgccgaccgatccgcccgcgttcgcggatccgatctcgttttccgcggggttaaatatctccaacgattttacggtcagaggggacgcgtacgaaggggcgcgcgccgtatccaacgtgcgctttagtaaagatcccgcccgcgcggatcgggaaaattacactctgttcgacacctctttcgtcgtctatcagaacaacaaagacaaccgcgcgaaggacgtggagttcggcgctttactgggacttcccgaaaagaacgcatctaaaaacgagtgcgtatacttcatgctcgacagttttcgctttttcctctacgaccacggcgaagcggcggaacctgtctacctcaccgaaacgcgggacaacgcgctcgccggctatatcgaatacgattttaaactggaagtacggctcgtcgcaacttccgcgggcgaactgatcgtctatctcgggtttcccgacggcaaggacgtgaatgttgcgtattgcaagtacgaagggctggattttagcggttatgtcggttatacggcgacttcgcacgtcgcggaaaagacgggattttccgtcaatttcgacagtatcaagttaagcgggggcactattgcggactataattttaccgtcctttctgcgagcgtcgatcccgcgcctctgaaaaccgcggtcgtttccgataaacccattgccttagccgcggatatcgtcacttctcccaacctgcccgaatatcaccgcgctgtgttccgcgtaatgaagggcgatgcagagatcaaaaacggcaatctcctgtatgtgaacggcggcgacgagatcgtcctgcgcgcgtcctccttttacgatccggaaatttatcaggagatcccgtttaaagcgaccgaacttgccgtttcttccgtcgctttcacaaattctttcgaagggatgaccgtgtatacgcagccgttccgtctgatcgccgaagtgaaatccaattcatatgtgcccgaacacaattcggtggttttcgaagtcgtgagcggaaatgcggagatcttttgcgaaaaatatttaaagatcacgggagcgggtacagtcattctccgcgcgacgtccgcatatctggacgacgcgttcgcgacgatcgcttttcaggtgaccgatcccgatcgaaactacgttccccgcgaaggcggggaaccttcctgccaaagcaatcttgccgcgccgtccgcggcggcggccttaacggcgattgcggcggccgcgctgctcgtctgcaaaaagaaaaaagcataaatcgatccctccgctgcttatgcggagggatcgttcgggagaaattcaaatggatcgagaaatatccgaattgcatcgcgtctttatcgacggcgaaagttgcgccgtacatgcgtgcagggtgtccgctctgccctttaacgtgtggtggcagggacgtcagcgtcccctggagcagacggaagaagcgtcgttcgtcgcttttcccttttcgggagatgcggaaatgcgcgtttgcgtcaaaaaaccttttcaaaatgccgtcgtgcggccgctatccgcgaacgtccgcgtgcggaaggaaaacggctgcgcggtctttacgatcgcgagagcggggcaatacgtgctcgaaacggacggagagcacaacgccctgcatattttcgccgaccgcgcggaaaatttcgcgaaatacggcgaaccgacgctcgtattcggcgcgggggagcaccgcgtcggcaagatcgagttaaaaagtcacgaccgcgtatttgtgcacagggacgcgatcgtgcacggaagtttttacgctaaaggcgcaacggatatccgtattttcggcaacggcatcgtggacggcggctgggaaacgcgcaagagtatgcactgttacgaaaattacacgaacggctgcgccaagttttacgaatgtacggatattacgctcgacggcgtggtcttccgcgattccgccatctgggtcgtcaatctgttcgactgcgaagacgtgtctttaaaaaacataaaactcgtcgggcattataagtacaacaccgacggcgtggatatcgtaaatagccgacgcgtcatcatttccgactgctttatccgttctttcgacgacgcgatcaccttgaaagggatcttgcagtacaaggacaaatgcgtggaagatatccgcgtggaaaacacaatttgctggtgcggctgggggcggacgctggagatcggattggaaacggtcgcccccgcctatcggcgcatttcctttaccgactgcgatctgatccataattccgccgttgcgctggatatccaggcgggcgattttgcggaaatttccgatgtgacgtttgaaaatgtgcgcgtggaatatcagagcgattccttgcccgaagtgatccacaatccacccgaaaagcaatacgacgggtttggaaagcgccatgtgcctatgctcttttgtgcggaaaattcggaatactttatcaacgacgaaaattatttttggtatgacgatctgcttaaaaaagagagaaagggcagggcgggcagcctgaaaaacgtgagccttatcggcgtgcgagccgtaggggacgcgggcggcgatttgcccgcgctgcgcgttcaattcaaggctccctttacgggcgaagaaattctcgtatccgatctcgttgttttcgggaaaaaagtcgggaaagaggactgcaatgtggagggaacgcacgcgcatctgctgcgctttatctaagtatgggctttttatggatctctttggcggcgcttgccgtaggcgggcagttttcgctgtccaaagtttataaaaacaaacttccttcctccaattacggcgatctgttttacaatttcgccatggggctgttttccgcaatgctctttgccgttgtctgtctgggaaaggtgggatttaccgccttttctttttggctcgcggcgggcgtggcgctctgttccacgctctataccctgtgcgggctgaaagccgtcacgtacggaaaacttgcggtctttacggcgtttctgatgttgggcggcatgatctttcccaccgtgtacggcgtattgtttttaaaggaacagatgtccgccttcaaaatcgcgggcgtcgtccttctgatcgcctccatgattttttccgccaccgaaaagacggaggaaaaaaagaacacggctgttttttacatattgtgtctgatcgcgttcgtcagcaacggttttgtgagtatattttccaaagcgcaccagatcggcgagggcgccttgaatacgtttcaattttctttctggcaatcggcgatcatcgccgtcgtcgtcggcgtccttctcgcggtgaacgttctttgcaaccgaaaaaaagaaggatattctctgcttatccgaaagagcgtaagtgccaaaagtttgggattgatcgcgcttacgaccgtcatcatgcgcgcgggaagcgtgcttttgctgctcgccgccaaaacggtgcccgcgtcgtatctgtatcccgctacgacgggcatttccatattcgtcgcggcgatcatgggcaggctgtttttcaaggaaaaaatctcgaaaatcaatttcgtttgcatcctcgcggatatcgtcgccgtcgtcctcatggtattttaaggagaaactatggaaaagtggttttggatcgaattgatcggttttgacaatcaaaagagcgattttgcaacgggcgaatttttgtcccgtcttccgcaaaagcccgacggcgtttccctgctgatctcttccgtcgatttcgtcaatttgcatgatgcgaaaacgtttcgcgaaagggaactttcgcctatgtgctgttcgtacgaggcgcacccctgtaacgaggagcgcgcgcggcagaagtggacggggaaacaactcaaagggctcgtgcatacgctgcgatcgtacggcgtgcgcgtttttctatccttttttaatttgttttgttatcctgacgacgagggcaatgaagtcgtcgaacccttttgcgcggcgcatcccgaactttgggaacatcggcgcgacggcagtttgaaccgctcgctgcatatgctgaaacgctttcccgacgggcggtactatcaggattttctggcaaaaaaattggtcgaagttttatgcgattacgggttcgacggggtccaacttgccgacggcatttcctccgcgcggctcaccgtgcagaacggcgactattccgacgatatgatcgggcaatatttgtacaagggcgatcttcccgaaaatattttgcgcgcgggggaaaaagagcgcgcagattttatattccgcgaacgtctgtcggaatggctcgcgtttctttcggagcggtggggcgaattttataatgtgatcctgcgcgcggtgaaaggcgcgggaaaagcggtctttttcaacagttgctggacgcgcgaacctttcgaggcgtactaccgctacgggctcgattaccgcaagatcgatctgtcgcagtcggacggatgtatggtggaagaggtttccgcgtgcatgtccgtctacggcgaagccgatcagggcggttttgcaaactctctcgccgatcgggcgaaatggcattacgaattttgggcgatgcagcttctgctgaaaaaatgtatgcccgatctgcctcttttcgatctatcgtcgctcaaagacaccaacgaacaatgggacgtattgcgcgacgcgccgaccgaatatgcgcgggcggtctaccgcaattcttcgctggcgatctggaatcgcggcgcctttgttcccacgctttcgggcgcttttttttgcctttcggacggcatcgggcgtgaggaatgggataagatctttacgctatggaagcgggcggaactcggcgaaggctttgcgccgctcggctgtctttgcgtttgcgaaacggcggcgttggaaaaagaactcggatattttttaaagacgcgcaattatcccgcgcataagatgctttcggaacttctcttttacggcgcgccgatagctggcgccgcgcagccgcgcgaagcgcggagtttcggcggacctttgcttttgctgtatcccgaattttattcggatacggatagaaatgcgctgttattccgtacggacgcgcccgtctttacgctcggtggcgcgctgatcgaaggtcgggaagccgatttcatatacaggcatcgaggcgaacggggcgaaagcgtatttgcggcgtacaatacgggccgtaaaaaacaagggactctctttgcgcccgcaaaaaaagctgtatcccccgatttttccgaagagcgtcaaggcgcgctctggacgaaaatgttgtcgttcgcccgttacgacgacagatttttcaggcgcgtctgccaaacgctcgtcgcagcctgcaaactcccgtatgccgcgagcgaaaagagccgcgtgaccgttgcgatcgtgaagacggaggaagggaattaccgcgtctatgcggataaccgcgcttacttttacgcgctgccgcgcatagaatgccgccgacagatcgtttccgcgcgctccgtcaccaagtacggaggcttccgtatccccgttcgcggctcgcaaatgaccctgcgcattcccaatcgcggcatggaggtggtggaaacggaattttcgtaaatgaccttctctttccttgaccgtttgaaatcgttatgatataatatctttactaaaacgttttagtcaggagaaaagatgggaaagaaagtgaccatccgtgaagtggcggcggaatgcgggctgtccgtttcggccgtttcgcaggtgctcaacggcaaagagatcggcattccgcaaaagacgaaagaaaaggtgcgggcggcggcggaaaaactgcgctattgtcccaactcggcggcgcgaagcctcgtcaccagccgttcggataccgtgggcgtactggtgcccgatatttccaacgcgtttttcggggaagcgttcaaagaaattcagcgcagaatgggcgaagaggggttcgacgtgctgctgtgcagcggcgacggcacggcgaaacaggacgagcgctttttgaggctgttcgccgcgcgcggtgcggacgggctgatcgtcgcacccgccgcggaaacgctggaagaaaaaaacgccgaaaagttcgccgcgttgttggaggagattaggatcccgtacgtctatttggaccgctatcccgcactaccgtgcgtgcgcgtgtcggcggatcatcgggcgggcggatacgcggcggcgcgatgcctgttgaaaaacgggcatacgaagatcggctgtatcgcggggcctgcggcgctcgtcggcgcgcggctgcggctggaaggcttttgcgacgcgctcgcggaagcggggataagaccgctcgcgataaacgcgccatttacggcggaagggggcgaacgcgcggcgaaagcgctgttcggcaggggcctgaccgcgctgttcgcctccgatgatctgcaagcgtacggcgccatgcgcgcggctgcggaaacgggcgtccggatcccagacgacgtgtcgctcgtcgggtacgacgatctgcaattttccgccctcgcgaacccgccgctgaccacgatatcccaacccgtaaaagatatggcagccgcggctgcggaacttttgctccgacggatgcgcggggaagatgccgagaacccgccactatttgtgccgcgccttatcgagcggcaaacggtaaaaaatctgaaagaggagatcgaatgaaaaaagtatttatcgtcggcagtatcaatatggatctggtcatcgcttccgaccgcctgccattgatgggcgaaaccattcacgggcgggatttctttaccaatcccggcggcaagggcgccaatcaggcggtcgcggtgcaaaaatcgggcggcgacgcgcgcttttgcgcctgcgtcggcaacgacgatttcggggatatccttatcggagggctcaaagcctgcggcgtagatacgcgcttcgttacgcgggaggacgcccccagcggcgtggcggtcatcaccgtcgtggacggcgacaactgtattgtgctcggcgcgggcgccaacgcgcatatggatatttccaaggcggagcagtgccttcgcgaggcggaggcaggagatatcttgctcgtgcaactggaaatcgacagcgatgcggtgctgtttgccctgcggcgcgccaaggagaagggcatgacgaccattctcaatcccgcgcccgccaaggggttccgcgcggagtttctgccgtacgtcgattatctcgtgcccaacgagacggaaacggcggaactgagcggcagagaaaatttcgaagaggccgtagacgcgctttgcggcaaggtgaaaacgctcatcgtcacgctgggcgggcagggctgcctgtactgtaaaagcggggaacggatacggatcccctgtcccaaagtgcgcgccgtggataccaccgccgcgggggatacattctgcggcgcgctcgccgcgcggctgagcgccggggaggacgaacgcgcggctgtttcgtacgcgctcgccgccgcgtcgctcgcggtgacgaaacagggcgcgcaacaatccataccgttcgagcggaaagtgcgggaatttttggaaaagcgtttataaagcgttgacagcgcgcaaagaaacgcttaaaatatgcgatgaataaccgacaaaggcattttgaatggattttttatcgacgtttctcatcgtactattggtcattgcgctggcggtgccagggttcgcgctcaaaaaggcgaaacttctgcccgacggcgcgtccaacgcgctggcggtgcttttattgtatgtggcgcagccttttctgatggtgtcctcgcttttaaacaagacgttcacgacgtcgctgctgcccgattttgcggcggtcgccctgttcgcggtagtgttgcagctgatgctgtactttctctccaaattatttttcgtaaaagtcaaagaggagccgacgcgccgcatctgcgtcgcgtcttcttatctcggcaacgtggggtttatggggatccccgtcatgaaggcgctgtttccctccgacgataccattattttatatacggtcattttcaatatcgtctttaacgccatgacctggacgctcgccgtgtacgccatcacgggcgacaagagcaaaataaagcctgtcaaaattctgctgaacccgcccacgattgcgaccgttctggctctgccgttctttttctgcaacgtgtccgtgcccgacaacgtgctcacgaccatcggctatctcggcgatatgacgctgccgctttccatggtcattctcggcatacgccttgcggatatcaaattcacgcgcctgttcacgagcgctcccgtgtacggcgtcgctctcgtcaaactcgtcgtaagccctttggcggctctcggcgtcatgctgctcgtgcgcctcttgattcccgtcgaaacgaccgtgatcgttgcgctgttcatcattttcgccatgccgtccgcttcgtccgcgctcaattttgcggaaatgtacggcggcgactgtgacaccgcggcaaaagcaacgcttacgaacacgctcctgtgcgtgctgaccatcccgatactttctcttctgataccgttgttataaaaaaagagtctcgtttgccttaatacccataatcccctcaatactatgggaaaaatctctccttttgtaggggtgtttccgaaaattttttaccctacacttatattggaaagttacctctcaaaagtttgacgttatatggaattttttgaaaatttattttgaagcatcggtattcgatcccgaattttgtccgtaaaaatatttataataattagttgacaaaacgctttttaatgcatataatatagatagttgtctatgcgaggtgaacatatggaatatgtcgaaatactgaaagcattgggagaaagcacaagacttaaaattttcgaaatgttgcaaaacgggcaactttgcgcctgtaaaatattggagcaactccacattacgcagccgacactttctcatcatatgaaaatactttgcgattgcgggcttgtaaaagcagaaaaagattggaaatggacatattactctatcgattgtgaaaaattgcaagggttgattttgtttttgaatcatacaaagtgtatgcaaacgaaaaaatagtgcgagtaaaaatcgcatatattttttgttcatcaaatagataaatatcaatgttatgggaggcttatatgaaagacaaaaaggttgataaaacagaaaacaatgctttgcagccgaccgagaaaaagtcttggtacaacaagcataaagtcttattgatctttctcggaatccttgttgcaatcggtctggctgtcggtattgcagccattgttgacggagtcaatggcattactgtattcggtgattttattaccaaacagatattaggtatgcaatggctgaacacgctgatcggaaaggcttttacgggtatgttcggtgcggagtttatggcaacgcattggggcagtgcgatacagttctttatttacgataccattaagataattattttgctttgcttacttatctttcttatatcgtatattcaaagttatttcccgcccgaaagaacaaagaaaatactgggaaaatttcacggtgttggagcaaatatcgtgggtgctttgctcggaacagtgacgccgttttgcagttgttcgtccattcccatttttatgggctttacgagagcaggactatccggcggcgtcacattcagttttttgatttcaagtccgcttgtggatttgggggctttcatcttattggcaagcgtgtttggttttccgatagcgattgcctatgtcgttgtcggacttgtgcttgctgtggtgggcggaacgatcattgaaacaacaggtgtcggtaaaaatgttcgggaatttattcttgaaggagaaatagccgaaattgagggcaccgaactgacaaaaaaagatagattgatttatgccaaagaccagatgctcggcacattgaaaaaagtatggatatacattttaatcggtgtcggaataggggcaacgattcataatttcatacctaccgaatggatacaggcggtagtcggcgaagataaatggtatagtgtacttgtagcaagcgttgtcggcgtaccgatgtatgccgatatattcggaaccatccctgtggcagaggcgcttttcgcaaaaggagtcggagtcggaaccatccttgcgtttatgatgagcgtaacagcgctgtctttgccgtcaatgattatgttgtcaaaggcggtaaaaccgaaattgttattttggtttatcttgattgtagtgataggaattatcgctatcggctacatctttaatgcattgaatttcttatttatataatttaggaggataacaaaaatgaaaatcgtaacacttggcaactgctgtaaaaaatcacagaagaatcacgaaaacgctgtaatcgccgcaaaaaactgcggcattacagaacctgttgaaagcattggcgatatgtctgaaattatgaagtacggcgtaatggctacccccggacttgtaatggatggcaaagtcgtggctgccggacgaatgctttcagtggagcaaattgaaaaacttatcaaagacaggcagtaatatgagttgtcctaacgtaaatgaatgtatttgcccaaaggttagttgcccgaatcacggacagtgccgcaaatgcgttatgaaacatagagtcacagatagtttgccatattgcctgtttcctgataatgacggggataagtcaaatgaaaatcattatagagtactaaaaaagagatttgaagaaaattagcagaaaaggagcgggtatggacgcgcaagagaaaagcaaagaatactgtcgttcgctgtgagaactgtcatcaacggattatcgtggaaatagagggcggaaaaacatcggcaagaccgttacacaacgaaaaaacaccataagaaaaaaacaggacttgaataaacttcaaatcctgtttttgtttgactcactgaaagggttttgtttaattttctttttccctatgggaactgcgctttgccgaggctctttttaatttgtttacacggtgccgagcccgaacagacccagcgtcacgccgcagaaaatgaggagggacaaaacgtccgtaaaggtcgtgataaagggatttgcgaataccgcggggtcgatcttcaaagtttttgccaagatgggaatgcagcagcccacgatcttcgccacgatgacgccgaacatgatcgccacgcccacggcggcggagtagagcagggtatagggatagccgaagatgaaacggtcgatgagttgcaattttgcaaagcacacaaagccgacggaaacggaaacgaggagcgatacgcgtatctctttccagatgacgctcaagatatcgcgcggccgtatttcgtcgagcgccatgccgcggatgaccgtgacggacgcctggctgcccgcgttgccgcccgtacccatgatcatgggcacgcacgccaccaacagggtggaaagcatggcttcgtaggtattcaggataagccccgtgaacgtggcgctgatcattaagatcaacagccagggaatgcggtgcagatagatgcggaatacgcccgtttccagatagggtttgtcggacggcgtgaccgcgttgatgaaggatatatcttccgtcgcctcttcggtaatgacgtcgagcgcgtcgtctacggtgacgatgcctacgagcaggttttcctgatcgacgacgggaatggacaaaagatcgtatttggaaagcgtgttcgcaacgtcttccttgtcggtcagggtatccgcgtacacgaaattgtcctgcatgaaatcttccacgcgctcgttgtacgaatgcaggagcagatctttcaccgtcacgatgcccaaaagttttttctgattgtcggtcacgtagcaggtatagatggtctccttgtcgatcgcctgcgcgcggatcttttcaaaacactgctgcacggtcatgtcctgccgaagggaaatgcactcggtggtcatgatgctgcccgcgctgtccttgggatattttaaaatttcgttgatggattttctcgtttcgctgtccgcctgcatcagaatgcgtttgacgacgtttgcgggcatctcctcgatcagatctacggtatcgtcgacgaacagatcttctaagatgagtttcaattcgtggtcggaaaacgagcggatcaaaagttcctgctgtgtgctgttcatttccacgaacgtttccgccgccagttctttgggcagcagacggaagatgagcgggagtttttcttcgtcgatctcggcaaagatctccgcgatgtccatcggtttgagttcggataagagcggcttgagttgtacgaattttttatattccaaaaaattcaagatttctacgatcttgtcgtttcgctgttcgggatcggctttcaaaagaacttcctgcacgacgtcgaggggcatgctttccaaaagttcttcgggcttttcgtcgaggatctcttcggtgacttcctgcatttctatgtcgctgaaatgttccagcagcattttctgcgtttcctgctttaaaagcacgaacacgtccgccgcgagttctttgtccagacagtcgaaaagtttcgcaaggtgatcctcgtccagagtttccaaaacttttgcaagttcttcctttgtggcattgtctatcaatgcctgcagatcctcgtagcgctcgtcgtcgagaaaggagagtattttttctttcaaggcagtcacctcccgtttgattgattctttgtaaagtatatgttttttttcgggatttgtcaagcgcgcccgcgataaacttgataggcggcgcgttttgtgttacaatacagataaaataaaagaaaacaaggtgcaatatgaatcagagaatgtatcagttaggcagcaagcgctccgtcatccgcgaaattttcgaattcgggaaaacgcgcgcgcaggagatcggcgccgaaaacgtatatgatttcagtttgggcaatcccagcgtggagccgcccgcctgcgtaaaggatacgcttttaaaactcatcgaagagccggaccagactgcgctgcacggctatacctccgcgcagggcgatctttttgtgcgccgcgcgatcgcctcccatatccgcgggaattacgatgaaaacgcggacgagaattacatttatatgacggtcggcgcggctgcgtcgctgacgatcacgctttccgctctgtgcgaggaaggggacgaagtggtcacgttcgcgccgtatttcaccgaatacaaggtctttgccgaaacggcgggcgcgcgccttgtggcggtagagagcgatcccgatactttccagatagattttgaaaaactggaagcggtgctcggcaaaaacacccgcgccgtgctcgtcaactcgcccaacaacccgagcggtgtcgtgtataacagggaaacggtcgcgcgccttgcggaaacgctcgaaaaggcgtcggaaaaattcgggcatacgatctacctcgtttccgacgagccgtaccgcgaactggtgtacggcggcgtggaagttccctatatcacgaaattctatactccctccattgtatgctattcgtactccaaatcgctctcccttcccggcgagcgcatcggatatatttatgtcaacccgaaaacggagggggcgaaagaattatacctcgccgtctgcggcgcgggcagggcgctcggttacgtgtgcgcgccctcgctttttcaaaaactcgtcgcccgctgcgtcggcaaaacgtccgacgtgtccgtctatcggaaaaaccgcgatacgctcttaaatcaccttacgaaatgcggcttttcctgcgtgcggcccgacggcgcgttttatctgttcatgaaaacgcccgaacccgacgcatccgccttctgcgaacgcgcgaagaaatacgatctgctgctcgttcccggcgacgatttcggctgtaagggctacgtgcgcatcgcttactgcgtgtcgcccgatatgatcgcgcgcgctctgcccgcgttcgaaaaacttgcgaaagaatattcgctgtaagggggcaaccatgaaaatatttacgctcagtttcgacgacggcgtgacgcaggatcggcgctttatcggattattgaaaaaatacggactgacctgcacgttcaacgtcaattccgcgcttctgggtacggagggcgaagtgatcacgggtaaaaatcagtcgcgcgttccgcacaacaaggtagaagcgtgcgaagtcgcgtcgctgtacgacgggttcgaggtcgcggtgcacacgcgcacgcatcccatgctcacggggctttccgacgcggacatcctcgaacaggtcgtgggcgattcggtcacgctttcctcgctcgcagggtatcccgtgctcggcatggcgtatccgggcgggcatccgaattacgaccgtctcgtcgt

SEQ ID NO: 449 - DNA, 10402 bp, Unknown
  16S sequences of unknown bacteria
ccgccggcggcatcaaacccgccgtagcgcgcgcccgcgcctacgcgccctttgtgcgcaagatcgaggtagaaaccgaaacgctggagcaggtacgcgaagcggtggaggccggggcagacatcatcatgctcgacaacatggatccggagacgatgaaggaagccgtggctctgatcgcaggccgggcacaaacggaatgctccggcaacgttactgcagaaaagattgcacagctgcgggatatcggcgtcgattatatctcctccggcgcgctgacccattcctccccgatcctcgacttgtcgttgaaacacctccgccccgtggaagcttaaacgggcggacgcaaattcccgcacagggattcacttttccgttcctccttccggaggaaccgtattccaatccgaaaggagcgtttttatggctggggaagaccggcgcaaaaaaatactgcagctgctcaagggacagattctgaacggctcacagctggcaaaacagctcaacgtcagccggcaggttatcgtacaggacatcgccctgctgcgcacctccggcagcgagatcctctccacccgccagggctacatcctctcggcggacaacacctgcacccgcacttatcacgtccgctgccccgaatctgagattgaaccgatgctcaatgtgtttgtggacgccggcggcacggtgcaggatatctttgtgatccacaacacttacggcgtgatccgcgctgagctgcatctgtgcaaccggcgggaagtgaagcagtttattgaaagcattcacaccggacgggaagcggctctgcacgggctgtgcaaaggcggccactggcacactgtttccgccgacacggaaaacgccctggatctcatcgcccaggaactgcgtgcccggggctacctgatcgaacgaaccggcggcagtgagtctggtaacgcagatggcggcaaaaggggctgattccctgtttttgtaaacctttcttccttatttttgtggattttacctcttgttgcacgctgcatgcctctgctacaataaagaataattgatacttcactcgaaattgaaaaggatggatgaacgcatgaataacgccgcatctttgacgaagatgaaaaaagatgagctcgtggagctttgcaaacagaaaggcctgaccggttattccaaattgaaaaaggacgagctggtggcgctgttgagcgaagccatgggtgccggcgcacaagcagctccctccgccgcgcctgagcaggccgaagctgcagagaaaacggctggcgcagcggcagcgccccgcgccgaagcatccggtaccgccgacagcgcactgggccgttactgcaccgcgctggttaatttgtggggtattgctcccgccgccatggtggctgcagtatacaaccagttcaccggttcttccgtcaccgccgaagacgtggaagccgccgcttcctgccctgtggtaaacggcgaactgatccataaaaatctggccgaccgggacgatgagattgccgcgctgcgcaaaaagcaggcgcattacaatcactatctcccctctgccaaccatatcgacgattatctggatgagcgctaccgcgaaaacacccatgaattcatcgccatgcgcgattttatggtgcgttctttccatatgaaggaggcccttgccacagccaacgccctgcatatcctgcagtatctggacaccgaaaccgatgtgagctatctgatgagtcagttggccaccgccggcgtccgttttgaaaacgaccagcagttccgtaacttcgccgtgttgttgaaccgtatgaaatccaccgcccggttctggggcttttgcggccatacgccggaggaagccgaaaacttcgctcctaagcgcggcaccgtgcatgtgtataaagtggggcgcaatgatccctgtccctgcggcagcggtaagaaatataaaaagtgctgcggccggtaaataccatccgcggcggcactgtcacggaggtgtgtcgccgtgaacgttgatctcagttccttgtctaagctcctgggccacctgacgctggagagtgttctttcctccttgctgaccctcttggtctgcctgatcgttatcaagatcctctcccgtctgctgcagcgtatcctccggcgcacccagctggacgagcggcttcagaaattcctgctcagcggactgcgcatcctcggctacatcgtcacggtaatcatcgtggcacagagtctgggcatcccatccacgtcgctggtggcactgctcagcgtggcttcgctggcagtttcgctggcagtgcaggggctgctgagcaatgtggccggcggcatgatgctacttacctcgcgtcccatttcgttgggcgactatgtggaggtggctggcgtcaccggttatgtggacgagatcggcatggtgtacaccaagctccacaccgacgacggccaggtcattatgctgcccaattccagcatttccggcgaacggattaccaactattccaccttgggccgccgccgtatcgtactgtccatcggcgtatcttatgatgccgccgttccggaagtccgcacagcgctgctggaagcggccgccagcattgaaaccctgctggacgatcccgccccggtggtatatgtgacggcttaccaggaaagctgcatcgaatacactatttactgctggtgcgtatgggatgtttttttaagcaccaagctgaagctgaacgaggccgtcaagcgtgcgcttgatcagcatcatattgaaattccttataattaccttaacgttcgtattctggatggcagtgcagcgccgcctgacggacagacacgagcataaacgcaggttttgcgggcggcttctgacaggaagccgcccgctttttctccggcgccgaaaacacgtttcaaaatcgttcgaaagatgtacagcattttgctttcctcatctatatatcaggcagaaacgacaaaaatgaccgccgcagccctgtacctgatccgaaaccactgccgctttctatacctgcgctgcttacagttcaggcaggatcaaaatgatttaacggcgccccttctctcacggcgctggaaatcacgctggcaattataacaacgatcccacccttatccctttccgaagcttcgttttccgttgccctgaagggcgcttcctcaaacagttatactttgaccgtctggaagaacgaacgctgtgccgcttccctctcgcttttcgcttctttgccgaagccggaatggcgcagcctgatcacaggaatggccaaaagatatgtttttgtacttctattggaacagaccgcttgagcgccgcgcttccccaaaatggtagactttttccctgacatcggatagaatacaggtaatccctgtgtatcttttcccacgcccgttccggggatcatcataaaacgatcggaggataccctcatggcactatttggaaaaaagaaagccgcaaaagaatcatgcccgcccaaaaaaggcggcggaccggccgaaccgcaaccggttctgaaacaggagcgaagcacacaggatacatttcagcacgtctttttcctccaactcctgttccgcaaaatgcccatgtccccctccgtcgaagcgctgcaggccgcagccgaagcaaaattcggcccggtagacatcattacgggccaagatggacagggattgtgcagcttcgcagtcaaaaagtatatctgccatttcaaagacgcatccctgcctgcacaggtgaatttttacagtctgttggaatgcagcgccaaaaaagaattatcgcccctgcagcgcacacagttttgggatgtgcccgacggggcagcgctgtacgacagctgcccatatatcctggcaatttccgatttcatgtccgccggcctgcccgtccgggaccggtgcaacctgctgatggattggctggaggccaccttaacgctgctgccggactgtgcggcagtgttcaccccctcctcgggcaagctggtgacagcagaatccgtacgcacctccctggcacaaggtccggaccggttcattgcccattgcgtcaatgcgcgttttttcaacatcgacggcacggaggacgaccacgtcgtggataccaccggcctgttctcaatcgatcttcccgacctgcaataccatttccacactctggaccccaatttcgtggtaaatcatgcctacaacctggcttcttatcttctggccaatccagaagcgattcactccggcgatacggtagacggcatcgaccccgccaccggcgccatgtgccgtgacattcagtggcgctgtcagtatgaagacgccctgattcagccggttcggccggtgctggacgtttgccctggtccctttgccgcaggacagcgcggataacatttttccgcaaaagaaagcgaaatcacaatacagagggtaacttttgtcgaaaaagttgccctctgtattgcatcttatccaatttcgcaccacattccgtcaatggccgggccttttaccgggcctcaacgggctgtcgaatccgcttcaatcaaccgccgcagggcttccacccccacagtgatggccccctcagcgtcaaatacagcatcctgatcaagccccgctttttcccgctcctgattccacaaggcgctgaacaccgctccgcaccgcacaccccgagccgccgccacagtgaacagcgccgcgctctccatctcactggccagcgcgcccagccgtttccaagcctcccatttatacagcagctccggctccaccggcatggtttccggcgcatgctgcccgtaaaaagaatccttgcattgaaccactcccgtatgaaagggcttccccaaggcgcgggccgcatccaccagcgcacaagtggtggcaaaatccggcacagcgggaaattcaataggcgcgtactccctgctggtcccttccatacggatcgcaccggtggcaatgatcacatcgccggcacgcaccggaagcgccataccgccgcacgttcccacacgaataaacgtatgggcgccgatggcgataagttcctccatggcgatggccgcagatggcccgccgatgcctgtagaacagacgctgacgcgttctcctgccaaaacaccggtataaactgtaaattcccgattctgggatacctgctccgctttttcaaaccgcgcagcaatcgccgcacagcgctccggatctccgggcaggatgcagtagcggcccacatctcccgctttgcagcggatatggaactgtacttcttctttcttcatcgaaaaacagcctcctttcaacaaccgtctcaccgattcgaccacacggaagggaaaaacagcagcagaatcggcataatttccaagcgcccggccagcattccgaaacagaagaacagcttggtcggcgcagaaaagacattgaacgtgctggccggcccggccaattcaatgccggtaccggtattgctgacacaggcaatggccgcggacaggctggttcccagcgtgtgtccgtccacagaactgattgcggccagcagcaggataatgataatataggagaaaaaatagagcgaggctgccgttaacaccggttcttccacccgccggccatccacacagatggcgcgcaccacacggggatggatcacgctgtgcagctggcggtacataatgcggaagagcagcgtaaaacgctgcaccttaatgccgcccgctgtggaggcagaacatccgcccaccgccattagaagcagcagcagcatttgggaaaaagcgggccactgcccgaaatccgtgctggcaaaagcggtggtgctggatacggacaccgtctgaaatatggcgtgcccgatgctctccagcgcgccgaagccactgtgcagcgtcaaatcaagggatatcaataccataaccgccaggagcatacggaaataaatacggatttccgcattgtcccggagacgcatggtgcgccggatcagtaccagataaagcactgtgaaattcaggctggacagcagcataaacaccactacaatgacgttgactgccagtgaatcgtaaaagccaagactggccgaccggctggaaaatccgccagtcgccacagtagacatcgcgtggatcatgctgtcgtaccagcccaagccggcaatacgcaggcaaaccgtctccgccgccgttaaaataatataaatgtaatatagaattttggcgttctgcccaattttcggcgccagcttggttttaattggcccgggactttcggcccgcagcagaaagatactgcctgcccccagcttgggcagcagcgccagggtgagcaccagaacgcccataccgcccagccattgggtcaggctgcgccaaaacaacagcccccgcggcagcgtctccacatcggcgatcagcgtggctccggtggtggtaaaacccgaaaccgattcaaacagcgcatcgatcacattgggaaacacaccgcacatccaatagggtaccgcgccaaatacggaaatcacaatccagctgaatgcaacagcaaagaagccttcccgcacctggattttcgcctttcgctgctgctgaaggcacaacagcagcaaaccgaacacggtacagaaaaccgccgcagtgcagaacacaaacgccacggaccgctcgccgtacagcagagagaccaccagtggcagcagcatacagcctccctccagggccagcgttaagcccatcactttacagatcaggttgtgattcatcgctctctcttgcctctcccgcagacggcgccgcaagcccgtccatactctctttcttttttgtcattatagcaaaggccgccccgatgtgcaagcagggcagccgccgcacataaacataacgttttgtatttccctgtaaagtatgctataataagatactttccgtattgtctgcgcgcggccgcgccggtgccggtttcgctccgcaacacgattccaacccaacccctgaatctgacgaaatatggtgacgcttttggatactctactgcaatcgttccaacaactctttacaaactttcgggaggccctctccagcgccccgattcccgccgccccactggccggagcgctgggtgcggcactgacgctggcgctacatgtgctggttgccgtgctggcagtgctcatcgtctggcgctgcgccgcctcgctgctgcgcggccggacggaggaagagcactggggctttttcagcctgcccaacggcgcaaaacttccgctgaaccactgggaaaacattatcggccgggccgcttcctgcgacattgtgctctctttgcccaccgtctcccgccagcacgccgccgtgcagcgggatgaggacggcctgtggaccatttaccccttgggcggcaggggcggcgtggccgtcaacggcaaaaaagtaaactaccagcgggccatcacggtgggcgacaaagtgactgttggcggcatagacctttatttctttcccgccagtgcagaagaactgcggcagcagacccagcgccgtcagcgccccggccgccgctttcggcccacgacgacgctggcctatctcacagcgtttcaagggcttttgcttctggagctggtatacgccaaaggcgcggaattcacctctgtgctcatggggtgctttggtgtattgtgcgcggccatgtgggggctgtacgccctgtaccgtctgttccggcgcaccggattcgaactggaaagcctggcgttctttctcacatcgctgtgcctgtgcatcacagcctcttcttcgatttccacactgcccaagcaaactgtttccgtgttgctgggcctgtttgcctttgtcctgctggggctgttcctgcgggatctggccattgccaaaaagctgcgctggcccgtggccattgccgcctgcgccttgctggcctttaacgtacttttcggccagcagctgttcggtgcgcgcaactgggtcagcattggtcccttatcgttccagccttcggaattcgtgaaagtggcctttattctggccggtgcagaaaccatggatcgcctgttcgcccgccggaatctgattttcaccattctcttttccctgttttgtgtcggctgtctggcactgatgagcgatttcggcacggcgctgattttcttcattgcctttctggccatcgcattcctgcgcagcggcgatctgcccagcattgctatgatctgcgccgccgcagcagccggctgcggcgtggtgctgaaattcaagccctacatcgcaaaccgctttgccgcttggcagcatgtgtgggaatttgccgacaccaccggctaccagcagacccgcaccatgtctgcggccgccagcggcgggctgtttggcaacggcgcagacaacggctggctcaaatacgtgggcgcgtccaacaccgaccttgtgttcggtatggtggccgaagaactggggctgatcgtggctgtgctgacagtagtatgtattgtcacgttttctttgttcactataaaagccgccgccacctcccgctccaccttttacaccatcgccgcctgctccacctccactatgctggtgtttcagaccgtcctgaatgtgctcggatccgtggacctgctgcccctgacgggcgtaacattccccttcctctcctgcggcggatccagcatgatagcctgctgggccctgctggcttttatcaaagccggagacaaccgccaaaattccggtctggccgtgcgcctgccggaccggagggacgaaccgatccgctccggcggaggcggcgatcccatgctggaatttgatccctccgtctttgacagcccctctgtcccccctcgccgttccgctcccgccatcgacattcctttgagcaaaccgcgccggcacagccatgtggatgatgtgatggcagatctcggcagcatcgactttgcccatcttgacgccatcggagaagactgcggcatcgacgttcccctgcccggcgaagagcgcggccgaaaacggcgctcttccatcgacatccccgttgacgaccggaaaggagcaaaacgatgaagcaagtaaaacggcgcacctggttctgcctggtattcacagccctgctgaccctgggtattctgctctttctggcgcgttatttcaccgtcggcggagactgggcctccttcagcgccaacaagcatatttacgataaaagcggccagctgatcagcggcgctgtactggaccggaccggcaccgtgctttacgacgccgcctctggagcctacagcgacgataaaatcatccgacaagccacgcttcacgccgtgggcgaccgcgccggcaacattgccaccggcgcccggcaggctttcagcgaacagctaagcggcttcaaccccattctcggcaccaccgccggcgggcacaatgtatatctcaccctggacgcggatctgaaccggacggcctatgaggctctgaacggacgcaaaggcgctgtcggcgtatacaattacaagaccggagagcttttgtgtatggtcagcacccctactttcgacccggaaaacccgccggagatccaagatggcgacagccgctatgaaggggtatacctcaaccgttttctctcggccacctacacgcccggctccgtattcaagctggtcactaccatggctgccatcgaaacattaaacgattacgaaagccgcacctatacttgtaccggcagtacagaaatcggcggccagaccattacctgccccagcgcccacggggacatggatatctacggcgctctcgccaactcctgcaattgtttttatgctcagctcgccgtggaaatgggcggcaaaaccatgtggcagtacgcaaaaaaagctggtctccttgacagcctttccgtcagcggcatttccactgccgcaggcagcttcaccgccgccgctgagggcagcgccgacctgggctggtccggtgtggggcagtacaacgatctggtgaatccctgtgccatgatgaccctgtgcggcaccattgccaatcggggtacacaggtcccaccccggctgctgctgaaagaaaccaccgccgccggcctgcgcatcgggcactcccgggccgaaaaacacagcggcactctctcatcggacacctgcgccctgctggcctccatgatgcgccgcaatgtgactgaacattacggtcagagttctttcggcagcttggccgtgtgcgccaagtccggcaccgccgaggtgggcagcgatgcgcgtcctcactcctggttcaccggtttcgtagacgatgctgaccac

SEQ ID NO: 450 - DNA, 23566 bp, Unknown
  16S sequences of unknown bacteria
acggcgttcgtcgatcaaattttttcaaaaatcaaactgcgggggattattttttctttttatcgagttcttccaaagccgcggcgtccttcttctttgcctttgcttttttcttcgacttcttgccgtctttctcatcctcgacgtcttccagtttttcgtccgaaggcttcaccagcagaaggatgatgatgacgatcaacatcactgcggcgatcgagaacagaacgacggaagcgatattgtttttgagccactccgtttcgccgggaatgatatcgctgtccgcttcgacggaaattgccctgtatgcggcggctttctcgccgaacagattggagtcgctgaacaccgcaaagacgagatagacgcccgcttcctgcggcttaaaggatttggaggaaggataccaatagtatttattgtccgaattattccattcgtcgggatgatcgtcctcatcgatggaggaatcgtattcctcgatccttctcaaaatcgggtttccgtcctcgggattcaaaagatcgtccgccgtgagattctcgacgccgagctgttcgatcagaatctccgcgtacagtttcgcataatacccgagcgcatccttttccagctgtttttccttatccggggaagtgtccgccgccgctctgcttttcagcgtttcgaatttcaccgtgagcagatcatccgtcgcaaacgaggaatatttttggcggaacgccacatgatcgaagtaatacagaccgtattcgctttcgtgatcgagtcccttcaccgtgaaatcggacatattataggtgacgtcgatatagccgttgtccgcgctcttatcttcgttttcttccacgctcagaccgttattggaaacggagaacgtaaaggagggaatggcgtcgattttccagatggtatccgccgtgaccttcgtcttgtacccgtcgagatagcagtacatcgaattgcccactttgtccgtagcgaggatcttgaattcgtacatacccgccgtggaaacggcaagtttcagaccgtcgtagctcaaattcgtggaggaagcgccgtccgaagtcttggtcttataataaatgctgaatttcagtcccttataacccgtatcgttatcggtgatcaagcctttgaaagaaggcagataaatataggaattggagcccgcgtacacgtcctccgccgcctcttccaccgcttcctgatactgcgcaaacagggcttcgccctctgcactcatcgtggtggtcttagcgtcgtcgtcgtggatgatccccgcatattcgggaccttccgtattgcggtccacgcggatataatccacggtcacgtcctgcgcggcttgcggccttacggtttcctccgcataccaggagagataatacgttttggcgttatctcccgtataagtgtcgtccgccaacttgaatctgacggaaacgaattccattccctcctcttcgtaaacggaagtggtcgcggcgttttcgccctcgcccttggtgtagacggtgtcgaagaaataggtgctggtggaaagagattgatatttcgtttcctcttccgtggaatcggtgggattgtattgataatattccaacgtcttggtgacggacgtgtccagaacgtcgatgacctcgtaatccagcgagaaaggcatacccagcataaagctgatcacttcgtcgttgacgacgagcacgggctttgcgttatcctcgatgaggccgtccttcaattcgaaagtctgtccgttcagctccttgaaaatgagcgtggtatggggatcctgcgtcccgtcgggaaattccgcggtaaaggcgaaaggcaccatgggcgtggtggcggaggaggaaaaatactccgcaaaattggcgccgatattttcaaaggtgccgatgcttgtcccgttgaggaacacgaaaaactgcccttcttccgccagcttgtccccgtctttttcggaaagcgtcagcgttatatccgctttggagtcggcaagctccgtcgtttgttcgctctcgttgaccttgacgagaaccttgccctccgatttttcaaatacgattttattcgtcgctttcttgtctttgagcgcggtggcgggcgccgtttcaaacgtgaggttgaggcgggaaaaatcggtgtccttgaacgcgaacttcatggacagatatttcgcttcggtgcccgcgttttctccttcggcggtatcaaaccatttcaaggcgaggtcgcgcttaaaagaaacgctgctctgcccgtaaattttaaaagccagcttggacgcgtcctcgtcgtccttactcacggaagccgaattttcagccgtaaaaacgcgggtgggttgatacgtgaccgccgtcgtttcgtccgcaaaagcgggtacgttcgaatggagcgctatcccgccgaccgtcgacgagagcgccgccgcaagcaggaaagttaagattttggatttgtactttttcattaaagcaatgcctcgcaatttttgtaagcttttacctgttacaatactgtgcttcctttattttacaccgaaacgcgccttttgtcaaacgcatttaaaggtgaaataacctgtttttctttttttacgcaattttcacttgatttccaccgcggcggcgacgtcaaacgccttccacggcgtttcgtcctcgggcggatacgccataaagcgcaatcgctccttggtgacggggtgggaaaaggagagcgaatacgcccaaagcgccagcttccctttctgcgccagcgcgccgccgtaacgcatatccccgtacacgggatgcgaaattcccgccatctgcacgcggatttggtgggtcctgcccgtgtgcagccgaatctccgtcagagcgtacttgcctttgacttcgagcaccttataatcgagggacgcgaacttcgctccctcctccgtctgcgtacagatatacaccatattgttgacggtgttctttctcagataattagtaagggtgccgcgctccgtttcgggcgcgccgcaaagcacagtgagataccgtttttcaaaatcccccgattgcagcccctgcgtcagccttgccgcggctttggacgtcttggcgtacaccatcaccccgcccgtgggacgatccagacgatgcaccagccccgcgtagacgttgcccggcttattgtacgcctttttcagataggtcttaatcatgtccaaaaggttgtcgtccttgctgtcgtcgggacaacacgccgtcatctgcggcttcaagacgacgaggatatgattgtcctcgtacagaatttcaaatcccgcgtccgaagctttggaatcgaatttcgctcccggcaaaagcgcttccgtttcccgcgcgctttccgccgcctcctgcgccttttttatctcggcggcttcccatacttttttttccgcctgcgcttttttcgcttccgtgatttcagtcatttacaaaaatgcctcccgcaccgcaggggagagaaattccctcctccgtctttatgcccacttcgtaggcgtctgaacgccccttcctgcctttcagcgtaagcgtcaggatatttttcagcaccatgggctgcaaacccgtcgtataactgttgatcagaaaaaacagcggatcgtccgagagcagctcgccgcagagcctgacaaacgggaaaagatcgttctcgatcttccacatttcgccgcccggtccgcgcccgtaagagggcggatccatgatgatcgcgtcgtatttattgccgcggcggatttcccgcctcacgaatttgaggcagtcgtccacaatgtagcggattcctcccgcaacgcccgaaagccgcgcgttttcgcccgcgcgttccaccatgcccttcgccgcgtccacgtgcgtcaccgaggcgcccgctttggcgcaggccaccgtcgccccgcccgtgtaggcaaacagattcaacacttttatcgggcgccccgcccctttgatgagagcggacatatactcccaattgacggactgttcgggaaaaagccccgtatgcttgaagcccatgggcttgatcttaaaacgcaaatccagactttgataggaaatttcccattcttcgggcatgggtttgagaatcttccagccgccgcctcccttttcgctgcgcttataatacgcgtttaattcggggtaggcgaacaggtcggtctgcgccgaccagataacctgcgggtcaggtcttaaaagacacacgtctttccaacgttccagcttatagccgtcgcccgtggcaattatggaatactccgtccaatcctgtgcaatcttcataacaccttttcgaccgatttttgatttctttcctatcccgaacttccccgtttggaccgtaccgtttttataaaaagcacagcgcgcgtttaaaacggttttaagcgcgaacgtatgttcgatcaatacattcctcgggaagaagaatttttcgctgtaaggaggcaaaagaatgcgtttaaaagcattttgccgccgaagaagaaatcggacagtatttcaaaggctctttttgcaaagcggagagcctctcaaagacataatccgacattttgacttacttattatataggaaaacttgtcctttgtaaagtattttttgcgtggaaagcaaaagtatttgatgaagaattaagcgaattttttaattttcgtaagtagggcgatttttccgccgttcacttacgttcccgccccgtcagatagtctaaggtgcaatcgagataatccgccaaatcgattacggtctgcatggaagggtcgccgcctttttcccaaaaatagaaatgaccatgggactttttgaggtccttgaccagcctatacctcgttacgcctttttccttcatcactcggcgcaactgcggataaaatggctccgaaggatataaaacaaaatccagtattttttccgtttttccgaaaagaaattccaaagaacatttaaaataatccgccaaagcatttgctttggacaatttaatatttaaagtaccattacaccaccgacgaatggaagagccgctcactccaatttttgttcctaatttatctgaggtaagctcttgcgaaagaagaagctcagtcaatctttcaccaaatctttttaacgattccataaaataattttccttttaaacttttttttattgtccctaattcacgaacgaaaatctatatttgtgcgctcgttagcccttatgcatattaaaaattacgactctattcaaaaagtaagagtcgtaattcgggatactgttttaaccaaaatggaataaacaaaaaagtttaacgttctcgtcctgcaagctcatccaacgaacagtgaagataatctgccagttcgcaaactattgtcattgtaggatcaacacctttttcccaaaagtagaaatgaccgtgagatttttcgagattcctaaccaatgtttccctattgatatttatctttttcataattttatttagttgttcaaaaaacggcagtgcaggataaatcacaaaatccaacattttttcggaacgaccaaaaagaaattcgagagaacattcaaaaaaatcagccagttttaacgcccgagaaagttttatatttaattttcccgacttccaacggcgtatagtggaagcatttacttttatagcgtcagctaacttttgagaagtcatatttcctttataaaacattagttccgataatctttcaccaaatttttccagaggttgcataatctatcttcctttgttagtttatgctcccattatggctaatacacgcccataaaatccctctaagttcgcacattagccgcgtgaaaaattaaaaaaaacaaaagaataaggctaatttacgctcaaaacgcttgcattgtgcgtaaattagtagtataatatatttgataatagaaggagttagtatgcttaaaaagaaaatcgaggtccctattatagacgtccatatcgtcaaagcgatgatgaaggaaaaaaatatcaccgtcaaagagttagcggaaaaattaaaggtttccccttcttccgtatacaggtttctcaatgggggagatcaaaatttcgtcagcgccgagtcttatattttcttgcttccgcacgccttgcataccaccctcgacaagctcctgtccgaagaatttaaaaaagccgaacgggaatggctttccaagcctcccgacgaacgacattgattgcgctcatccccacttcatttggtgtttaacaaagaaaagtcctctctccgtttggagaaagggcttttctttgccgtttacagcgagttttctttatgttttcaacgtttataaaaaatctgttccccaagtttcctcttttccgaaaactttttttgaaaacaggcttatttcagagaaatatttgatttatggaaaattttgtaaattattttttaaatattcaaaacttcgatataattcgcagtattgaatatattatacttactgtatagattaatttcacggaggaaaagaacatgaaaatcaatgaagccgttgcaaaacgagtcgagcagctcttagaaaagcagagcaggacgcaatacgccgtggcgaaggaaggcgggatttccaattccactttctgcaccaccttatcgggcagatgcaggagtcgcgtagacaccgtcctcaatatctgccgaggattcaatatcactttggaagagtttttcggctcggaattattctcgaaagacaatctttcagacgattgaagccgccatacgaaaaaaagagagccgagcgaaatgcccgactctcttttttcgtgtttaacgatcttgctccaatgtagccttattataacacccgtttttcttttagacaagcgttttttattttaaattcaaaattttttttattttttaccctatcttttcatttttgacgagcgaaagcgtcactttatcgccgttgatatccacttctttcgtaaatccgtccgcgcgcccttcctccacggcaaccgccagaacgtcctcggcaaacgcgcccgaagcgagcgccgctttcgccctgccttccgcggtatagtaaatcctgatgcggtcggtgacttcgaagcccgcctcctttctcaacgtctgtattttggaaacaagctcccgctcgatcccttccccgatcagttcctccgtcaattcggtattcaacgccaccgtgatgcctttatcgctcgcggaaatgaagcccgctttgctctcggtgaaaatttgcaggtcctcttcggtcagcttaacttccctatcggtgtccatgacgtactcgccgccgccctgcaccccttcgacgacctttttcgcgtcgcatccggcgaggaatttgctgatggcgcccaatttcttgccgtatttgggtccgagcgtttttaactgcggtttgagtttataggaaataaattcgtccgcgtccgccgccgtcctgaacttcttgatattcaattcgtccagcgcaatcgccttcaagccctcgtccaatcctaactcccgcgcggtgacgacatacatttccgaaagcggctgacgatttttgacgttgcccgcgtttctcgccgctctgccgaggttgacgatatccagcacgctgtccatgcccttttcgagcgccgcgtccacaaaggaagcgtcatacgtcggaaacgagcaaagatgcacggacttgggcgcgtccttaaagaaagcgggcaccaaattgagatacatctgctccgcgataaacggcgtatagggcgcggtgagtttggcaaacgtcacgaggacgtgccagagcgtggtatacgccgccgccttgtcctccgtcatctcgctgccccaatagcgctcccgcccgcggcgcacgtaccaattggaaagaatgtccgaaaaatcctgcaaagcgcgcgcgctgtccgtgatattatagacggcaagctgtttatccaccgtatccacgagcgtattgagcttggagagaatccatttgtccatgagggacagactgcattttttgagatcgtattcggcgggattatagccgtcgatgtccgcgtacaggcagaagaaggcgtaggtgttccagagcgtgcccatgtattttctctgcgcctcgctgaccgcttcgggataaaaacgcgaaggcaaccacggcgcggaggacgtatagaaataccacctgaccgcgtccgcgccctgcttgtcgagaacgctccacggatcgacgacgttgcccttgtgcttggacattttgacgccgtttttgtcgttgacgtgtcctaaaacgatacaatttttgaaaggcgctttgtcgaagagaatggtggaaatgacgagcagggtataaaaccagccgcgcgtctgatccacggcctcggaaatgaaatcggcggggaaggtttcgtcgaacagcgctttattttcaaacggataatgatactgcgcgaagggcatggaacccgaatcgaaccagcaatcgataacttcgggcgtgcgcttcatcctgccgccgcacttcttacaggcgcaggtgagttcgtccacgtacgggcgatgaagctcgatagtatcgggcgcgccgcatttttcttggagttccgccttggagccgatcacttcgatctcgccgcagtcgggacatacccaaacgggcagaggcgtgccccaataacggtcgcgggaaagcccccaatcgatgacgttttcgaggaaattgcccatacggccttccttgatggtgtcgggcatccaattcacggaacgattggcggcgatcagtctgtccttgactgccgtcaccttgatgaaccagcttgaacgcgcgtaatagatgagcggcgtgtcgcagcgccagcagaagggatagctgtggacgatctcctgcgttttcaagagaagtccgcgttttttcaggtccttgacgacaagcggatccgccgcctgcgccgctttgcccgtaaattcgccgcagccttcggggaatttcccctcctcgtcgatcagctgcacgacgggaagcgaatatttgcgtcccacgcgatagtcgtcctcgccgaacgcggtggcggtgtgcacaacgcccgtgccgtccgaaagagtcacgtagtcgtcgcaggtgacgtaatacgccttttctcggaaattgaatttctccctgccgtagggatagagaggctcgtattcggtgtattcgtagtccttccccttctttttggagaggacggcgtatccctcttcgcccagcaccgactttgcgagcgcttccgcgaggatataatgctcgcccccttccgtcatctccacctccacgtactcggaatcgggattcatgcagagggcgacattggagggaagcgtccagggcgtggtggtccaggcgaggatataggtattttccgcgccctttaccttgaacttgacgaacgccgtcgtctgtttgacgtccttatatccctgcgccacctcgtgggaagagagcgccgtgccgcagcgcggacaatagggaacgatcttgtgccccttataaagaagccccttttcgtggatctttttcagcgcccaccactccgattcgatatagtcgtcgtgataagtgacgtagggattgtccatgtcgcaccaatagcccacgcggtccgacatctgcttccattcgttcgtatactgccagacggactttttgcattcgccgatgaacggctcgatgccgtatgcctcgatctccgtcttatggtcgaatccgagcttcttttccacttccagctccacgggaagtccgtgcgtgtcccagcccgcttttctcaaaacgtgcatccccttcatcgtcttatagcgggggacgatgtccttcatcacgcgggtgagaatgtgcccgatatgcggtttgccgttggccgtgggaggaccgtcgtaaaaggaaaactcctccttgccttcgttcttcttcacgctgtcttcaaagacgcgattctcgttccaatactccaccacccgcttctccctgtcgacgaagttcagggaagtgtctacttttttatagagtgacatactgcaccgctccttatgtgttttttgcgttctctttcattcaggcgttctatcttcctttgcgcgctttttttcgggcagttttatgcgtcccgcggcgcggcgaacgcggtttttgaacttttcttccgaaataaaaaagaaaagccgcgttttggacaaaacacgacccaccaaaacaaaccatcatttgccgctccgataacggtgagcgaagacgtaccccgttactttgcctgcgatatgcgggctttcccgggataagctcggcgggcgatatttttcgagcgcgccttcttcctctcagcaaaacggaatttctctgtgcggcgcaggattcgaaaacggttgtcccgctttgaacgcttttgtttctattcgattttttatttttacagccccgacgttacgtttgcatagggcgaaagaatgcctataaatactccgtatttccgcttctattataacatcgcttacgcaatgtttgaatagggcgaaaaaatgcccataaatacttcgtgcttccgcatttccgcttctattataacttattttttccgctttgtaaagcgaattttccgcaagttatcgatgaatttcgatttttcccgcgattgccgggccgtcaggcgaacagtccccttctcggggcgatcgaaagcacctcgaagcccgcggaacgcacggcttctttcagttcgtcgtcgggcgtggtgctgagcacctccacgaaaatgctgttctttttataattggccttcgcctttaccacgccctcgcaaagttccaaagtacaggcgaggcgattggcgcagcgctcgcagcaaagatcgcttacttcgatgacttttttcatgatattcgcaacctcccttcgattgcggcgttccgccgcgaaattccgatcgttcccgaaaattcgctctcgtcaaggggtgacgcggttgatatccctcgggaacatcgcggcttcgcgcacgtttttgaagccgagaaggtgcatcgtcaggcgttcgagtccgagtcccaagccgccgtgagggggcgctccgtacttatgaagcatgagataagtttcgaactcgtcgggattcatgccaagcttcttcatcttttccacctgcgcgttgtagtcgtgcacgcgctgaccgcccgacgtgatttccatgccgcggaacaaaaggtcgaacgataaggtatactcggggtcctcgggatcgtccatcgtatagaaaggacgcttcttggagggataatgcgtgacgaaaagaaaatccgaattaaactgctttttcgcgtacttgccgagcagctgctcctcttcgggatcaaaatccttcatgtccgagggctgatacttaaactttttcatcaaaagctctttggcttccatgaatttgattacggggatttccgttatttcgggaatgtccgcgtgcaaaagctccacttcgttcttatattccgttttcagaaggtccataatatatctgagggcgcccgtttccatgttcatgacgtcctcgaagccgtcgataaagcccatctcgaagtccatggaaatgtactcgttgaggtggcggctggtgtcgtggtgttccgcgcggaacacgggcgcgatctcgaagactctttcgtacaccgcgacgagcgcctgtttatagagctgcggcgactgcgcgagatacacctgcttgccgaaataatcgagcttgaaaacgttggtgccgccttccgcgcccgcgaaattgatcttcggggaatgaatctccgtaaagccctgcgacatgagatattccctgaaaccgcgctggattccttcctgaaacttgaaaacagcgcgctctttgggatttcggagcgtcacggggcgatagtcgagatcggtattcaaatcgcactgcacctgttttttcgtgatgaccaccgggggaatatccgccggataagacaggatctctatgtcgtggatctgcaactcgtaacgcttgccgccgtcccgcgtttcgcccgcgacgaccttgcccgtcagtttcaccgcacactcttctttaagctcggccggcatacgataatcggaaaaggattccgcatagacgcattggatggtttcgcgcgccgtgcgcaggataacgaaagcaaaatcggacatcatgcggatattgtgcacggtgcccgtaacggtgatctcctgattttcgtagttgccgaactgggaatacgggacggtattcgtcttcggttcgcctgtgattttcataactgaaagcctctttgtttgatgtgtttttatttttttggaaaatttttccgacaacggactcttttcagatttttttacctttccattttaatccgtttgacaaaaaaaagcaagaaatttataatagtttcataaagattttttaaggagtcggataatttatgcgcgttcttgccatcaacgatatttcctgcgtgggaaaatgttccctaaccgtcgccctgcccgtcgtttccgcctgcggcgtcacctgcgacgtactgcccaccgcccttctctccacccacacgggcggattcgagggatatacctttcgcgatctttccgacgaaattcccgccgttttaaagcattgggaaagcctggggctgactttcgatttcatttacagcggatatttgggcaacgtatctcagatcgaaacggtgcgggagataaaacggcggtttttgaagcggaacgggaaatttatcgtcgatcccgtcatgggcgacggcggaaaactgtacgcgcactttgatttccattttgtggaaaaaatgcgcgttctatgcgaagaagcggactttattctccctaacgtcaccgaggcctgtcttttggcgggcgaaaactatcccctttccatcgagcgccttcccgccgagaaaatcgtcggtatcttgcgttctccgcatacctgccctatcgtcacgggcgtggaagagggcgaggaaaacgccgtgtactacggggaggcaaacggcgtaagccgctacgcgctcccgcacgccaaaggtttttttcacggggcgggcgacgtattcgccgcggcgtttacgggctgtttggcgaggggaaaaagcaaaaaaaaggcaatcgaactcgcggcaaattttacgacggcagccattttccgcacggcaaaagcgggcggcgacagccgttacggtctgcttttcgaagaggaaattttcaattttttaaaagaactcgcggaggatgaaaaagaataaaacacccccgatttttagcttccctttccccataaaagaaaaaacgccttcattctgttgacaaaaataaaaaaatacggtataatattctcagatctgcggtgtacggagttcggattgatcgtaatccacattatgaattcgggaaccgacattcggggcgataggcaaggtctgtatttatacggaaagtccgaagcgtcaagatgcggtacccacctgctgaaagcgggttagcttttatccgaagtgcggcacaggcggattttttattttgttttgactgcgaggagaacttttcccctcgcttttctttaaggatagggcgtttttttaaaggtccttttcagactttttcaaggactctatgacagaaaaaaaattttcgaaaaattttatttccgttaggcaaaaacagttgccctgaaagaaaaaatatgctatactacataagcaaataagccatggccttatggtcaagcggttaagacgacgccctctcacggcgtaaactcgggttcgattcccgataaggtcaccaaacaagttaaaggcgaacccgtttccattaggagacggattcgcctttatcgtatggttttaattatactttttacggtttctaaactttgtgtaattattatcgtcttcaataggagtgttctttaagaaatcttgtacggaatcaatgtctaataaattcattagcctgattaagttgtagccgtctggttttgcttcgcctttttcccatttttgatatgttcgtacttgtattcctatagaatcggctactaattgttgtgttaaaccagctcgttctctgaatttctttaatgtactattatcaaaatccattactaacggtccaaaatatattggatcccaaataattttttcgtcgtccgttgtgtaaggtaaataaatttttgtcataggcgttagtcctatgcgtaattctttttctaagaatttaggatctgatgtcatcccataagcattatccacttcaatatatgccgcattttcaatccagacgcctatccattgtaaagctgcttgattattctcgtcataaggtaactcgcccccaacaattatttcattcccatttctgatatatggttcattaaagcctacgtatcccgtatcaaagatatcggcgttttcaccagccaattctaaaattttattagtttcaaaaaggaaatttttaggatatttgttgtcgatatgcaatttatcacacaagtctaaataatgcgcccatctaaaaaagaacccaccttcattatcggtttcgcctattttatgagcgtagctcataatgtcaagaatgctcatccctcttatgtaaaacattttttctaatgccgtatataaatcttcaagaactttgttgtcttctattttataagcatatttactagtaatagtccttataatatctgacaaatccccaaactgatccttatcatagtttggggtataaaaataaaaagggactctccgtacaaatatttctgtatctataggataatatccatatcctcgagtaattaaacgaccataattattatcttctcttatggctatttgaaaaatttcttcgcctacaatatcgtgcagttttaaataagaaacaattttatctatatcaaaagtatctttttttataaattgccgaataaaattttcttgttcttgggttatcatatgcgcctcctaaatttataatattattatacacgaattaaagtacataatcaagcgtattttttggcgtgtaaacgcgaacaataattccaaatagcaaatattctattagtaaatcagaaaaaaactatggctgtttacgaattgaaattcgtatcattaaaaaataaaaaggcgaccccatactaatgcgaatagggtttgcctttttgtatatttacctataattcaatttttacgttcttgccatttcgggcaagcggatgccattgccgactgtccacagttgcctctgctgctaattttgcaaacatgcataccattttcaaattcaacaatgcttcctttcaactgtgctttaccaccaaaatgctgacaagtatgatggttggtcattctattgaattgtgagtactggtttagcttaaaaagatacctcttaaccgaaaaatttgtaacacaaaataaaccatctacgctatccgactttcgcatcctcataggaatctcggataactccggctgcacattttattgccgcaaaactgtacgacaataaaagcctatcacggctcacgaattttgcgtacaattaaaaaactacgctctttccgtaagctaaggcgtggcggttataccgcccaaaaccttctgccttctgtggacgaactctttaaccgtccaccgcagaactcctaccccgaagggtactacaccacaaactacattgtggtagtgtgcattatatcacaaacttttgttcgttgcaacactttcaacgcccataaacgggacgtgaaatgactttttataggaaattttgtcgaataataaaaatgaaaacttttcatatacacaaaaaacttttcattttaatgttgacattaacagataattcgattataattactaagaggtgattttatgaagctaattgaaagaaacgaatatgttgcttggttaaaaagttacaaagataaaccattgataaaagtcgtaacggggcttaggcgtgtcggcaagtctaccattttcgatttgtatattcaagagcttaaaaaagagggcatcagcgacgaacaaatattaaaaatcaattttgaagatcttgataacgaacctctccgtgacaagcgtgcgttatactcgcacattatagcatcggcaaaagatggtaaaactctctatgtctttcttgatgaaattcagcgagttgacgggtttgaggaagttgtcgacagcttatttataaaagaaaatatagacgtatatattacgggatctaacgcaaaatttttatcttccgagatagccacattgctgacagggcgctatgtggaaatcaacgtgcttcctctctcttttaaggaatattatgcccatttcaaagacaacggaaaaagcaagcgaaacctttttaccgattacattacctatggtgctcttcccggaatctttatgtttgagacgggtacagcgcaacagcgcgaatatatcgaaagcgtttataaaaccattcttgaaaaggacatattaaaacgcaattcggcggcaagcaaacaacttgtagaaaatattttgagctatctcgtctacaatattttcattttccctctctatttcaaaactattattatgccaataattatccggtaaaaattccccatactccttcctatattgttcttcgtcgatttcaatagataaatatctcttttcataggcagcgttattataagtaatttttccctttacccttatataattggcattatcgctataatactcatacaattttttccgttcccacggctttatcgcaaacggattacaccctacaaaaagaaacatcgtactcagtacgccgattaaaaaatatttatatttctttttcattccccttctccgatctgtccgcagagattttccccggggcattatcgtaatatccccttcaaaaaaccaatcagtcctaatattttccgttacacgctgtttccccgttcgtgtttcgttttctcctaaggcgtattttgaagggttaccccccccccgaaaaagacaaggacacgaagcctttttacccgccaaaaagatttgttccgttcggatcgacattcctcacgggattgttcccgcagtaagcgtacaaattcaagccgtttatcgcatcgggcgcaagatacgaaacatcggctattgtgataaatctgcctgtttcggggtcatagtatctcgtttttaagaaatataagcccgtttccgtatcgtaataatatccgcgataacggaacggattgagaatcccgaccttattgaattgagtacacttgtccagcgtcagctgatttccgtcctcgtccaatactgcatgatttccccatccgtcgtatttatattttacaatactctttccttccctgtcaaggattcccgtgatatttcccaaaatatctttccttagcagataatcctcgttattgtattttatgcccgccactcccgttgtgtcatagaggaattccagtccgttgctttgcttccacagtttcccgtcgcttccgtacgtatagacgatcgtattcttccggattcgtcttccttctccgtcgtaggcaaacgtgttcccgttcgcccacaccaactgccttcctttctgccatccgtattccttatcccgatatttcgcaggattcccaagagcgtcatactcgcatttctcatttccgtacgacagcaacctgtccccttcatacacatattctttcgatacggattctatctcttctatttcttccttattctttactgtaaagcctatctctcggcgcgtgagaatatttccgctattgtcgtacccaagcaaatatgttttattaagttccttattatcctctctcatcagacgattccgtttgtcgtatgtatatcttaccgacagatttccgttctcgtatattttcgaaatgttccccatttcgtcgtaggaatactcatatatacgcgcggacttgacttttgcaaagcaagccttttcctcctctttcaaaatcgcgggattgctccccgctcccccattttcccctatattttctttcgccgcgtaaacgcgctcctgcgaggtcgtttcggaaaagactccttccgccggattgtttaatttgatggtatccattttatctcctccattctctttttatacattttcgcccgccgaaatgctctttttctccacggcgtcgataaaatcccgcacgcgttcccacgcatagaccgtcagttcctcatcttcaaattgaatcccgaatttatcttccgcttttacgaccaattccacaaaggacaagctatctatgctcaacagcgcaaacaggctttcctcgttcagattctcttcttctccggcgcacacttccccgatcaattcgagcgcttcttttcgtaagctcatacctgcccacctcgttttaatttcccgctcggagtatattccaattgtgcattcaattgatattcgtttggaatcaaatgcggcggcagatttttcgccgcgaattttctaagttccgagagcggcacgctgcccttgattttggcgcagagcttttgtccgtatctctcgtcttccctgccgtatacaaggcattcttccacgcccggaaactccttcaatacgcattctatttcctgcggaaaaatattcacgcccgcgcggataatcatgtcgtcctttcttccgtccacgtaatagtacccttcctcgtccgtgtgcgcggcgtcgcccgtatacagccagccgtaacgaatcctcgcctttactccccggtagtaccccttcatgacgcacggcgatttcaccaaaagttccccgtcccggatcctcattttcacgttccctatgggcttgcccacgcttcccgcttttctgataaaatcctgcggaagcaaagcgctcaccctcgggctgtgctccgtcaaaccgtagacgttataaaatttcgtgtcgggaaacttttgcgcaaggagccgcgcggccgcttcggtgagccgttccccgctgattgcggaaacctttatctccggcatagccctaccccgacagcgcgccagggaagcgtacagagtcggcgtggcgcaaaacacgtcgattttccgctccgcaagaaacgccattaatctgttcggcaaaaaaggttcttcataaaaatgaatgcacagtcctttacagagcgcgtataacaactctcccgtcagcaccgcgatatgcaccaaagggcgcgcgatacagatattcttcactcccgtcatgtcgaaataagcggagatatattctaaattggcaataatattttcatgggtgagcatgacccctttgggcgtgcccgtggtgccgctcgtaaacatcaaaaacgccaggtcgtcgtagccctgtctatcttctttcaccgctttacaaatataattgtattgccggattccataatcgagggaaacggggacggcgacgtttccctttgccatacatctcagaatttccagagcctgttcctccctcgtcctgcccgcgcagattttaagccgtcccttttttccccttctctcctctaaacacagtaagtccccgtacgttatccccgtatccgcaaacgccacgcgccccttatacgcgctcatcttttcctttacgtaatcccatatgctcttttcatagatatccacaactctcttctcaatggttcttgtttgtgtaactttcattgttcctccgtatttcacggggaaacccaaaagaaagacggcacggataaaaaacgcgccgcctctatgaaattttctatgaattcagcatatcgattatattttttaagtttccccgcttcatttgttttttatttttatttcctctgtattcgtgtgcaaaaaacttccctcttcccgattcagttgttttctaaaacgagaaaatcgatttaatttaccgtttccttaggcgggaggccccctgggacgacgataaacgcttcttaaatatctgtcggggaaaatcggattttcgagaaagacgcttaaagtcggacggaccttacggtttttttgttccataaaacaacctccgatttgtattttgtatatacaacaatcgaaagcctatttttgtacggaattatttttaatttataaaaaattttatcttttctgttaatttatggagatgatcggcgatcgtgcttttggggcggcagaggatttcggacatttccctaagcgagcatccccatttataacgataggtaagcagcgccctttcgtagcaatcgagatttttaaagagatccgaaagaaaaatcctgctttcgagaattcgctcctcctcgccgtttttccaaaagatattttttatttcctccgtttcccgatagtcgattctcttacggcgtttgagcctgttttttatcagattttgagaaatcttcgttatccatgcgcaggcgttctgattatcccggaatttgcccgcctttttatagatctccaaataagtatcctgcacggcgtcctcgacgtctgccctttgggtaaaataactatttcccagcctgtacaaaatttttcccgtctgcttataaatctgttcaaaggcggacatactgccctgcgccaattgaaaaatcaactcgcctaactctttgtttgcattttcatacatagataaatattcgtccttatttcgtatcctttctcattttttctttcggaaggcttccgcgactttgatgagtacctgcaaatcctccgtttccagatccttggcgattcccgtcagtttatctgtcagggaagatttcttctcgttttcgttgaaggcaaaaaattcgcttagcgtcacgccgaatttttcgcaaatccccaccagcgggggcagggtgggcgaacgggaggaactgtaccattgatagatcgttcccgtcgaagaacacgagcactttcccaattcacacaggctcaaatttttctcttcacacaatttgtcaatttttttcaatatttgttcttttatcatggggtcaagcgtcataaatcctttcatctcctctgtttttaacctatattctcacaataatattattatattataccgattataaaagtcgttatcacagaaagattgaaatgtacttattttaataagatacgctctctttgttccttttttgaaaggcacatattttcattaatcgcgcttcccgcccttttcattctatcacatcggcgctcaaaggcaacgatttgttttgtttttcctgcatttttattttaattattttcaatatcatttttatcgcaagatcgcgtcccattaatttttttcgggaaaagcgccgagttttttgctctattacgtctgtttttaattcgtttaacgaaaaaaaacaactttttccttcctcctatctcctttattctttctcaaaagaacagactccttttgatttttgaatatcaaaaagcgacggggtagattacctcgccgccttttcgataagataaaattttccattccttttaatactgcgtgcgttcggcgatattcctgcggaattcgcgggaaagattggaaaaacgttcggaaaatccccccacgcgcacgatgatgcttttcgcgagttcgtcgtcatcgactgccgcggtcaatttttccctgtcgagaagattgatttgcagctgattgccgcccttttcgaaaaaccccaaaacgagcgatttgagagcaaggcgggcgttttcgccccttaaaatcccctcgttcagcgccatgttcaccacccagctccccgccgcccgcacaggctttatccgggcgacggaattcaaaagcgccgtaggcgaaactctgtcccgccccgtcatagcgccgccgctgtcggcgacgggcgagcgcgctttgcgcccgtccggcgtcgcgtcggtgatctctccgatatacaaagccgtgttgaacatgatgcaggcggggagaaagcgccccgagcctatcgcggtccgataaagcgccaattcgtcgcacaccgcgtcgaacgcgcgctttgccaattcgtccgcttcgaagttgtcgttgccgaacggttccaattcgccgagcgccttcatatacccgcttcccgagcgaaaatcctccgcgagaatctcccgaagataggagagggaaaagcgtttgttttcaaagacaagctttttcagcgcgtataaagagtcggcggcgttggcaagggcacagacgttgatgacgctgaaatagtaagccgcgcctccgtcgttatactctctgcccgacgccgcgcagggcggacaaagaaaagtgcgaacatactgcggccggcttcgcatcgcgcgcatctccgcgttgacttcttccacgatcgaacgcacgtagtctttcaggcgttttttatacgattcaaaaaagatttcgaacgtttgaaattccccttccgccagcgtatctgccagcgtctgcgccatattcagccccgcgtcgatggagcctacgttagaaagccccgccagcatcgtttccgaacacccgccgtaggaaagcatcggcaagtcggcttctttaacccccagttcaaacaatgcctgttcatatccccgcttgttataaaaagcggggcgtgctcccctttccatggcggaaaaacaggcattccaaagctcgtcgggcgtattctcgtccactttgacggaaaagttcggacgacttgcgccgcggaaggcggaaaccgcgacagcgctcataggaggagcgcccccgatcacgaaattccaggcgttatttttttcgtaagcgtcgtataattccccgaacagcagcgttgcgtccgcggacgcttcaaaaggcgcaaggcatagatcgatattccccagactgtcgaagccgtcgagcgcgaacacgaacgcaatgcggacgaacgcgccgaaaaaatcctccgccttcgcagcgagaaaagactcgtacgcccgcgctaacgacgccgctctttccgtcccgaacgaacgcagatactgtatcattctgcgcacatagccgacgagcgctttaccgaacccgaccattttgcatcgcagcgctcccgcgccgtcgaaaagagcgcaatactccggcaacgaacggcacaaaaattgcctacattcgggacaataatgggtgaagcccctccccgccagtgcaaaacgcacttctatggaggagccgacctcgtataattttccatactcggcggcgacaaacgccttttcgtcggcggtgagcgcgctttgttccagcttttttaagtcgagagaaagggaagcggaataatcgtaattgagtatcccgcggcgatgccagacgcttttcaaaggatagagaagggtattttcgtattcggggagcggcgcgttttcaagatactccgtcaaagcgcccagaagcgcgtcctcgccgcgaaaaaatcccgcc

SEQ ID NO: 451 - DNA, 3413 bp, Unknown
  16S sequences of unknown bacteria
cccgccgcaagggcgtcgtagactttcatgctctcgtccttgagcgccttggtggcgagcatctggtagcacatgacgctttccaccgcgagcgcaagccatgggctcaccatgccgcagagcacgagcagggctatggcgcaggccgtggagatggtgcagaccaagacgacgagaacgccgcctgcgatgcgctcgcctctcggggttgccggaaaggcacggcgcaagatgcgctcgagccccgagatgaggtgcccgatgagcctgatgggatgtgggagccaatgcgggtcgcccacgacgaggtcgagcgcgaacccgatggccagtgccatgaggtgctggggcatcaaagcgcgcctccccggcggtaggctgcggccgcttcgacgaagcgcctggcggcatcggggcagctcgcgaggtagaggtgcgggtagccggcgaagagcgtcggcgtcgcgtgcacgcactcccactttcgcgtggaaagcggctttgccgccgtgaaatcgtccccgcagttctcgctgtcccagtagtggaactcgtgtgcgggcagctgggcccctgcgcatgcgagcaggctgtcgccgtgcgccgtgagcgtgacgtagccgaagcgcccgagacgctccgtcttaaacgaggtgcccgcgatcgtgccgaccatggggtggcgcacgcccctctcgtcctcgagccactcgtggaggtacatgaacccaccgcattccgcgaccgtgggaagccctgccgcgatcgccgccttgaccgacgcgcgcatcgactcgttggcagacagcccagaggcgtgcagctctggatagccgccgcccaggtagagcccgcttgtgccctcggggagcccggagtcgacaagcggggagaactcgacgagctgcgctcccagctcctcgagcaggtcgagcgagtcgcggtagtagaagcagaacgcctcgtcacgcgcgaccgcgatgcggggtcggttctccctggtcacagcagtgccgaaacggggtcggttctccctggtcattgctgcggccgtgcggggtcgattctcgctggtcacagcagcgtcagaacggggtcggttctccttggtcatcgcgtcggggcagtcgagctcaggggcggtggcggcgagctcgagcagcgcgtcgaggtcgacggtgtcttcgagcaccgcggcgatgcggtcgagcgtgtcacgcaggccctccacctcggaggcggtcaccaacccgaggtgcctgctctccagaccgcagtcggcgagcacgggcaggtacccgagcacgggaacgcccgtctcgtcttcgatgatcttcttgaggcgagggaagtaccccgcagaaacgcggttgacgatgacgccgcagatcttgctcgggtcgcgaaagcgcacgaacccggtaacttccgccgcagccgacagcgcacgcccgcgcccgtcgatgacgaggacgcacggcgtgtcggtcttggcggcaagctcccaggcagacgcctgcgcgctgcccgcgatgccgtcgtagtagcccatcgcgccttcgatgaccgtgacgtccgcctgccgcgcgcccttcgcgagaagcgcgcgcacaagcggggcatcggcgaagaacaggtcgaggttgcgcgaggtggccccaaccacctccgcgtggaacatcgggtcgatgtagtccgggccgctcttgcaggcctgcaccttgagcccgcggcgcgcgagcgcgcgcatcagcccgcaggcgaccgtcgtcttgcccgtggcgctcgccggcgccgctatgagcacacgtggtgcgcagatgctcatgcgccgctcgcctccggcgcctcggaatacgcctgggcagggtccggcgttgcctcgggagcatccgcgctcacgatgagaatcgggttttgccccttcatcatgtggtagctccccacctcgtggcagcgcgcgacgcccacctgcacgatgtcgacgttggcaaacgcgaacttctccaggcagcacagcgcctcgcgcgtgaactcgagcgtgatgccggtgatgacgatgcggaccttggggttggcggcaagggccgccgccacgatctccacgagattgcccgacgagccgcccacgaagacgcggtcgggtgcaggcaagtcggcgagcacctcgggcgccttcccttggacgatctggatgttggtcaggccgaaacgcgccttgttgcgcttgagcacgtcgatggcctcggggttcttctcgacggcgaacacgcgcccagccgccacggcataggcagcctcgacggaaaccgagcccgtccccgccccgatgtcccacaccgtatcgtccttgcgcaggtgcagcttggcgatggagacctcgcggacctcctctttggtcatgggcgcgagattgcgcgcgaacgcgctgtcgtcgagcgccggggcgcgcaggctgcgcttgatgggatgggcgttgagggccatgagcaccgcgaggtcgccgaactccacctgcgcgacttctgccgccgtgccgcccacgatgcgctcgtcatcgtaggagagccgctcgcccacgtgcacggtgacgtctcccatgccccgggcgaccagctcgcggcagatatcctgcgcgcggatcttgcccccggtaatcgcgaaggtcttctcgtgcgtctgcaccgcgccggccacgtcgcagtcgcgcccgtgcgcggacacgatgcacgcgtcgtgccaggggatgccgaggcacgcggagaagtagctcaggctggagacgcccgcgatcacctgcacgtcgaagccctcgagcttggcgagcagcggacgcgtcccgctgaaaaacccggtatcgccggacatgagcacgctcgcagcgtccgcgtcgcagctcgcaagcgcctcgacgatatcgtcgcttgaggtgagcgccttcgtctcgtgcgtgcgctcgaacggcgcgacaagccgccttgccccgatgaccagggtgctgctctcgatggcgcgctgtgccccgattgtgagcgtgtcggggtttcccatgccgacgccaatcacgtataccttcatcgcgactcccttctcctcgttatcccgctcacacgccaaagcgcgcgacgagctgttctctgacctcttctgcagaaagccccgactcttccacggggcgacggatgaccacggcctcgcagccgcactcctgcgccgcctcgattttctcccaaaacccgcctgcggaacccgatgccttcgtgacgagcgtctgtatgccgaattcgcggatgagcgccacgttgagctctttggaaaacggcccctgcatggcgatgacgtggcgcgcgggtatgccgagcgcggcggccttctcgagcgatgcgggcacgggcagcacgcgcacgtacagg

SEQ ID NO: 452 - DNA, 26397 bp, Unknown
  16S sequences of unknown bacteria
caacgacactgcgggtatgaaccgcatgctctagccaactgagctataccgccataaacagtccccctggcagggggacgcagattattatatagtatgtcccggggcttgtcaagaacattctgcccaaaaattcacagaaaatcaaccgaacaccgagatgcactgagacggacaggcagccgcgcactcgccgcagccgacacatttctccggatcgatggacgcgaggaaattttccacatggatggcgtcgtaggcgcagaccttggtgcatttcatgcagccgatacaccccgccttacaggccttgcggaccgccgcgcctttctcatggctggaacagcgcaccacgccttttgtggctccagggaccagcgcgatcagatgcttagggcaggctttgacacacaggccgcaggcacggcagagggacggatccacccgcgccaggccgttttccacatgaatggcatcgaactcgcaggcatcgacacaatcgccgtaacccagacagccggcgccgcagagccagtctccgccataaaactgcgcggcagccttgcaggagggcaggccccggtagttgagcttgcgggcggtcacatccaggcagcccccgcagcgcaccagcgcggttttgacctccacttcgcccgaaacacccagaagcgccccggtcgcctcggccactttggcgccgccgggggaacaaagcccaaccttggccccttcgtggaccatggcatgggcatacccctcgcagccggaatagccgcaggctccgcagttggcaccggggaggagctccttgagcgcctccaccttttcatcccgcggcactgccatcagcaccgaggcaaccgccagaatcagtcccgcgagaaggcccactccggcgaggatcaggatcggcagcaggatcgtcattcagattccctccttgacaggtcttctcacagtccgaacagcccctggaaacccagaaaggacaccgagaccagggacgcggcaaccagtgtgatgggcagccccttgaggctttcggggatttccgccgactccagacgctccctcacgccggcgaacatcaccatggccagcaggaacccgaggcccgctcccaaggcattgaccagagactggacaaatccaaaatggctgtcgatgttcaggatggtcacgccgagtaccgcgcagttggtggtaatcagcggcagatagatccccagcgccttgtgcagcgggggcacgtaccgtttgagcacgatttccacgagctggaccagagccgcgatgatgaggataaaggccagggtctggagatagcccagatcgttcggcctcagcaggaaggtgtagatcggccaggtggcggcagtggccatcagcatgacgaagagtaccgccagcgacataccgacggcggaattcagctttttggacacgcccagaaaggggcagatgccaagaaattgggagaggacgaaattgtttaccagcaggccgccgatgaggatggcgagcaggcttccgttaggcatggctcccgtcccccttcccgtcgccggccggatccgccggggatgaggccgacttgcagccctccgccccgtggcaggcccccgtcatggggcaggcggcgcagacctggccgctcagctcttcccgggcggtatctttgtcaaacttatgggagagctggttggtcagccagatcaggatgccgaagacaaagaatccgccggcgggcaggacgaaaatggtgatggcggggaaaagccccccctccggccagccgaaaacagtcccgttgccgaggagctcccggataaggcccatggccaccagcgcgccggtgaagccggcccccatccccagtccgtccagggcggacagccccacgctgttgcgggaggcaaaggcctccgcccggccgaggatgatgcaattgaccacgatcaggggcagataaatccccagcgccttgtcgatggagggcaggtacgccttcaccagcagctggacgatggtggtaaagcccgcgatgacgacgatgtaggcgggcagccgcaccttatcggggatcatgcggcgcaggagggaaatgacgatgttcgagcagaccagcacgaaggtggcggcggcccccatccccagtccattcatggccgcggtagtcacagccagagtggggcaggtgccgaggatcaggcggaggaccgggttttcccggatcaggcccttggaaaattcattgacataccggttcatgtcccgctctcccctttcgtctgccaggccgtatcgtccttctgcacggcggtgacctggtcaaaataagcaatggcctggttgacggcattgacgatgcccttcgaggttttggtggcctgggacacgccgtccacatccacgccgaactccagcgccttggcatttttcccctggaaggccgtgagaaggccgcccttttccaccttatccacataccccacagtctcgttgtccgaggtgacggccaccccggagatggtcccgtccctccggatccccgtcatgaccttcagccccgcgcttttgcccgtcgattcggcggtgaaaacatagcctaccgtggcgccgtcctgtatgccgacataatactccacttcggcgccatcgaccgtcataagctgcttttcaaaggaatccgcctccagcacctgaagacgggcggcagtcgcggtcgcctcgtcccgggcggcgatggtgtcctcggtcagggcgttggtgccggccagggcggccgtgacgataccggcgatcagggccagggccagggaactgaccacgatcccttttatgttcttattcatggcgcgccctccgtttctccccgaagggccggggccgcgtcacccgttcgatcagggggacgaggatattcatgatcacaatggcgaaggagactccctcgggcagcgacccgtacagccggatgagcaccgtcagcaagccgcagcccaccgcaaagacgaccttgcccgccttgttgatggggctggtggtgtagtcggtcgccataaagatggctcccagcatcagcccgcccgacaggatatggtacagggggttgccccccagcagccaggtcatgacgaagacggtgccgatgtacaccaccggtacgatgggggaaatcacccgccggatgacgagatacaccccgccgagcagcagggcaaatacgcaggtttcccccagacagccgccccgcatccccacaaagagctgcaaaggggagaaggccgacggatccccgccctgggacatcagcgccagcggggtggccgaggaaatcgcgtcggccccctgccactgcatcggcgccacccagttgttcatctccccgggaaagctgcccatcaggacgatccggccgagcagggccggattgacgaaattctggcccagcccgccgaacatctgcttggcgaccacaatggccaccacgctgccgagagccgcctgccagagagggatggtggagggcaggttataggccagcagcaggccggtgacgacgcaggaaaggtcccccaccgtctggggacgtttcattaccgcccgggacagcacctcggccgccatggcggaggcaacgcagatcagctcaacgagcagcgcccgccagccgaaaagccacaccgaagcgatccccgccggcgccagcgcgatgaggacgtcgagcatgatggtccgggtattcatcccgcagtgcaggtggggggaggaggatacgatcagggtattgtccaacggattcacctcattttttcacggatgatggagcggtgcttttcgcagacgcggcacggaccgcatccttcgccatccggaccacctggacgatgggccggtgggccgggcaggaataggaacagcagccgcactccatacaggtcatagtcccgagccttttcatctcatcggtgtccccgaccgcataagcccgggcgatggaggggggcagcagatgcatcgggcaggcgtccacgcaccggccgcagcggatgcaggtggtggcactctccatccgggcatcgggttccgcgaaggccaggatggcgttgttctgcttgagcaccggaagctgatcgtccatcagggcgaggcccatcatcggcccacccattaacagcttgtggaccggggcggacaagccgcccgcaaaggccagcacctcatgaatgggggtaccgatggtgacccggatattttgaggatgggccacagccgacccgtccaccgtgatccgcttggtcacgaggggcatgccggttttcagatatcgggccagcacggcggcggaggtgacgttcatcaccacgcagcccacgtcggcgggcaggccccctggtgggaccttccggccggtgcaggcctggatgaggaccttttccgccccctggggataccgggccggcaggcccttgacagcgacctcccggccgggcgccgacaccttggcggcgattttggacagctccgcgatggcggcgggcttgttccgttccacggcaatgatcacccggcccgcgtcgagaaattccatgaccgcctgcacacccgagacgatgtcccaggaattttccatgcattcccgataatccgccgtgatatagggctcgcactcggcggcgttgatgaggatggtgtcgatcgcccccgggtccttgggattcagcttgatataggtgggaaaacccgcgccgcccagccccaccagaccggaatttcgcacggcgttcaggaaatcctcgtgggtctcgataacgggaggcttgacgctgctatgtacccgctgctcgccgtcggattcgatgaccaccgccttggtggtccttccccccggcaggagcagctcggtgatggccttgacggtgccggaaacgccggagtggacgggggcggagaggggcttgtcgctgtcccccaccacctggccgacctcgacggcgtcccccggtccgacgaccgggtcgcacggaacgcccagatgctgggacatggcgaggatgatcgtctcgggcgggggcatcacgacggtttcacagtccgccgtgtgcttgcggtggggggcgtggacgcctcccctgaccgggtggagccagtttttcaagggcataggagactcacacatcctttcataactctaaagctgccggcgcagtttcccgatggccggcagcaggagatgcagcgtcagccccgtcaccataccggtggcgagagccatgagcagcagccagggggcataggcgagcacggccggcccgatcagcagcagggccatgagccattgccccgcgttatgggccacggccccggcgatgccgatgccgatatcccccatctttccccggaacagacgcaggcagagcgccatgacgagggtgctgagcagcccccccgccgcgctcatcaaaaaggcgctgcctccccgcagcagggcaaacaccgccttgaccgccgtaatgccgagcgccgcgggcagggaaagggcggtcagcgcatacatggtgacgatgttggaaagccccagcttggccccggggaccggcagggcgggcagcagtccctctagaaacgagagggccagtgccagcgccgccagcaggccgagcagggctacggaggacgttccggccgcgatgggggatggccggggattctctttgggtttcatgcggtcctctccttatgcggaaagatgggcggcctcagccggtgacggcgtccacgtctccggaggaagcggagcccgcgctcacccggacggcaatccccgccggcacgcaggccgcgctctgcccggaggcagacagccagccgctgtggacacaaatctggtcgggacagccgctttccctgaccctcacccggccgtccgccacctcgacggtcaggacgatgccgtttctgccggtaaacgaaacggtggaaggccggtccaggcgcagcacggtctccccgtccggcgtcgtcaccacggcggtgctccccggacgggcgaacaggcgtccgctggcgaacagaagcagggcggcggcgagcacgcacgccgccaagatgagatcagcccggcggacagccggggggcggcgggacccggccgatggtttttccaaaaacacccctcccgcattgaatccctatcccgaatatgatatactattccccgtaaaattacaagatatttgcggggattcttcgggcgcccgcgcggcgcccggcggacaccgtttggaaagaaggattcggatggattttgcctttcacatgccggtgcaggtgataagcggcccccattgcctgtccgggggtggggagcggctgaaacaatggggacggcgctgcctggtcgtcaccggcggccacagtgccaaggtctcgggcgcgctggacgatgcccttgccatgctggaaaaggccgggatcgaggcgacggtattcccgggcatcgggccgaacccgctgctgacccagtgccaggccgccgccgccgcggcggaagcctgccgggcggattttctcctcggtatcggcgggggatcggtcatggacgcctccaaagcggccgcctggctggcggccaactcgatatcggatgaaacccggctgttcgaaggaaagctccgccatccccctcttcccctggcgctggtcggcaccaccgccgggacgggcagcgaggtcaccgcggtggcggtgctgaccgttgaccgggaccgccgcaaacgcagcgtcacccatccgcattgctatgccaaactggtattcgccgatccccggtacaccgattccgtgccctatcccaccaccgtgtcggcggcgctcgacgccctctcccacgcggtggagggatggtttgccccggcctgcggcgacgtgccgtccctgtttgcggaaaaggccttccccctgctggcctccggcctcgccgccctcgccgcccatccgggggagctgcccgggaccggacagcgcgacgccttgtattacgcctccctctgcgcgggcatggtgctcaacgccaccggcaccgccttcccccatcccttcgggtatatcctcaccgaggacttcggcatcccgcacggacaagcctgcgcggtcttcctcccggccctgacaaggcgggcggaggcggtatgccccgaccgggccgcccggcttttttcgctctgcggcgggcgggagcggtattatgaaaccctcgcggcgctgaccgacgccgacgtccggatgacggacgagcagatcacgggatacgcggcccgctggccggggctcaaaaattttgcgcgcacccccggcggcttttccccggaagaggggatcgctcttttccgcgagctgttcggggcggcgcccaggccgtagaacggtatcatgaaaacagaaatgaggaatccacagtgtcggttgaaacggtaaaaacctatctcaaatccttcgggcgggatgaagacgtccaggaattccccgtgtccagtgccacggtggaactggcggccgcggccctgtcggtcgagcccgcccgcatcgccaaaaccctgtctttcgcggatggggacggctgcctgctggtggtgacggccggggatcagaagatcgacaacgccaaattcaaggcagcgttcgggatgaaggccaaaatgctgccggccggggacgtgctgcgcctgaccggtcacgcggtcggcggcgtgtgccccttcgccctgcccgagggggttcgggtgacgctggacatgtccctgcggcgtttccccctggtctatccggcctgcggcagcgccaattccgccatcggcctgacctgtgaggagctggaggcctatagccgggatgccgtgtgggtggacgtctgcaaagaccgcgcgcccgcctgaaacgggcggaaatccatggaaaacgagaggaaaggcgggaacggccatgcgggtatattatgatctgcacatccattcctgcctctccccctgcggcgacgcggacatgacacccaacaatatcgtaaacatggcgcggcttgcgggcctttccgccatcgccctgaccgaccacaacgcctgcggcaactgtccggctatcctcgaagccgcgcgggggagcgggctcgccgtcctgccggggatggagctctgcacctcggaggaggcccatgtcgtctgcctcttccccactctcgaagcggcgctggcgttcgaggcgcggatacgccccaccctgccgccgctcaaaaaccagcctgaaatctttggagaacaacttatcctcgacggggaggataccatcaccgggcattcggatgccttcctggccggggcgtcgggaatcagcgtggacgagaccgccgcgctggcgcgctccttcggcgggacggccttcccggcccatatcgaccggccgtcctacagcgtccccgccgcgctcggcgatatcccgccggtggggtttttcgccgcggaggtgaccgccatgggggatccggaacggatgcaggaccggtatccggccattcgcggcctgcctctgctcctcaattcggacgcccatttcctgcaccagatccaggaggcgggcccgtatctggatcttccctgcaacacccccggagcggtcatcgcggccctgaacggtgaaaatccctgcgaatggggacgatgaccggcacaaaacaacccctgcgcctccgcctagccgccgcgcctcaccgcattatccccgccgatacccccctttttactttttaaaaaaccaagcatccgcccgggacacatgcccccggatggatgcttggcttttttagagttgttcgccgtttgtcacatacggccgcgggcgggctttaccggagggtcaaacggacgaatccacgaaatacagggacccgccctgttacctcccggcccgccgtcaccctagatattggacggcaagcaccgccgcccccagcacggtcagcaccccgcccgtcacccggtttaagagcttgggcgaggctttgttggcgaatttggcggcgatctgcgcccacagcagggtggacaggacacagaacagcaggctccacaggtcggggatcccgccgagggcgacatgggaaagcgcgccggtcagggcggtgaaggtcatgatgaacacgctggttcccaccgcggttttcagctcataccccaggacactggtgaggatgaggagcatcatcataccaccgcccgcgccgacaaatccacagacgaacccgatcagggtgccgcagacgatggactggatcagtcgggttttcggcggcaccgccgacatccgctccttggtggtcatcaccggccggaccaggaatttgatacccagcagcagggtcataaagatcgaaaacccgcccatcagggttcccggcagcaggctggacacccagctcccgaccagggtgaagaccagcaccgccgccatcatgaccaggccgtttttgatgtcgaggtttttgttcttgccataggtgtaggcggagaccgcgctggcgaggacatcgctggcgagagcgatacccaccgcctgataggcgggaatatccagaaacgtgatcaggatggggctgatgacggccgcggcgctcatccccgcgaaaccggtgccgagccccgccccgatcccggcgatgaagcagacgatgaacttatacagcagcatggacggcgccttctttcaaattgtgatggatgcggtggaggaaatccgccagaacccgccgctccgtcccggtcagccccgccagcacttcatcgaagaacgcggtctgcagcgcctggccccgggcaaccggccccgccgcggaaggcttcagctcgagatgcacggttttgcggttgccgtcccgatagacgcgggccaggaggcctttctccgccagggattctacggcggccgatacatgggatttggcaaggccccgccgccgcacaatatcccgggcggtatcataagggggattgttggccaggaacagcagcacatccatctcggcctggttcaggccggtttcacggaggagctccgcaaaccggcgggtatacaggcgcctgagcagggcgacatcgtccaaaaaatcggcgggcagcatggcatcctctccaattgttctattttgaactattttatccccgaatgcaccgtttgtcaagaaaaagagcgcgcagactcccgaaaactctttgcgggccacatcgtacccctaaattaaaataaggttaagcagtcaaaaagccgccgcagacacggcctgcggcggcttctcggtcattcatggataacgatagtggtcagggcctttttctgttcctctgccggaggcttcagctttcggttgttcacaagctccttcagacagtgcaggataaaccagccgtccgagtaaaaggtaaactgcaagccgtattgctgcatcgtgcgcagatgcttcggggtttcctccagcacagcctctatgaacggcctgcgcagcgcctccagttccttccagtgccgctccttgatgcggtcgccgagcgagagcagtccttttttggtttccgccccctcgatccaaacgcattggcaggcggctttgaagcctttgcccgggtcctccaccgtttttaaaaagccgcgttcgaccagataggcatactcgtcccggctcagctccgccccgtctattcggcggttgagcaaggtcaaaacccggtcggcttccagatggtaggtgttgtccacccggccagccgaccattcggaatcgatctgccacagggtaaggccgcccaccttgttccagcacgggccgcaccaatgccgcatactgtcaaaatatttcggcagaacggcttccgggttcaaaaccgacgcgtaacagaggttgtgccctccgtccggccggagcgtggcggcctgttcaaacgataccgtcctgtccatcagcgcttccccgctgagagcggcgatataggggatcaaggcccacaaaaagaagttcctgtccttcggagggcccgaaagtggagaaggtgctgccgtgcatccgcccgtgatgccgacatcgtcccaaatatccgcgtccattagagcatcgtacagctcgtttgcaaaaatccgggcggctttttcatacatttcgtcatgcaggcggctgagcgcggaattggtctcgtcgagcaggatgttacagagataccggtcgccgtgcctcgtcagaaagccgtattcctccagatattccgcttcgctttcgacataaaccggggacacccccaaggcatccgcgatttggcggatcgttttcggctctttccaaaccacatatgcgatgttctgcgacaaggcgcttctgaaaaaattgccgttgttgcctttgcttcccaccgaaccgtttgtcccgcacagggcaaaccggatcggattgaagcgcagctcgctggagctccgcatcgtttccatcccccttttcagttcttttttggcttcaaataaatgccacttgaccgtaccgaccggaatccccagctcttcggctatccggctttgcttcttattttcgtaatagtaggcgatcacgatgcggcgctgcagcttggacaaataggcgatttcaccgcgcagtttctccgtcgtttcccgcagcgcgagatcggaaacgatgtccggcccccggtcacagaggctcccggcggcttcctcgagggaaacgccgatcccctgctgcttgttgtcgcggtaataattgctcagggcatggtgtgcgatcgtccatacaaacgcccgcacatcttcgacatcctccctcatccgcagcgcacggaaagccttgaggagaatgtcctgtgtcagatcctccgcgtcctgccggtttttacaccgtttcaaagcaaatccgaaaatgggcttcagataggcggctgccagcctgtcggcttcctgtttttccatctgtttgtctccttgaaagcggctttcatccatatagacaccggaactgtaaaaaggttgtacgattctaaaaagatgtgcgtttttatacggtgtgaacgcaccccggctggtgaaaaaatcggagcaagcgagatataaagcttgctccgatgcggcccttgcggtccattcagacaccaccctattatcggcctttgtattcctgcttaatgatgtcggccatttcttcgggagtttccacacatcctccggcgagccacattttgataatcgcattgatgccgttgcggaaaaacgcaatatgatatttgatgtgcttgttctcaaaatctttttcggctctgaccgtatcataaaccatcacctggtgcttttcatcgtacgccagcttgaaataggttttatagaaaatttggttttccttgatatgccggaacatctttaaggcgccattttgctctctttgcaaatcatcgagaaatatcaaggcgaagtcccgttctagtttttcccgaaacttgtctgcaaggtcgtatatatccatataattggcgtaaaaggtactgcggtttagccccgtcgttttgcatatatccgataccgtgatttctttcatgtccctgctctgcaataactcaacgaaggccttttcaatcttttcaaccgaatttctccgccgtttgttgttctttgtattcataaccctctccattattccaacactcgttgccaatgtgatgattgtttgtttgtgtgtatatgcattatactgtagtcaaaataaaagcacaagtgtcggtttaatggaaggggccgcccatatgaaaaaaagtggttttatcgcattgatcttggggaccgtaagcggcgttttattcgcgcttggcatgtgcatggcgcttctcccggaatgggacgccttcactgaaggcgtccttttcggcgtgtccggcttgctgctcggtctgatcaccttttttgtttggtgtaaaatggagaataaaaagctgccggaattaaagggcaaaaatctgctgatgattgccttcggcgtactcggcgtcctgatactcggagccggcatgtgtttgtgtcttgtatgggagcagattgtttggggaacgctgataggacttcttggaatcatcctgttgatttcgttgattcctttggtaaaaggcattaaatgactatccatcagctcaccggaaacaccattttgagcctgtcggtaaactttgcctatgctctcggcagctgcgttgccggcattgtctcgcattcatggtggtttatgacattgggcggctattattgcacattgagtatcgcacgattctccgtattacaggtcaagcgcaaatcaaacggtgatatcgcgtcagaactgtttgcgagaaaaattacaggaatcttgtttctgtttctaacattctgcctgattggcattgtgaccctttccgctatcgacggccggggatcggaatttcatgaaattgtcatgattaccattgcggtttatacctttgccaaggtaagcatggcaatcctgggacttgcaaaatcgaaacggatcccatcgccagccgtaaaaaccttacggaatatttcgttcgcagatgctttcgtgtccatatattccttgcagcgatcgatgttggtctcctttcctggaatggatgaaaagaatatccggttattcaatattttgacgggaacggccgtttggctgctgattcttctgcttggaatcaatcttatcggcgggaggtggataaatgtggcaaaatccaaaatgataaaagccaacgaaaaaatggccaaaactgttgttggaagctataaaaaaattgagaccgctgttgttagcggatacactaagattgaggacgcgtttgtagatgcatatttaaccagagacggcgaaaccgtagaagaagccaaggcaagaatgaaaaagaaataacggctccctataccatttgtaaaaaaggcagactttgcggaaacacagccgcaaaatctgcctccctttttgtgacggcctccgattctgctcggcagccgttgtcctcttttaattcgccggttgaccgccatggttaaaaccaaaaagccttgataactcaaactcatgtttcgcgcatgcattcgatatagccattcaaatactggattccatctctatctgtcgaaacgattcttggtctgtgatacaaccacagacgcattgccataaaaagaaaaatctgcggagcgcgaattgcctaccgcaggtatggaaggggcaaacggtttagatgccgcttgcgacgcgaacgcttcgcccggaaaaaagaaagagtctagacgcgaattgcgtccagactcagtctggtggaatagagtactgtcctttaccatttgctgaaaagagggacggttatctgttttcgctgacaaagcgcggtcaatataggtatttacgatttggatgtcgttcttttctgcaaaggctttgcactcacgcagttggccctcgatcgattcttcccgctgattgtcggaagaataccgggcatagattacaccggtcattgtatcacctctgtgttataatattgcgcttgggcataccaaagctcatggtatttcccgttttcgtcagcaacaagcttatcatggctgccttgctgcacgatgtgtccgttatcaaacacagcgatctcatcgcagaaccgacaggaggaaagccggtgactgatataaatggcggttttatctccaactatcttattaaaatttgagtaaacctctgcttccgcaacagggtcaagggcggcggtcggttcgtcaagaacaataaacggagcatctttatataatgccctggcaagggcgatcttctgtgcctccccgcctgaaatctccacaccgttttcttcaaagtctttataaaggcaggtgtcaagtccttccggcatattctgaagtctctcttcaaagccggaatcaaacaagcatttcgttacctccgctttatcatacagggtttttgccgccacattttcaccaagcggataagaaaacagtttgaaatcctgaaacaccaccgaaaagacagacatatattcctcatagttgtatttcttaatatcaatcccgttgagcaatatctctccttcagtgggatcatacagacggcacaacagcttgataaaggttgttttcccgcttccgttcataccgacaacggcaagccgctcacctacgcgaaatttcatcgaaacatttcgcaacgcatatgtttcgcttcccggatattggaacgatacattgcaaaactcaatttcataatctcgatctctccgcttttctaccgtaaggctgccctgatacattcgattgggaatgtccagaaactcaaagatcagcttcagaaaggaagcgttattccgcatccctcccataataccgatcgaagagccgatacttcccgcaacccgcgtaacagcagatatatattgcgtaaccgcgccgattccgaatgcgcctcccagtgctttcaaacagacaaaaatgtaaaccactccggtaaatataatcgatacagccgaggatgccgcattataacaccccaccggacctcttgccaatcttgcaaacattcccttggagcaaaatattccggttttatctttcccatatttatcgcagatcaaatcctgtcgataaatccgtatatcttctgaaaactcttttctaaaacccaaaaacccgaaatatccaaacaggcgatttccgaaattgtgcgaatcagaattcagcgcataatagcttcccgctttattggcaagcagaggcgctatataggtgattgccagcatcaccgcgataatcagcagcacaaacagcggactgttcagcacggtaaatccgccggcggtatccggtacacggtttgtaaaaagcgataccgtcagagcaacgcctccaagcaaggtaaataatccggaaaggatcccttcaatatgaccgtacacctgattgagtccccatccgccgctgttatggttttgctcgatcgtatgatacagctcatgtgtcttgggattatccacatccggatagtccatgctcatcattttttcggaaaatatctgctgtatcttataatacagcctagcgcatacaacatcacgccacttgtgcaaaaaagccgccgcaagagagatgaatgccgccgacaacagtataatcagaacaagtcttgtcagtacagacggatttcgaccttgggtcaattccgtgatcagcaaagcggaaagataaattcctatataaggagtcagtgcgtcccatgcgacacaaacaagcctggatataatcatatgaggacatcgtttataaataagcgcgaaagcccgccggttcagcttccatgcttcacgccatttcagcagtttcttgtcctttttcacagacatccccctctctgtaatatttgctctgaatttcaaacagccgagcatattcaccggataacttcagcaattcctcgtgtgtaccttcttctgcaattttatgattgccaatcagcaaaatccggtcacaaaatcgggtagaagccagacggtgggaaatatagacagaagtgcaacctttggtcatttcattgtatttgctgtatatatccgcttctgcaatcgggtcaagggctgcggtcggctcatccagaataataaacggcgcttttttataaagggcacgagcaagcatgagcttctgtgtctctccgccggacagttccgctccgtcttcgtaaacagatcggtttaatttggtctgataaccatcttttaacgaattaattttagaggtcagtcccgctttttccgcacaatcttttatccgctccatatcgtaattttcctctgtctgcgccacattggcggctatcgttcctgcaagcagtgaaaaattttgaaataccgccgaaaacatcgcatagtagtcctgccggttaaactcccggatgtccttgctgtcaagcaaaaccttcccatgtgtcgggtcaaaaaatccacagatcagcttcacaagcgttgtttttcctgcgccgttaagtccgacaaccgcgaccttctctccggggtgaatggttaggttaatatcctccagtgtataagcatctgctcccgggtatttgaaaaacacattttcaagcttgatttcgtgctgagcaccggtagcatccgaaagcttttcaccatcttggaaccggaaaggctccttatattccagaaattctcttattgtagaaatatcaagactttgccggtacaaggttgtcatgcttcctaaaattccggttacccatgccgtaaagccgcccaccgcggaaaagtaaaggagaaaggcggaaacgcttaaatcccctgacagtaccagataaatcaagacataataggcaagtccatttcgcagaagggtaagcactaaatccaatatacttccccatatgtatacattatgtgcacgacggtgaaaggcggtatatgctgtcattgccttatcggtgatttcctgcatccacggcttcatcccgaaaatccggatatcttttgcggcggtataatttgagggttgccggatttggtaccagagctttctggaaatctccccctcctcctcccgatgccgatacccgtaaccggtcagctttttgtttacaaaatagccgattaaggaagtcagcagtatcacaagcatcagccatatatccgctgataccagcaaaaacaaataaataacaaatccaacgcagttttgcgccagtgatgtaagcgtttcccaaatggcttccgtcgcttcccgattgttacttgtggcttgttggcattttgcgcccagtttaataaacttttcgtccgccaggttggagtgggatgtggtacaggcctttttattaatagtggaaattagcgccaaacgaacggttactcttccgtataaggtattggaattcacataggaagtggctgcagagcaaaacataatcagtatgacaaacaccaacaccgttgtcagcaattctgtcatcgaagcccgccgttctacaaccgacaagacagatggggacacataaagattcactaaattgctcatcacggcaagaaaaacctgtaacaagcataaaagcaaaacctttttctctttttctcgccatgccagcaaaatcatataggcagagcactgccacatattatacttcggctttgcacttttctcgttttccttttcttttttcaagattcccacccctttctgcttctcagtctatcacaacaagcctctgaatgttatgctcgggggatgaatcgttgatttttggggacgaactgcattatttttgcggaatcagtatttctgttgtaaatgcgccgtcctcgctgtttcggttgatatacccgtccaagcgttcaataatggtatccattcgaatcaagccaaaaccatggcctttgcctttggtggtttgaaatcttccgttttgcttctttttcttttttgaagcggtgaagttggtaaaggagatataaagctgggtgttcttcatatccatataaatccgaatcagccgcttgtcttcgggaagcgccaagctggcctcaatggcgttatcgaacagattgccgataatgacgcataaatcaagttcggaggtttttaaagcaagaggaataaaaacatctactttcacgggaacattttttgattttgcaagagagattttgctgtttaaaatagcgtctgccatcggatttccggttttaatgacagtgtccaccgtagccagatccatttccaattcatccaggtattttttaacagccaccatgtctccgcttgcggcatgtgctttcattacctgaatatggtttcgataatcatggcgccagccgcggatctgtttatacatatttcccacttccacataatgggtttcgattagttcccgttgataagcggcgattcgtttgtcaatctgtttggaaaaaagtttcatgtcagcctccgttacgtatgtgcaataaacgctttgtttaaaggttcatattgccctcggggcaggggaatgatcgacccgtcagatagaaaaacatcagttttagtgattttatcgatgcaggaaaggttgacgatgaaggaacgacccattctgtaaaaacgttcgtccaatttgcgctcgaattctccgagtgtttttttaacggtataatcttttttagagtgtactgttacataattctgttgaacctcaaggtatttgatctcataaatcggaatacgtatcatttctccggacaaggaaagataaagagatttttcatttttccttatttttaaaactgcacggttaaggaccttaaataatttggtttctgataaaggttttacgagataatgcagagcagacacctcatagccttccgcaatataatccgtgtatcctgtaataaagataatctgcaccgcatcattctctttgcggatccttttggcaagctccacaccgttcatagagggcatctcaatgtccagcagtaaaatatcaaaggctttctgctctgcataccgggacaaaaagctttccgcagagggaaacgtttcaatatcaaccattatattctccttttctgcccactgattgaccgcagaggagatatatttgacatcttcttccatgtcgtcacagactgcaattttatatctcatttcattcctccgccttgccgctgttaacccattcgtcgatctcggagaccttgaacttccacttcttcccgaccttatgcgctggcatttcttttgttgctatccagcgcagagccgtatctctgctgatgccgagatatttcataatctccggcatagagtaatagcggtcttctatttcagccataaatgcacctcaatttcgttttttacagtataacacaaatcggctgattattaaagttattgtctgatattgtacggtttcatttttaaatatagtataaattttaaggccttggaaaaacgtttgttctccagtataatgacaatccaaccaaataaaatctatgaaagtcttatgaaatagcccgaatgatgcgggagtgtgacataagacttctttttttcctctgtcagtatgtaccttgacaaacacattaaaaaaacaaatccctgcgtggaaactgtcaaggcatacccatacagttttcacgcagggatttttgcatatcagttgaaaagagctgacgataaatatggatgcggcgctaatcctaaaatgctatccctacgggataggcaagcatagtgtttgtatagacgccgccacagctgccgtcctacaaacagtttgtcggggtgaaccccgaaccccataccttttctttacgaaaagaaaaggtacgctaaaaagaaacaaaattaacacaagtaggatgtcaaacatcttgcagaaagagaggacaaaactaaatctaacaacaaaacaaaaatgattgccatgcgtttttatgagagcgattacgcggcaatcaaaagaaaagcagaaaaagcatatatgaacttcaccgagtttgtatcagcggcgggattgaacaaaccaataactgtaatagacggattagaggatctcctgaaagagcagaaagctatcggacgaaatctgaatcaactgacaacactctgcaatatgggaaagattatctgtcccgatctgcgagagctgaaagaacaatatgccgaggttatgactgtacttaatcggataaccgggaggtgcggctgatggcaacctttacggcaatccccgaaaaaacacagactgctaccgctatgaaacgtgtcattgactgtgtcatgcaggacaagaaaaccgtgttagacggaataaagcttgtcagcggtcaaaactgtgttcccgcatcagcatttgaagtgtttatggataccaagcatcaatacggcaaagcaaacggcgtgcttttcaatcagtatgtgcaatcttttaagccgggttgcggtacaacaccggaacagatacaccaaatcggcttggaagtggcaaaagcgtttgacggctttgaagtagttgtggcaacacacattgaccgcgaccactggcacaatctttttgttgtcaactcagtaaattgtgaaaccggtttgaaaatccaaatcaatgaaaaagctttggaacagttacggcgctagtcagatgaaatttgccggcagtttggtttagaggtactgaaacctaccaaatgccgaaacagaaagcactgaatcagcgtgaatatcgtgcgtctttacgtggcaacagcaaaaagctgaaattgactaatgccattgattatgccatggctaatgtcgaaacaaaaccatagtttattgaccaaatgaaaaagctcggatacggtgtcaagtggattgaacattacaaatatatcacctacactacaccggacggtcagcggtttcgggataaccggttaccggatgacaaatatttaaaaacgaacataggggaattacttgcttatgaatatggagcagttaaaacagatcaacaacatagcaatcatcttacagtttaatcatcataaatcgcttatataaagcaaaaatccgaacgtatcaccattgatgataatgttcggattattttgatttgtaagggtgagataaaatgaacctcttggaattttttgatgtaatttgaactctcacaatcgattgctgaaatattcttcttttaatatagaacagcatctgtaacaaaaacatgcccattatatttcttgtcatcaagtttctttttttaatatgtctttaatataatttctgcgtaaattaatatactgctttatacggtcgtagtctttcaatgtaggatttatatataataaattatagcctttaaagcaaacgtgctcatataaatcgctaaaaaaagtaaagctaactccaggagcacaggatgcacagcgaacacaatacttaatattgtttttaaattcgtttattgttttttcagtttcatctcgaaaaaaacactctaaattattcatctcagaagttaatatcattatctgaagataattcttttcaaatttatcgcctttaccaattgaaataaaaccaactctctttcctttataatttaaattgtatgaactggttgcataccagcagggtttcatctttaatgcttttagaaacgataaaaaaacaaaaaactgttcttttatttcatcttctagtaataaattagataaatcctctattgacggtttgttgctcttttgtaattcaaaaaatgaaacttgacctttttttgccataacatacattcccctattaatctaatatttttgcttgaattactttcattatagcaaaaacccgccgataaagcaatttcagctttttcgacaggtttctacactggctgttacgaaccatttagatgccactttgttttttgaaaaaaagagcaaaaattagcgattttttattattctttcaaaaaaacattatctgttcgacaaataatcattattaatcaaaacacaacattcctaaagtaaacgaccaccgattgctcggtggccgtttcgttttacaaattattttaatggcatctcttacagggagtatagccgtttgcttctgcggtttccttagatacttgtttgggatctttcatcttgctacaaccagctcttgaatgatatttggtgccgccatttgtaggaacccacaccaattctccttcactttcctcatcattggggacggttactcctgcattaccgcctgaagtatcatcgttatcttgaaattgagaaggggtttctgtttcagtgcttggtagtgtagtagtttcttcttttgcaggtttcacacgataatctattctgattttaatgtctttttcccattgttcgcctttttcgaatgtacaaatatcaccatcttcgccaatggcaatattaactacacttccttcaaagacattgttctcatcatagtcgatttcgtgtgctacgcatgtaacattagtaaatccagcatcttcgaattgctttttaacttcttcgtaatgcttttctaataggttagtccatacatccggagcaccagccatgttctttgctttttctgcatcttcagcagtagtgccagagacaacttcaacatcgacaccagagcttgaacatgagatcttcagcttgatggtttcatcttttgaaacattcatttcaacctttccgtccaaggtatcatcatcagcactctcaaaggagattgtatgatttcctcgtttaagaacagtttcaaatgtttcggtatcgccatgagtgatagttccttcgaacatatcatctatgctgacatcaacatcatatttgctaaatacccagttttcaacacattcaacttcgatatctactttgaattcgggttctgtaattgagatataaacgatattattgccttcataatttactgttaatttataggactcggtattttttgcagtgtaatgcttatcgtctttttgagcatcaacggtaaatcctttttcttcacaggactttacataagcgttgtagtccgcaatggatgtaccaccaatatagacaataaatccatcttcatcgttactttgaattttgccagtagttgaggttggaaccggcaacaactttgccatttcagattctggccaagcaattgtttccatctccatgactgcatctacattaatatgcatctcactactgtaatcgtaataacttaatgacagtttatatcctgttgcgttatacgcagagaagttactatcagaagattccttatctatggtgaaaccttttgtttcgcaagctgcgatgtaatccttgtattgttcttgagttatttctgttacatccatagaaagataatcttcagagtttgagattatttcgccatatggagaaactggttgtggtaggatttcggctaatacaacttcatcccaattatacttctctcgtccagatgcatccgatccaaaaaacgagaaatagggtaaaacaagcacgaaggataggattataagacagtagcggaagccatgtcttttcacctttataacttgtcttttcatcagtattccgacaacagtaagtcctatcgctaaaagcgaaactataacagcaccgactttaccagaaactaaagcaataaaagcaaaaagtgtgaataaggctaatgatatggttgcaagtttgccgaggcgactacgctgcttccaaaaagaaacacctttttcctttgctttgtctactatcgtttctttcttttgaacctctacaacagattcatttgttttggtaactgtatcttctacattaaccactttctcttgttgtttagtttcggttttattgccacaattagagcagaattttgcaccttctggtagttctattccacattttttacatttcagatgtatctcctccagttatacgcccattattcgtttgtggttggaatgggaggcatatcaacaaagaaacccttgagttcttcgactgcacctgctttcacccatcctgccataccactattccaacccgttcgttttatgcttattacataatatttgtattatatcacaaatggttttaaaagtatagtaatttagtaaaatcgacttcgatggttcgaatccaccttgtaggtcgttgggcatctatgaaattgcaacttgaaaaataggggtaaaaaatgcgaaaagccttgatttctcaaggcttttctgtgcggcatctaaatagaccgcaacacttgtctttggtgaccgaaattactggcacccagtaaccatgcggtttccggtgtgtttcaaaaaatttttttgaaaatctgataccctttttcgaaccaccgaagcgtttttcttgatgttgattattataatagaataaaggagttttttcaaccccatggaatgtttgcaaacacaaaaaagccgaccattattccatcaataatgatgaagtaatgatcggcttttttctgtcgacaattattttgtcggaatatcaccaacttttgaaaatcctcctatgaaccggacttctatcttgtcttttgaaaggatagttacttgttctacaattcttctgataaacgtgtcatcaaattctgttaactcaacgatatcgatgtcaattgcctttagaatatcatcaagttgcttttgacgctttgcatcggttgttgcatcttcttcggcttgttttagctgctctgtcaaccgagccttttcctcagtcatctccttgaactttttttcaaatagttctatttgggaactttgggctgccaaagttaaaagattcgccattccgtgatcaatgtcttgcattctttgacggatcacttctggattatttttggcatcttcaaataaaatgatttttttctgtgcttcacgaactgcttctgctatttcttctttattatgaaatacggactgaatgcagttcagaattgcttggtgtaaaatgggttcctttaaacttggggaatgtttgcaatacttggtgccaaattcaagtcggttcacgcatcgccatacatcttccttcgttctgtcccgtttgatccacatggttctacgatacatagcaccacattccccacaaacggttctttccgatagtgcatatttgctggtatattttcctcgaccagactttgtcctccggcaagaaacctttcttttgctactgcgccttgcaatctctaactggacttcctgaaaaatatctcttgggataatagctgggtgattgtcagtaatgtaatactgtttgacctcacctctatttttcttcaccttcttttcgaggaaatctgcagtataggttttttgcagcagcacatctccagcgtatttttcattttgcagcatatttcgaatggtagtttttgaccatgttggctttcctgttggcgatgggatgtggtcagcttccagagattttgcaatttgttccggggtatctccactgagaaatgcgaaaaaaatccgtgaaacaatggtagcttgttcaggatcaatttcaggctctccattttctcccggtcgatagcctaaaaagtttttgtacctgaaggcaaaatggccttccttatactgcctgcgttttcccatggtaacattttgactgatggactcgctttctgcttgagcgaaggcgctaaaccatgtcaaataaatttcgctgctgacatcacttgtattgagtccttctttttcaaattctatggttacattca

SEQ ID NO: 453 - DNA, 1686 bp, Unknown
  16S sequences of unknown bacteria
cagcttcgatatctcggtggggacatagtcttgtatgctacccccaaatccgcctccgtgtatacggctcacgccatggacgccgagggcgatgtcgctcagggcgagggcgaccatggcgggctgctcggatgagccgagtggcgagacgttttgcaggtactgggccgatgagatgccggagagcctcgtgagctgcaagaacagctcgatatcgcctgcgcgcatcgcgtttgcccgcgcttcgacgaggcgcatctcgtggtagtagtggagcgccctcagcgcggcgcggtcgccgagcgtggcacggatgtcgccgagcttggccaaaaacgcgttctcgtccacttggcgcaggcgctcggccccgaaggcgcgcgcgaccgccagcatgtcctggccgatggaagcgtagtcgtccgtcttgtcgctgtggctgctcttcgtgtcgatgaggcagatcgagtacccgtgcgcggcaaagttgaagtcgatgcgctcgtggcgaggagcttccgggttctcgaagtccatcgcgacgatgccgcccagcgcgatggacgcctggtccatgagtccgcagggcttgccgtagtagtagcgctccgcatcctgggcgatgagcgcgcgtgtgacggggccggtcttggcgtctccgtagagcaggtcgagcgcggtggcgatgccgagctcgaaggcggccgaagaggagaggcccccgcccgaggcgagcgcgctttccgtgcgcgcgtcgaagcccgcgacgggtacgcccgcggctttcaggcccgcgacgactccgcgcaccagcgcagccgagctgccttgctctgccggcacgggggcaagttccgtgagatcgatgtcgatgtcttggtggccggggctgctcacgcgtcctcgcatctcgtcgttgggctgcatgaggacctcgatgccctcggacacggtcgccgcgatgaccttgccgccttggtggtcggtgtggtttccggcgatctcggtgcgcccgggcgcaaaggccctgatgcacgggctgaacgtctgctgtgtcatgtctaggcctttcgcgtggtatcggcgccgctgcgctcgaggagcgcgtgcacggcatgctggtagagcaaacgggcctgctcgtcccagcaccgcatatcgtccgaggtcatgagcatgctcgcgtgggtgcagtcggtctcgagcagcagcgcgcgctgcgcggcgctcagcttgacgtcgtcgcgcaggaagaagacgtcggggtcgttcgcgaaggcgcgtccgtcgaggggcgctcgtccgatggtgtttgccaggctgcgcttcgtgctgacgcgctcgcggtcgagcccgcgcatgtagagcttgccgtcccagtcgagtccgacgtcgcagccgatgcggcagtagtcgacgacgccgaacgcgctgccgagcggcacgccgcagccgagcagaaggacttcgcttggcacggcggagcggacgagctccagcgcgtcgtgcatgagctgcccgcggttgcagccatcgtgggggagcatgcaggcggcgtagaggaagtcgattttgagcagcttgaagctccagtcgcgcgtgatggtctgcagcacctcggcaaggtagctgcgaaaggcgccattgcgcgtgtcgagcgcgtagccgccgctccagtggcagggc

SEQ ID NO: 454 - DNA, 4981 bp, Unknown
  16S sequences of unknown bacteria
accacgacttctcccaagaagcccaactccgctttgagaaagattgcccgtgtgcgtcttaccaataagcaggaaggtacggtctacattcccggcgaaggtcacaaccttcaagagcacagctccgttctgatcagaggcggtcgtgtcaaggatctgcccggcgtgcgttaccacatcatccgcggcgccctcgataccgccggcgttgcaaagcgcaaacaggcccgttccaaatacggcgcgaaacgccctaaataatccctcttcgaaaacgttgaggaaaaacgggtttcgctgacgaggaaagcggtcgctttgcgaaaaaccgcgggaacgttcccgcaaccgagcgcttggaaaagcgcgaaagaaaatcctacttgtaaatcggaatatagctcgaaaaaagccccgaatgaaagtaggcagtatgcggcgaagtccgcagaaggttcgccccgccggaaggagcgcgcaaaggcgcgcgaaaacaggtcggcggcagcgcgatagccgtactgaagggtaaaatcccttatcaatattatttaaaggaggataaaactatgcccagaagaggtaatgtccctaagagggacgtgcttcccgatcctatgtacgggagcaaggtagtgaccaagctcatcaaccagatcatgctcgacggcaagaaaggcacggctcaggcaatcgtttacgaagcattcaagatcatgggggaaaagctgaatatggaacccatggaaatcttcaagcaggcgatggagaacgtgatgcccgtcgtggaagtcaaggcccgccgtgtcggcggcgccaactatcaggttcccattgaaatcagacccgagaggcgtcagacgctcgccattcgctggctcgtcatcaacacgaggaagagaagcgagagagagatgtccaaaaagctcgcggcggaactgatggacgcctacaacaacgccggcggttcagtcaagaagaaagaagacacgcacagaatggccgaagcgaataaggcgttcgctcatttcagattctaagaggtaatctatgcccagagaatacgatttatatcataccagaaacttcggtatcatggcccatatcgacgcgggcaagacgaccacgaccgagcgcatcctgttctatacgggaaagacgcacaagatcggggaaacgcacgaaggcaccgcgacgatggactggatggctcaggagcaggagcgcggcatcaccatcacttccgccgccaccacctgtgtctggaaaggtcatcgcttcaacatcatcgataccccgggacacgtggactttacggtggaagtggagcgttcgctccgcgtcctcgacggagccgtggcgacgttctgcgccaagggcggcgtcgagccgcagtccgaaaccgtatggcgccaggcggacaactacaaagtcccccgcatcgcctacgtcaacaaaatggatatcaacggcgcggatttcttccgcgtggagagaatgatccgcgagagattgggcgcgaaccccgttcccatcgaacttcccatcggtaaggaagacaccttccgcggcatcgtcgacctcatcagaatggaggcggaaatttattacgacgacctcggcaaagactaccgcaaggagccgattcccgaggatatgcagaccctcgccgaggaatacagggcgaagctcgtcgaagaggcggcttccgccagcgacgaactgatggaaaagtatttcgaggagggcgatctgtccgccgaggagatcgtcaaagggcttcgcgcgcgctgtctgaaaatggaagcgatccccatgctctgcggttcttcctataagaacaagggagtccagttccttctcgacgcggtcatcgatttcctgcccagtcctctcgacgtcgatcacgtcaagggcgtccatcccgacacgggcgaggaggagatcagaaagacggacgacaacgagcctttcgcggggcttgcgttcaagatcgcaaccgacccgttcgtgggttccctcgcttatttccgttcctattcgggcgttctttctgcgggatcctacgtgtataactccacgaaggaaaagaaggagagagtagggcgcctcgtgcagatgcacgccaacgagagaaaggatatttccgagatctattcgggggatatctgcgccatcgtcggactgaaatacacgacgacaggcgatacgctctgcgatgaaaagcatcccatcattctcgaaaagatggaattccccgaacccgtcattcagctttccctggagcctaagaccaaagcggggcaggaaaagatgaccatggcgctcatcaagctcgccgaagaagatcccactttcaagacgtataccgatcaggaaacgggacagacgatcatcgcgggcatgggcgaattgcacctcgacatcatcgtcgacagacttttgagagaattcaaggtggaagccaacgtcggcgcgccgcaggtcgcttacagagaaacgttcaggagcgcggtggacgcagagggtatgtacaagcggcagtctggcggtaaaggtcagtacggtcattgtaagattcacctcattcctcaggaaccgggcgcgggctatgcgttcgaggacgcgacggtgggcggatccattcccaaggaatatatccccgccatcgacaaggggatccaggaagcggcgaagaacggttatctcgcgggatacgaaatggtggacttcaaggtggtcgtctacgacggaagctatcacgaagtcgactcttcggaaatggcgttcaagatcgcgggttcgctcgcgtttaaagacggtatggcgaaggctcgtcccgtactgctggaaccgatcatgaaagtgcaggtcattacgcccgaggactatttcggcgacttgatgggcaacatttccggtcgccgcggcaccattttgggcacggacgatcggaacggcgcgaagatcatcgatgcggaagttcccctttcggaaatgttcggctatgcgacggaacttcgttccagaacgcagggtcgcggacagttcaccatgcagttcgaccattacttcgaagtgcctcaaaacattgcgaaggatatcatcgaaacgcgcggcaagaaggcgtaaggacggcgcattgacaaaatttgcgttttgccccgacttttctgcggggcaaaacggaaattttcaaaatttttcaaaaaacaccgttaaaagatttgataaatttgaaaaattaatatataataagtacgtccatagagaattggacaaagcttatgtataaagaaaatgatagatagctgcgtcccgagataaggataagttatcattttaaattttttataaacaatattggaggatttattatggctaaagctaaatacgacagaagcaaaccccacgtcaacatcggtactatcggccacgttgaccacggtaaaactactttgaccgcagctatcacgatggttatggcttgcaaaggcgacgcagtgaaaatgcgttacgacgaaatcgacaaggcgcccgaagaaaaggcccgcggtattacaatcaacaccgcgcacgtagagtatcagaccgacaagcgtcactatgcgcacgtcgactgcccggggcacgccgactatgtcaagaacatgatcaccggcgccgcgcagatggacggcgcgatcctcgtcgttgccgcgacggacggtcccatgccccagacccgtgagcacatcctgctcgcccgtcaggtaggcgttccttacatcgtagtcttcatgaacaaggttgacctcgtcgacgacgacgaacttctcgacctcgtcgagatggacgtgagagatctgctttcttcttacaacttccccggcgacgatattcccgtcatccgcgggtccgctttgaaagcgcttgaaaaagcaagctcggatgcccccgcggcggagattcttgcagcgcccgaatgcaagtgcattctcgaactgatggatgcagtcgattcctatattcctacccctactcgtgaagagaataagcctttccttcttcccgtcgaggacgtattcacgatttccggacgcggcaccgtcgctaccggtcgtgtcgagagaggcgttgcgaaggtcggcgagcccgctgaaatcgtcggtcttatcgaaaaacccgtttccaccgtcatcaccggtcttgaaatgttccacaaacagctcgacgaagcgatggcgggcgacaacgtcggcgcgctccttcgcggcatcaacagaacggacattgagaaaggtcaggtcgtcgcgaagcccggcaccgttaagacgggtaccgagtttgaagcgcaggtttacgttttgaccaaggacgaaggaggtcgtcatacggcgttcttcaaccattacagaccccagttcttcatcagaacgacggacgttacgggcgctatcgagcttcccgaaggcgttgaaatggttatgcccggcgataacatcaacatgaaagtcgtcgtgatcaaacccgtcgctatggaagagggactccgtttcgctatccgtgagggcggcagaacggtcggctccggcgttatctccaagatccttaaataatctaagagataatataaaaccaaaacaaaaacaacttgtcgattttcggcaagttgtttttttatgtcccgtcgctttttctccgcgtttttcccgggaagaatggtgggcgaaagctttttcgtcggataggcggacgcctgttctcgcggaaagtgtagaaatttagaaatcgtcatccaaaatcggacgtaggagcggactttcaggatagaccgcatttgtcggaaacggagtgcctgtttgatgaaaagcgctttgccgtgccgcctcgatttttttcttttgagccgcgaaaaatttgaaaaatttattaaaatattaaaatcctctattgacaagaggaatatatttgatataatgaataacgttttaaagattac

SEQ ID NO: 455 - DNA, 11637 bp, Unknown
  16S sequences of unknown bacteria
gccgtagccgctatgaacgccgatttttccagcttttcccccgatgcgcaagagcaggccgaaatcgaagtgaaataccaagggtatctggcccgccaacagcgagaaattgagcgggcgcgccaatgggagcaccgccagctgcctcaaggcttggattatctttccatgccgggccttcgcacggaagctaggcaaaagctgcaagcacagcagccggaaaaccttggccaagcttcccgcatcagcggtgtttccccggcggatattgccgtattgtccatacttttggagaaacaggagaaacagcatgtttgaagaaaaattgcagcaggcgtttgcaaatttgcaaattccctgtacttccgaccaggccgctcagtgtgcccgttattttgccatgttggtagaagccaatcaaaccatgaaccttaccaatgtgacgcaggaggacgaagctatccttttgcacttttgcgatagcgctcgtctactccccgtttttcccttacccaaaggggttcgctgcatcgatgtcggtactggggcgggctttcccggcatggttcttgccattttgcggccggatctttccataacgctgatggattccctgcaaaaacgcgtgctatttttacaacgagtcgtcgaggccttggggctggcaaatgtacgctgtgtgcatgcgcgcgccgagcaagccggccatgatacgcagcacagggcgcggtatgattatgctttcgcacgcgccgtagcctcgctgcctacgctggcagagtactgccttcccttcgtgcgtaccagcggctatatggtcgcctataaaggcccacagggccgccaggaatgcagccaagcgcgcactgctctccgtacgctgggcgggcaatttgaaaagcttgtagatagcggtattcccggtcgggagcataccttgattttcatcaaaaaaacacaggctactcctcaaaaatacccaagaaaggccggtatccccacgcgccagcctttataatccttgcatttgacagcctctgggctgttttttgcttcctttccaaggaaatgatgggccgcattgtcatctgtgcatgatttatagcaaaacaggccctttttttgttgccttttcctagtgtttctctgccaaaacccgcgtatacgctgcatcattccactacttttgtctctttttgacggctttccacgaatcgctatttttttgttttgcaatgctgtattttataggtaacccagaaataaggagtgcattggcatgaatctttcccgtatacaaacaacccccgttttgcggagcatagaaaaaatccccatccatttggtgcacccaaacccctatcagcctcgccgcacattttctgagcaaagcattgaagagctggcaagaagcatcgcgcgctacggtttgatccagcccattgtagttcggcgcatcaatgccacgcactacgagctcattgcaggcgaacgccgtctgcgcgcatccaagcgggcgggcctatcggaaatcgacgcgatcatccagcgtgttggcgaacaggacagtgctgtcatggcactgattgaaaaccttcagcgcgaaaaccttcacttttttgatgaggctgaagcataccgcaaccttcttttggagcatgggatgacacaggaggatctggcgcgcaagatcggcaaaaaccaaagcaccgttgccaacaagctgcgcatattaaaattgacccctgcggtaaaggccgcgattatggccaaccgattgaccgaacggcatgcgcgtacactgcttcgcatacaggacccgcgtttgcaactgcagctcatcgatcaaattcgccgtgaaagcctttctgtaaaggctacggaggatttggtggagcgtattttggacaagcagtattatgaccaagaacatctacacaaaaagcgcatcagtggttttgtgcgtgacggccgcttgctgatgaacgacatcaaaaagctggtcaagcaggtatccgatagtggcttacctgccaactatcaggtgcgggacgcaggcatgtgctttgaagtgatggttacaattcccaaacaacccttacaaaaagcacagtaatctgtgcgcaaagaaggcgagagaccccctctcgccttttttgtttcacgtgaaacataggcagattgtgcttgtttacattgcaagccctgctctgtataataaataggagacaaacagggggtgtcattttgggaaaaatcattgcggtagccaaccaaaagggcggcgtaggcaaaacaacgaccaatgtaaacttgggcgcttgcctggcccggttgggaaagcgcgtcttaacagtagatattgatccccaaggcaatacaaccagcggcctggggatagaaaaggaaacgctggagacttccgtgtatgaggttatgattgataatgtgcccattcgccaaggtatcgtgcatacgatggtggaggggttggatctgctgccaagcaatatcaacctggtcggcgcagaaatagaaatgacctctatgatcgcccgcgagcatatcttaaagggctgtctggaggaagtgcgcagcgaatatgactttgttttgatcgactgcccgccttcacttgggttgttaacgctcaatgcgctgacagcggcggacaaggttttggttcccattcaatgtgagtttttcgcgctggaaggcctcagccagctcatcaataccgtagggcttgtcagtcaacggctcaacccttccctttcgatggagggcgttgtcatgacgatgtatgatccacgcaccaatctatcgcaacaggtggtggccgaagtcaaaaaatacttccaaagcaaagtataccaaaccatgatcccgcgcaatgttcgtttgggagaagctcccagctttgggctacccatcatgatctatgacccaaactgctcgggtgccaaagcatatatgagcttggcacaggaagtgatagatggaaacggaggcgatagcgatgggcaataacatgaggttgggcaaaggcctggaggcattattgggaaacgttgcggcatctgcgcctgccgagcaggatgaaagcaaggaaagcgttcgcattctttccatcaatcaaatcgatccaaacccctaccaaccccgccaggaatttgatgaagcggaaatgcaggagctggcggacagcattgcgatgcatggcgttatccagcctattttggtaacctcgcatggacaggggcgttatacgctggtagcgggtgagcgtcgctggcgggcaagccgtaaggcgggcttatcagagatccctgccatcgtgcgttcaatggatgatcgggctttgagagaaattgcgctcattgaaaatcttcagcgcgtcaatttgaacccggtagaggaagcggaatccatctccttgttgatgcaggaatatggactgacacaggaaaatgtatctgagcgggttgggaaatcccgctctgctgttgccaatgcattgcggcttttatccctgccgcccgccgttttgcagatggtgcgcgacggcaagctttccagcggccatgcccgcgctgttctttccgtgcctggagaggatcggcagttggcctttgccgaagagatcgtaaagcaaggatatagtgtgcgcgaagcagaaaagcgagccaagctctggaaggaagaggctgctcggccggcaaaaaagaaggccgttttggatctgcatctacgcagcgcgcaggaggagttgcagcagcgattgggaaccaaggtggaattgaccggtacccaggaaaaaggcaagatctccatcagctatttttcgccttacgaattggagcgtttatatgtgctgcttggcggccgcatagaacaggactgattgaccactaaaaaagccgctaaaagcggcttttgctttataaagcattggaggcaacacattgaagcaaattagaaaaaaaggtcgtttttggcgctggcttggttggatgctgttgctgtgctttgtgttttgggctagctattgcggctacaactattataaatctggttttgttttgtttgaattgttttggcagtcgttacagcgatatgctatttgttttctagcaccctccatcctctgcttctttttagggcatatacatcggcggcgtgcctatcacgcgcaaaaacgacgcccacccttgtagagaatatacaaaaaggcatggaattttccatgcccttttgtttcacgtgaaacatccagtttgtcagaataccttgccccgcatcaacagtagaatgaagttcgacttgtagaagaaccctgctaagggagcggacaacacataatccgtcaccaccggcacattgaggatagacaatgccactggcgccaacgccataacaatatagcaggcaaacacaccgcgaagcaagcccgttagcgaaccagccagtacatcattgtgccgtaataccggaaacttatgcgtcgcatcggtggcattgatgatgacgccacaaataatacgaaatacaaagaacaaaattaagaaagtaatgatgttcagtgtcgcatacgctacggtgtagttaaagtaatctcccacagtggttaatccctgggaggcaaacgcctgcgaagcaatgttagatttcacaaggtttccaaacggagaaaccaggctgctgttgttcaccaaatcgttgagcgtagcagcatccacctgcgtaatgggtgttgtaatcatggccagcggcgtatcgtagggtagcttggcagctccttcggtatagttaatcagcgtttgcatcatgccctgcccgctcatcgcccaagatagcaggggatgaagcaaatatgccaagatccatgatacgaaaaagctggctgtcttcaatgccgagacgacaaagcctctgtacgcgcccagcaaaactgaaaccacaatgacaatgatcaaagccagatccaataaattcataacatacacctccttaagggagcgttataatatacaccttatcctgtgcaaatagcaaggcatgctgcttgctcggcaaaggttcatatttttctgcggtaatgggtacctcgtaatcgcccgttgctgtaccatctgcattataggtgcggatcatcgtgggggtaaaggcataaaacttatccctgcccaggcttgctttgatggtagaagaaggcatttgcacgaataaatctttcccacccggctccacatagcgcacattgctgatattcttttggccggcatcttcgccacccggaataaagagaatccgcgtattttcatttttatccacgtaagaatcggcaaattcccatccgtaaatcaacttttccgattgcttggtaccgatataatccatttgcatcaaatgattggtgcccaccatatacagtgtatcttttaagaaaatgacccgctgcaacagctgaccctcaatggcaatgttgcccgtatttgccaaatcaccattgtagctcatcacgcgcgccaccggcaccaccgctccgctgtctatcgtataaatgtagaaagcattggcagaggtaaaggcaaagtccacaataaatttcccggagaaatcataggtcgtaacctcttccccttttttattgagcatcacaatcttggaggttccggaggtatcctcattcataaccgccacataatcctgcccgcaggaaacattggcaattttcccgtaaaattcctttgtaaacagctgctctccggtattcgagtacaccacgactacactatcgctgaatattgccaccagcgaactggacgctttcacgcttgcgccagacagcggcagctccaaggtccatttttcattgttggcataatccacgcagctcagcttttgctcgctgatatagtagatggaatcttcggtagcatgataagacatatccgaagtaaaattcaactctttcggattgataccgctggtggcggcggaaacgatccaccatataccaagccccagcacaacgctgatggctaaaatgatcgcaatcaatcccaatttatcctgatggcgccggcggccccgggtacgggctgtctttggcgcgcgctttcctttttttctaggctgtggaggaaacatcctcatccctcccatattataagaatacacaatattgtaccataaatcctctgcaagtgaaaatcaactttggcgctcttgcggaaaacctgttttcgcagtaaggcaaatatgataaaatactgctaaaaaagttggaagaggattgtttggttgatcggtgtcattgtaaatccaatcgcgggaaaaggccgcgccaaggagcttttgcctgaaattcaggcttttttaacgcaagcggctctaccctattttatacaaattacaaagtgccccggcgatggggtcgcttgcgcaaaggaggcattggcccaagggtgcgaccgtgtgctgtgcattggcggagacggcacggcgcgggagattgccgaggggctatgcggcagcgcatgcgttttgggcattgtgcccgccggtacgggcaatgattttgcgcgcactttttccctgcctgttgatccagacgatgcgctagaagctgcggtctttggcccggccaaacccatcgacgtatttgtcacggataacggggtatacatcaacatctgctctatcggcctagattccgacgccgcctacaacgccgccaaagtaaagcggctggcaggaaagatgtgttatctggtgggcgcgctgtttgctgtactccgccgcaaaatttatcgctactctctttccttggatgatgcagaggagatcgaacagcgcaatatgctgaccgctttttgcaacggacgttattacggcggcggtttttacccggtacccagcgctgaccccagcgacggatggatggacgtgcttaccgtggagccaatggggcgtctgcatacgctgccgcttttggccaaatataagaaaggaacgcacatccatcataaaaaagtgcatgtgcaaaaagccaaaaaaattacggtgcgctccagccagcgtttatgtgtcaatttggatggggagctgcttcacaccaatgccatctcgctatcgctttggccacaggcgctgttggtcgcacaaaaaggaacgcaagcagtatgagcacagatatccaaatttctccctccttacaggcattcatccaggcgctgcaagcgcccgtcccgctatacctcgtgggcggtggcgtgcgaaatgccctgcttggcctgccggaaggcgattatgacctgaccgggcctttgccgccggaggaaattttgcatttatccaaacgtgcgggtttccccgctgtgttgcgttccagcaaaatgggcacagtagagatccggctttgcggcaacatcatcgaatataccccctttcgcatcgagtcctatccacccggcggcggccatcatcctgcacgcgttgtcttcacgcagtccatggagcaggatgcgctgcgccgcgattttaccgtcaatgccctatatgccgaccttgccaccggccgggtcctagatcctgtaaacgggctggcggatctggcaggccgacgtctttccacctgccgcccctccgctgtggaaacgctgcgggatgatgggctgcgtttgctgcgcatggcccgttttgccggcgaactgggatttgagatcgcacctgaccttatgcaggctgcccaacgtttcgctccgcagatacatgctatctctgcgccgcgtatctgggccgaatgcagtaagattgtgttggccgacgtcaaataccaaacgcccggcggccatgcacgggccatgcaggccttagaggtatctggcgtattgtatcaactgatcccagagctaaaggaaggaaagggcgtaacgcaaaaccaaatttatcatgcgtttgatgtgctggggcataacctggctgcctacagtgccagcctgccagaggcagcgttgcgctggtccgcgctgctgcatgatgtgggtaagccgcgcgccaaggatgaaacggggcgcatgatcgggcatgacgccatcggcgctgccatgtccgccgagatcttgacgcgattgggcgcagacaatcacaccgtgcgtcttgtccacgatttgattgcgcgccatatgtttgacctaaacggcagcgccaagctcaatacggtacgcaagcattttgccgtgtgggggtttccgtttgcagagcagctcattgcgctgcggcgcagtgacattgcgggttctggccggccgttggtggatatggatacggctggcaaatgggaacaaattttaacacagatgcgcagtcagggatgtatagacgatatacggcaactgcgcatctctggcgcagaaattatgcaggcctgtcagctttcgccttctcccatggtggggcgtatcaaacaggcattgtttgagcaatgcgctatggatcccgaaaaaaacgatccgcgctggctggtttcgatggcgcccaaagtgtactctcagctggaacagcgccgttagcaatttttgggtttgccatatttgttccgtttttccctgctatactttttcaagaaaggccatacgtttgtcatggcctttctatgtctgtctacaaggggcttggcatgtgcagagggcccatctgtctgtttacattgcaatcgatcccaaaatcgggtaaaataaatgtctaattagagaatcggtacattgtacattaaagaaggtgaaagcgttggcggcaaccctatctcatcatgatgggttttattatggagaacataccggagaattcattgagatccaagcgttgcgcatccatattacctacgccggggagggcgaccccgtcctattgatccatggggccggccaaaattcttatacatggcgccaccaatttgaggcgctggcggagcggtattttgtcgttgccgtcgatatgatcggatacggttattccgataagccggatttgacctataccatcgaggaaaattctgaatttctgttggcgctgctcaatacgctgcgcatcaagcagacaaatatcattgccatgggcagcggcgctacctatgcgctggactttatggtgcattatcccgaccgcgtgcaccgcgccatctgcattgcccccggcggcgtcacggacagcatgccgctgccgctgcgcttgatgcagtcctccacatttggctggcttggcaaagcgctgttcagcgaaagaaaattcaactccatgatcagcaactgtatgtttgaccaaacctgcctatcctcccaggatctatccatctattatgaaacgatggatagcaaggaatcccgcgaagtgctgcgccgcagcatcgccaatttccaggaggacgacgtattatacaatctgcggcttttgccgcatgaggtgctgtttgtctggggctcggaggatcgatggcgccccattgccgatgccggcctatatacggcgcccattgaaaattacgctttgtatgaaatgcggaactgcggccatctgccccatgaggaaaaaccggataagttcaacgaaaatgccttgtattttttgcgctacgggctggacggctgatccccacccattcccgctacggcgggaatttttgttataaaggaggagcgtctatgcagatccacctggggcaaatcgttgttatgaaaaaaaagcatccctgcggaggcaaccgttggaaaattgttcgcgtgggcgcagatgtcaagctggtatgccaaacctgccagcgcaccatcatgctggatcgcggtgagtttgaaaaacgggtcaagagcctggagccggaaggagactaagccatgccccattctgaaaaaaccaggcagctgccttctttgctgctcacatttgccatcgccatcgccgtggcgcttttcttacgcctgtttgtttttgagctggtgcgcgtcgaagggcccagcatgcagcctacgctggaagatgatgagcttttatttgtggaaaaggtttcaaagcactttggcgatcccgctcggtacgatgtggtcatttgccattatgacgacagcaataccaactatgtaaagcgcatcatcggcctaccgggagaaaccatatccatcgtagacgggaagccgtatatcaatggcgaaccattgcaggatgacgtgtacggttccggtctaaagccgcatgatatggaccccgttaccatcccggaggattgtgtctttgtcatgggggataaccgtgccaactccatggacagcgtatccatcggccccatccagaaaaagtatatcgtaggccatgcgctgttcatcgtttggccgtttagccaaattggcggtctttaagacgaatcgataggccctaaaaagggcctatttttgtttggcgccaagtctatttcagttgaatatgttacaaaaatatgatatttttatgaaaagattgttgttgctctgtgggaaggagacttctatgaaacaaaaacgattggctttgggcctctccctcagcctagccctactctgtctcgttggttgcgctcccgcgcagacagcacagcctactgccagtgctgcgccctcgtccgccaaggatgccgtggtagagattacctccgaaacaacggcagaaaccatcgacgatatggattccggcagcggcgaagccacgctgtatgccaaaaaccaggcgggccaagaggtttggacccatacctttaccatcgaggccatgaccgagctaccgccggtatcgcctgcagccattacggcagatcgtgcctatgtggaggtcggcggcacactgtatgccttgtcgctggccgatggcgccgtgctgtgggctctcaatgatgttggggtccccctggaggcgccgttggtggatgccgacggtaccatctacctctccggctattacggcccggacctgattgccatttccccggacggcggagagctttggcgtgtcaacggcatcgatactgattactattggtcttcccacctttgctttgagggcgatctactcaaagtcacttatgacagcatggcagggcaaacgcccgattacttgttgtttgataaatccggcaaccaggtggcgcaatagcttcttgcattcgcaagtttgctgtggtatacttctttagcattgtatccttgtccctgccaggccggtaggggccggaagtccaagaggaggtgaaacgccgtgaataagtatgaagcgatgtacattgtcaatcccaatgttgcggacgatgccagagctgctctggttgaacgtttcagtgggatcgtgaccaatggcggcggcaatgtcgagaagattgatgattggggtaagcgcaagctggcctacgagatcgacgacttgaccgaaggccattacatcctgatgcattttgaaagcgaatccagcttgcccaaagaactggagcgcaacttcaaaatcagcgaagatgtcatgcggttcctggtcattcgcaaggaagcgtaacaaatcgaaatggagataaaaaaatgaacagagctactttgatcggaaacctgacccgtgatcccgacc

SEQ ID NO: 456 - DNA, 27314 bp, Unknown
  16S sequences of unknown bacteria
tgcgcaacatccgcagggatggtttgtagcctgcggtcagcctgggtcaggcaagacgcatctttgtactgctattgcgggggaaatgctgaaaaagggtgtggccgtgcggtatatgctttggagagaagattccgttgagcttaaggcggtgacgacggacaaagaggagtatttccggcgaatggaaccgctgaagaaggcacagtgcctgtacatcgatgatctgtttaaaggaggaacctccgtaccagatctcaaacttgcttttgaactgttggactatcgatatcggaatgatttgttgacaatcattagcacagaaaggaacctcaatgatctcgatgagatcgacgaggggattggaagcaggatacgggaaatgagtcaggggcatcggatctgggttgcaaaagatcggagaaaaaatcagagatatggcaaagaagcgtaaaatcaccatcactgcggctaagtggaaacaggaaaatcgcagggaggcagacaagatcataaatttgtatttaatgtgcacgatttgggcgctgcatgctcgtgagggatttggtaaaaaacgacttgatcgcgtatgcaaaggaatcacggaagtagcaaatgatattgcagcaggcaggttgacgccggaggatattcgacggacagttgcagaggaaacaggctttgaggtggtgtgattgaagcaaaaaattattattcgtggcgccctgcctggtctaaatgagtacatcacagcagaacggacaaaccgctacaagggtgcagagttgaaaaagcgggcggaaagtattgtgcttcgctcattgcgcggacttggcaaatggcaggcagaaggaccagtgtacatgatatatcactggtattgcgcagatcgaaggagagacaaagacaatgtttcctcttttggacggaaagtgattcaggatgcgcttgtaaaatctaagatcctgccgaatgatggctggaaagacatctctggctttgaggatcggttttatgtggacaggaaaaatccccggattgtggtggagctgattgaggaggaagaaggatgaaaatcgcgctcgacgaaaagcactttttaaacagtgatcaatactgctactggatcagctgccttgtgacgtcaaccaacaagcagacgggagaagaaaagaccgttgagagacgcgtgagcggttatgcacggacttttagcggtgcagtaacctcttttatcgaaaatagaatcaggacgtcagaatcagctgaaatttgtgatttaaaaagagaagtggagcagctgagaaagacggtacagggatgggaggtagtaaaatgaaaatattagtggcatgcgaagagagtcaggcggtctgtaaagccttccgaaaacggggacatgagacttacagttgcgacattgaaccgtgtagcggaggtcatccagaatggcacctacaatgcgatgcgctggaacaccatgagccttacgttaacgggggatgcaaagacgcaaatggtaactatagaaaattccaaggcaggaaagagcgtgatcctaagaccagatcaaaaacatttaaaggcattgcggaagctatggctgaacagtggggatagcaagtaaagagaggattaaaatgaacacaatcaatattaatggaataacatatgtgcctgtagaggaattggataagaccatatccgcggtagaccttaatggtatgccatataagatagttagaacgtattccgcaggagtatttgccggatacatcgaggaaagagacggcaaagaagtgactatgcgaaacgtacgccgtatctggtactgggacggcgcggccagcctgtcgcagttggctgtagacggtacttgcaaaccggaaaactgtaaatttgccgtaccagttgaccgaatccttgtgacggaagcaatcgagattttagattgcacaataaaagcgcaggaatctatcgaaggagttgaagaatgggcagcggattaggctacggcagcggttacggcaacggcaacggcagcggttacggctacgacgacggcgacggctacggcgacggcaacggcgacggcagcggcaacggcaacggcgacggcagcggctacggcagcggctacggcagcggcgatggcaacggcaacggttatggcagcggttacggctacggcaacggcagcggttacggcaacggcaacggcagcggcgacggcgacggcgaataattatgtcgatctggctggttatgcggcttgcgggatggagattgcaggaaaagctgagtacataagtgatgaggatggaatctaaagaatacagaaagcagctcaaacagctgatcgatcatcatggcgcagacgagaccctgacaatttgcaccgaagaatgtgcggagttgatcaaagaaatcacaaagtacaagcgggctaaaaaccatacggagcagataggatgccgtgtcggactggcagaagaaatgacggatgtcctgatctgtatcgacatgatgcagctgatttttgatatcaccgcagaagaacttgagcaggaagaaaggtgacatgagggtgggggaatttgagcaaaatttaaagaatatagctaagatacgtcgagaaatcaaaggattagaactcataattcacagcaaccgaaagacaatggcaaccgatatcgtttctggatcatcggacgagtttccttacagtatccgccatttccgaattgagggcgtggatcagtcgagggaaagcacattacagatgagactccagcggaagaaaaagaaactggagcgggaattgttggaagtggaaaagtatttggataaactggataatccggagattcgaaatattttgcgtttgagatacgagcagggattgagttggatggaggtcgcacgaatatgcaattcaacagaaaaagcagtacaaaagagagcagaaagatttttaaaaaatttataaatgtcgtacatgtcgcatttttcactgttactatggtatcaaggaaatgtgtatgataataagcgtacattttgtcctcctttcatgatgatattggatataacggtcaacaaaaccctgtcgcagagcggcggggttttgttgtgggagagaaaaaagaatgaaaagtaaaacctacgatgaacttgttgaaaaattcaaaccaaagaaaacaacagatgactgcatgacgccgccgcaggtttatgatgtggtgcgggattgggcgtgcagagaatacaacatcaatccggagcgtatcgtccgcccattttggccgggtggcgattacgagaattttgactatccggatggctgtgtcgtgctggataatccgccgttttctatattttcaaagatatgcgaattttacattgatcataaaatcaaatttttcctatttgcacctgccttaacaatattctccgggataaaaatattaaaacatacgaaccatattctttgcgatgcaagtattacatatgagaatggtgccgtagtgaacacggggtttataaccaatttaacagaggaagtggtagctcagactgcgcccgaattaggggacgtcatcaagaatacttgcaaaatgcttcggcaaaaagaaagaatcgaacttcctaaatttgaatatccagatcacgtcgtaacctcggcgatgctgggaaagtatgcaaaatatggagtgcatttaaaaataaaaaaagaagactgcacttttatttcgcgattggattctcaacgaaaacacaaaaaagtaatattcggaggcggacttttactgtctgatacggcagcggcggaacgggcagcggcggaacgggcagcggcggaacgaatgatgtccagcaaatgcatgacttatacatggcatttatctgagagagaacgacagattatcaaagacatggaatatcgcggcgaataaaaaaatatcatctttttcctttaaagctgttgacatatcgtacacgatataatataataaagacagttaagggagatcttaacaaatacggcaagagaaaggagaaaagatgagcgaagatatgacaagactggaactaatgactttgcttctttcgctggaagcccttctggaagaagggaaggcggataaggcactggaagtaattaaaaaagttctggccgaagctgaaagagcttgaccagaactgagctgaacagaggggcggagggcttgccaccgatgccctgtctgttataacgagtataacagataccgtaatggcaagtcaacgaaagagacgggagtcatgcccagcagacagtcaatcgcgacgcggaagtatgaagaaaaggcgggttggatgtcgaagacgtacaagctaaaacgtgaagttgtagaaacctttgcggaggcttgtgaaaagaccggcgtcagccaggcaggaaagctcacggagctgatgaagggattcatcgaggaagtgaacaaaacaaaagagtaagacagaaaagcactcgggagaccgggtgctttttgtgtggaaggcaggtgagaaccatggcaaaattaacagaaaaacagaaacgcttttgcgatgagtatctcatcgatttaaacgcgacacaggccgcgattcgggccgggtacagcgcgaaaaccgccggaaggataggcggggaaaacttgaaaaaacttgaaattataaagtatatagatcagcggatgcaggagattaaatcgcagcgtacagcggatgctgcggaggtgttggagactctgaccgcggtgatgcgcggcgaagtcagggaagaaattcctctgttgtgcggggaaggctgccaaaagttagttgagaaaaacacggcggtgaaagaacgactgaaagcggcggagctgttaggaaaacgttaccgtttatttgaagaagatggaagcaaacgggacgcaggtgcaatcgcagacttcctgaaggcgctgcatccgaaaccggaagatatcaccgcactgtacgaacaagacgatggcaaagaagagcagtagttttcgatttctaccgttttcggtaaaacagcagcgcttaatgaactggtggcgggaaggcagcccttaccggaaccgcgatatcatgatcgcggacggttccatccgatctggaaagacgatcgcctgcatctgttcatttctgatctggtcgatggagtgtttttccgggcagaattttatcctttcgggaaagacgatcgggtccctgaaaaagaacgtgatcggtccgatgctgcagatattgactgcgtggggaatcccttatcggtatgtgcgcagcggagagcagtatattgaaattggtacgaacacttattacctgtatgatgcgcataatgaaagttcacaggacaagattcagggactgacggcagccggtgcgctggcagatgaagccgctctgtttccccggaattttatcgagcagatgatcggacgatgctctgtcgaaggtgcaaaaatcttcatgaactgcaatccggagagtcctgcacattatgtaaagacggaactgctggataaggcagaagagaaaaatatctatcatcttcatttcacgatggacgacaatctcgcgttatccccgaagacgaaagaaaagttttaccgcatgtttaccggcgttttctataaacgtttcattttgggattgtgggcggcgacagatggtctgatctatcagcagtttgccgatgaaaaagaacgttttctgctgaatgcggctccttcagatattcagtatgcagtaatcggcgtagactttggaggaacgaagtccgcgcatagttttacactgacggggttgacgaaaggatttcgccagatcgtcatactggacgaattttatcatgataacaagaagaacgggcggctttcaccgaaacaggtggaggacgcttttgttgattttatccgcagagcaaagcggcgctaccgtgtttatgaggcttattgtgatagcgcggaacagactttgatcgaaggcctgaaggtagcgtcggtacgctcacgactgggcatcgatataaaaaatgcgcaaaaacgaccgatcaatgaccgaattgcattctataacagtatgattgctcaggatcgctttcggattatgaaatcatgtaccgcacatatcaaagcgtttgaagaggcggtgtacgatccagacgaaccggtgaaagatatccggctggacgacgggacaacggatatcgacagtctggacagcacggaatatgcgaccgagagcatacaggatgacattatgtatctgtaagaggtgagaaatgcagggaattttacaatatttgagacgccggggatttgagtgtatcgacagtacctactacggacacatctctaactggctcagatggtatcagggcaaggtgatcgattttcatacgtataaacagtataacggtcgctgtcagattacccgggagagaaagagcttgggtatggcaaaaagcatcgcggaagactgggcgaatctcgcgctcaatgaaaagctggatatcaccattgccgagaaacggacgcatcagatcgtaagtgaagtcctggaacgaaatcagttcaaaacacgcgccaatcagttagtcgaacaagcgttcgcgttcggcacaggcgcttttgtggagtataaggaaaacaacgagactcgtatcgactatgtgcggggcagcatgatctatccgctgacctggcgtaatggggaaatacgggaatgtgcgtttgcatctatgcgtaccgcaagcaaacagcagcagctgtatctgaatatccaccgactggaaagtggtcaatacgtaattgaaaatcatatgttttctgtcaatggagagacgctgggcggagaaatcgatcttccgccggatgtggaagcggagtatcggacctattctgacgttcctatgtttcagattgtgcggccgaacatcgtgaacaatattgatctggacaatcctatgggagtttcggtatttgccaacgctattgatcagctgaaagggatcgacctggtatatgacagctattgtaacgaatttcgtttggggaaaaagaggatcactgtgccgatatctatggcgcgtatcgcgatggaagaagacggatctgcccggccggtgtttgatgataacgatacggaattctatgcggtaccggagacgcagaacggggaaaacaaaatcacagaacacaatatggaactgcggtatcaggcgcatgaagctgggcttcaaacgggcttgaatttactgtcatataaatgcggcctgggaaaagaccggtataatttccaggatggccaggtgaagaccgccaccgaagtggtgagtgagaaatccgatctctttcagaacctcaagaaacacgagttggtacttcgcagtgcgatcatcggtttggtaaaagcggttgaaattctcgaggggctctccacagagccggaaatcaccgtgaatttcgacgattccatcattgaggacgtaggcgcggagaaacagagattcctgcaggagatccgcgacggcgtgcgtcagaaatgggagtaccggatgaagttttttggagaagacgagacaacagcaaaatctatgattacagaagaagatccagatccgtttggtttcggacagagcggtgatgcctgatgctgacaccggaatttcttgacgggttgccggacactctgataaagctctatgcgcaggcggagcgggatatcctcatggacatggcgcgaagaatcggtgcttatgattattggattcctgcagcggagcatcagaagcagatgctgaaagaaatgggcgctgcggaagaatatatctatcagcgcctggcagagcttacaggcaagagtacagaagaactgaaaaccctgtttctcttggcagccaacgagacactgacgtcggatggggaatattatcgggcggcaggacaggaaccggagacgctggatacttccgaaaatctgcaaaagacgctgaccgcagggatgaggcagacgcaaaacgtttttaaaaatctcacccgtacgacggcgagagaatccacgggagtctttgtaaaggttctcgaccgcgcctggatgcagatttccaccggaacatttgactacaacgcggcaatccgttcggcggtaaagacactggcggagaaagggattcagacggcgaactacgactctggaaaaagcacatccatcgaggcggctgtccgacgtgctgtgctgacaggaatcaatcagacttctctgaagatgcaggatgcgctcgcggatgagatggacagcgacttggtagaagtgaccgcacattccggcgcccgtccggaacattcaaagtggcagggaaaagtctacagccgttccggaaaatcaaagaagtacccggattttagaaagtctaccggctacggaaccggttcaggtctcggcggctggaactgccggcataatttctttccttttttcgaaggcagcccgcgtaaatatacggaagaacagctaaaaaagctggaagaaaaggacatcgaatacaacggacagaaaatgaccaggtacgaagccagccagaaacagcggtacatagagcgtcaaatccggcgttggaaacgtgaaaatgctgcgatgcaggccgcaggactggatacttacgaaagcgcagctaaaattaagaaatggcaggatatccagaaagatttcatcaaacagacgaagctgaagcggcagtatgagagagagcgggtaccaggattcgattacaaggcggcgaagcaggttgagcgagatatagacgtacagaagaaaattgaaaagcaaaaacaggaaaggtataataaaaagaaagaggaagcgattcagctgattaagtcagatactacttcgaaatcgataaatcgcggacaccaaaacaagcatataaaagattccgatggatatattgaaggtcgaagttatatttttggaaccttggaggatgcccaggaacttgtagatcgttatcacggtactggagaagtgaaattaaccgcctctatagagtggacgcacaaagaatttgtcgttgctgatgaaccgataggtgtgtggattgataatacaacaggaaaagaatatgagacccgccgattctctattcattacggtaaaaaaggaacgcatattgttcctgcaaaggaggttgaggaggaatgattcttgctcaggcacaaggtaaacgtgttcggattacgcttaaagatggtaaagttttcgaggggcttgcgtatgactacacctcagaacttgataatgaaccagatccggaaagcatatcaatagatggttttgaattgtatgttgacgaaattaaagagatagaagcgatataatagaatacaggtgaaaatatggacaacttcaaagtcatatacagaattctcaaacatctggaagctatgatggacgcttctgaaccggatatgtctccgattacagcggaaagtcttggaatatcacagatgcgctggatccgtctcatagaaatgttaatcaatgagggatatattgaaggtgcggaattggcatactgtttgcgctcatctctgccgattgtttgtgagagggagatgagaatttcactgcaaggtttggaatacctgcaggagaacaatcttatgaaaaaagttgcaagtgatcgaaaagacaacacagaaatccttgcataacacagaagataaatcagcatcgtatcgagaggtacggtgcttttttatacccattttgaccggtccgaagtcgagaaactacggaaccatagaggacgcgaccctcgagaaaaaagcgaagtggaaaaaggagtaaaaatatggaacgtaaatttttagaagatctgggtctggaaaaagagactgtcgacaagattctcgatcagaacagcgccgacattggaaaacacatcaagaccatcggcgctttagagctcgagcgcgacggactgaaaacgcagttatccgatgccaacaagcagctggagggtttcgatccggagtggaagaagaaagcggaagctgcggaaaagaaactgagcgcgaagcgctttgaattcgctctggaaaaaggtctttcttcttctggagcacgtaatccgaaggcactggccggactgatcgaccgagcaaagatttcgctggacgacagcggagatctgatcgggctggatacgcagattgaagcgttaaaaaagggagaggatactgcctttttattccaaccggcgaaatcgagcacaggtcttagccatgaaggaaataaagaaccaggcacagataaaaatgcacaggcaaatgcggctctcagagcggcattcggaaaggagtaagatactatgccagatatgatttcccgccagcaggcggaagctctgattcaggagcagctgatcaatacgattcagcaggacaccccaaaaaactcgatcttcatgcagctggcacgtcggttgccaaatatgaccagtaaaacgacgcggatgccggtactcgatatgctgccgatggcctactgggttaatggagataacggcttcaaacagaccagccagcaggcgtgggacaacgtgtatctcactgctgaggaattggcggtgatcgtaccgattccggaagcggtggttgacgatgcatcctttgacatcatgggcgaggtaagaccgcgtgtcacggaagcgatcggtatccgtgtcgatcaggcggctattttcggtgttagtcgcccggcaagctggcgtgcggatatcattacttccgcgcggcaggcagggaacaacgtagcgccgggcagcgacttatataacgctcttctcggagaaaacggtgtaatctccaaagtagaacagggcggccgtatggtcaacggcgcggttgctgccatggctatgcggggaaaactgagaggaattaaaacgacagaaggcatgccgatctttaagtcggatatgcagggcccgacacagtacgcactggatggtgcaccgatgtacttcccaatgaatggcgcctttgacacttccgtcgcgcagctgatcgtcggcgactggtctcaggcggtgtattccgtccgtcaggatatcacggtcaagattttggatcagggtgtgattcaggatccgagtacgaaagaaattgtatataaccttgcacagcaggatatgatcgcacttcgtgtagtgttccgtatgggctgggctctgccgaatccggccaccagactggatgaagatcgtctgtacgtgccgtttgcttatttggagccggctacggcggtaacaacgcagaaggttacttttaccgtgaagaataacgaggaagaaccggaagcggtagaaggagtggttatcgatttagacggggcgcgtctgaagaccggaacagacggaactgcgatttttaacctgaggaagggaacctacaacgcgaaaatttcgaagaaaggttacggtactgttatcgaaaccgttaatgtcgatgcgtcagccgtgagcaaagatatcactctgatcccaaaagaatagggaggaagaagcatgctgacagttgattacagtttttacagcgaggtctatcaagggactgcaattcggtcggaggaatggccggaatacgctcgaagcgctgcggtttacttgaatgccgttacttttggacgagcatcaaatgctctgccttccctcttgctggacaactgtcgaatggcattgtgtgccgttgctgatgcggattttcagcaggacgcgggaggagaagtcgccagcgccagtaatgacggctacagcgaaacctatgtgaccagtcaaaagacaccggagcagcggcgttatgccgctgtaaccggttatctggcgacgaccggtctgctatatcagggaggtggtgcgccgtgttgttatgcaccgaaaccataactttgatccagccgcagcgcacagatgacggcgaggcttaccttctcacagagattatcggcgcaagctggtacggaaaacgggtggtcacccagaccacaaagggggcggaaccccagaatacctatatcgtgcgaattccggagtccaacatgccggccggggtgatgccaaagcgcggagatttcgttatccgcggcatcgtcgaggaaataaaacacgcgccggcagactttgctgaccgggaatatttctgcatcacttcgatgggtgataaccggagaggaagactgcggcactgggtggtgagcggatcatgaagatcaatattgatgtggatgcaattctgcgaagccgcgggatgggttcagatgcgaagacacagcgatttatcgcaaatgaagtggcaaatctctcagatgactatgtcccctttcaaagtggaacgctgaagaacacgcgaattatcgcaaacgatgggagttcgatcacctatcggggaccttacgcgcactatcactgggtaggcgagatctatggtcctaacattccactgggcgatgagggatttttctcccgcgccccgaagaaacccaccgggcgccagatggcgtacgacggcggcccgatgcgggggccgaggtggacggagcggatgatggcaaaccgaagagccgatctgatgaaacgaattgccgtatatgtgggaggaaaagcaagatgacgaatatcgaagccgtgcgcaaatggctgcgcacgtacgagtcgctttcttccggacgtcttggcgtggattttcttccggaaaaggcacagacctattcggtggacagtgtgccgggaccggagatcgtaaaaagatatctggatggatcggcggtaaaacagtttgatttcgttctggcttcccgggaattctttggagattccatcggacagaacgcggataatctgcagtggtacgaagagttttccgcttgggtggcgcaacagaaccgacggccgaagcatttgccggagctgatgccgggcagacgggcgcagaaagtggaagtgactaccagcggatacccctttcagatgacttctgaaggaaaagccagatatcagatacagctaaaaatgacatattttgagaaaggagcgcggtaattatgaaattatccgaactgatggcaggttatacgccggatgaggagtatgccggcattacaaacacagatgattttgtactggcaatcgatattgcagatacgcccagcacaaaaaaaggagaatacattgtcgtagaaaccggtgtgacagcggtagatgcgcagctgaatccggagacagaagataaaacttatttaagagcgggaaagagtaccaacaaaacggcgacccagcggactttcaatgtcactggagatcggttcgagggagacgaattccaggactatgcttgcagccatgcaattaaattcggcaagggtcagaaaatcgtcaagccttatgtatatttttcattgctcacaggcaaaggggaaagcggtcaggcggcgattattgtaaactccgatggatccggagatgcaggcgcggcagcagaggtggatatcgatatcatgtgcaacaattctgccccggtggaatatacctacgccgcagacagtgagtaggaggataggaatggaaacgtacagagtcaatggctacgaggtggagtttgatatctttgatcttacaaatctggaactctttgagtcagaaagaaatttcgccatgaagagagctgaggaaatgcaggccggtgttaccgatggtaacgcgttagagacgcttcatgaaatgtgtgagatcgttcgggactttttcgatgtcgtgctgggagaggggatctccaataaaatttttggagcgcgaagaaacgtcatgaccgaaatgtcagccttgacgaaatttctgcaggacgtgtctgatgtaatggatcgtgcgaaaacacagattctgcaggtggaatcgaattcgccaacgcgtcctcctatgaatcgccagcagagaagagaggcggaacgcaaagcagaaagagaaaagcgcagacaggaggcagcgcagcgtgcgaaatccaacgcggacactgcaggaagctcgctgaatacgtcagttgaagcgtaatccttttgaactgctgccagacaccgtagaagttggtggcgtacaagtatgtattaatccggattttcgcgtcggtgtttcgattgaaaccgaaatgttacaggaacatccggatgtggaaggtctgctggatctgttctatccggtaggtgttccgcagccaatagaggaagcggccgagcagatgattcggttttatgccggagaaaaagaggaagaaaacggagaggtaccgaagatgatttctgcatcgaagggacgaatctatgatttttctctggatgccgatgctctgaccgcttcttttgcgcaagcctacggcattgatctggaacatgacttaatgcactggtggaagtttcgccggctgatgttcggtctccctgcagatacatcttttatgcagcgaatccatattcgcagcgtggatatcaataaagtagataagtctcagaagggctattaccggaagatgaaaaaactctatgctatccggcagccggaaaagaagcgtaaaatgaccgcggaagaacgaaacgaacagatgcgccaaaaagtagcaaaacgatttgaggaggcgcaggcacatgcagaaaattaaatgtccgtactgcggctatgtgatgcctctgacccgcacaaaaagcgcggtgtgcagaggcctttttatcaagtgtaaaggccgccgatgcggacgtatttttgagatcaaaataccggaacgagaaatcaagtagcgcctgagagccgatgatttcgccacgatgaaaaggaggtgggatcattggcagacggcagtgtggttatcgaaattgccggagatgacagcgaatttaaaaaatcgcttgagggcttaaagtcagacagtaaaaaaagtgctggtgaactggaacagttaggtcagtccgggaaagaagccgggagtgagattcgcaaaggaatgaaggacgcatcctccggtatggacgatgtgaaagactccgccggtgatgggcagcaggccatcggaaagatgggaaaagagtcggaaggggcgaagaagtccctgaaagacatggcttcagggatgctctcttcctttaaggacatttcagaatccgcaggagggctgagcgaaaaaatcggaagtctcggtggaatgatgaaagcggcgtttgcagcaggcgctgttattgaaggaatcaaagcgatttccggagcttttcagacagccattgaaaagtctacggagtttcagcagtctctgaatcagctgcaggcatccaccggagctactgcagaacagatgaaaggctatgagtcggtcatggaatctctttggagtaataacttcggagaatccatggatgatctggcagatgcaatctctgcggtaaagcgaaatctcggagatatggatgcttccgcaatggaaaatgtcacggcgcaggcaatcactctgcgggatacctttgagtacgatatcgcggaatctacgaaagcggcgaaagccatgatgaagaacttcggtgtgtctgcagagcaggcgtttaacctgatcgccgccggtgcgcagaacgggctggactattccggagagatgctggattccatcagtgagtattcggtgcagtttgcgaagatgggactttctgcagatgagatgttccgtattttccaagcaggtgcggatgcaggggcttttaatttagataaaataggagacgcgataaaagaaaactctattcgcgttattgatttgtctgattcctcccgcagtgcgtttcagagcctcggtctcgatatagatgagatggaacggaagtttgcagctggaggagaatccgccaatcaagcctttgagcaggtaattaccgggctgtcactgatcaaagatccgttgaaacaaaatgagatcggtgtggctcttttcggtaccatgtgggaagatctcggatcgcaggtagtaactcagctggcaaatatctccgataaagcctatgcgtcatctgatgcaatgcagcagatgatgaatgtcaagtatgatgacttcaacagcgcgctggaaggtgcccggcggtcgatggatgtcttttttaagaacatcggagatcagttcgcgcctcagctgacctctgcgatgggagcagtcgcgcagggaatccagagtgttactgcaggtatgaaagagaatggattcaccggagccctggaagcagctcattccacgttacagggatttatcggtggaattcgagaaaatctcccttccatgattgcttccggaggggagttgatcctgcagttcattacgggcgcagcctcgtttctgccggaaattttaagtattggggccagtatcgttaccagtgtgatcgaaggtatcgcacaaatgctgccggaattgccgggtattgccgcagatgcgattgtgtcctttctcgacggtctgacgtcaggagatagtcagatgatagggaagggcgcggaacttctgctgaaggtcatcgaaggtattatcaagatgattccggagctgattgttgctgctgggcggattctcgcagctttaggtgaggctctggcgaacggactttcttctatgctggaaaagggcgcagaactggcgaagagtgtcatctcagggattgcaaacaaactgccggagattttagctaagggtaaggagatcgtctccaatgtagccagtggtattgtgggtggaattggcgctgtaagagacggtatcgttcaagttgcagaagcaatcgtgtcaaaactgcgaggcattatagatcgtgtaaaagaagtgggacgcaatattatcgaaggtctttggaacggtattcgagaaaaaatcgattgggtaaaaggaaaaattcagggtgcggtagacggcattaaaaatgtctttaccggtatcaaaggattttttaccggatcaccgtctcgatggtcagaagatgtcggcggttgggtcatggaaggtctcggaaatggttttgaagataatgcacatattccaatagacgccgcaggtgatgcggttcaggagacgaaggaagcctttattgaaggactgcaggatgctgaacgagaagccgaaaagatcatcaaaaaagactataagaccataggccaagtgcagatcgacgaaatgatcaaggggcttgaatcgaagaaggaagattctctgaccgcttttgaaaaattggtagaggatcagttcaaggcatataaagataagtccggaagcttgacgggggaatataagactgctgcggatctgctgatcagtgaatacaaagatgctctgaatgaaggctataaagaagcggaaactttggtcaaagagcggatgactgctatcgctacagagtatcagagccagtatgacgacatcatcaagaagcgggacagcttgcaggatgccctgtcttctgattttggggatttgttcgcttttgaggatgatacggttcagctggaaaatatcgaccgttcgattgagcagattcaacaatacaacgatcttctgacacagcttagagaggaatatggcgcgacggatgaattccttgcggagattaccagtctcggcgcggataaaggtctgatggtagcgaagaaactggtgaatctcggtcaggaagagttcggcgcttatcagacgaaatggctggaaaaacagcagctggcgcaggaagtagcctcggctttttatgcagatcaactgaatacactggacagtgaattcaatcaaaaattagatgaggccctggcggatattccgggagaactggaatccatcggaaaagactccatgcagggctggatcgacggcatgaattccaaactgccggatttggaagcgaaggcacgcagcattgccaatcgagtgatttccgcgatgcgggatgcgatggatattcacagcccgtcgaagaaatcagcgaagttggtgggtgttcctacagcgcaggggataggtgtcggctttgagcgtgcttttcctcaggtaatgtcaaagctgcgcggtactgtggatgtggaaatggcacggacttctgcaagactcaccggggcggcaaaccgcggcggcatcaatggcacggtccgagagatcaccaataataacactacagtggaacgaactgtaggtgtcgaggctaccggatccctggcagaactgatccggttgttgcggcttgaaattatcaaagaagacaaacgtgtcggaaagagcatggtgacagcataatggatgaactgaaaatcggaaacagcatatttcgggtagggttggtgagcctttcccgaagttttcgtgtagatgaaaaatatcgggtgaccacggaggacggcaagatccgcagggaaattcgaggaatctatacggattatgcagtagaaatcggtgacgtggatcaggaacagtacgatttgctgatcgaaacgctgacatctacggaggagagtcagacagtcacactgccctacggccgcgtcggaacgatcacctttcaggccgcatttgagagtatttccgacggtatttcttatattgatgaagacgacgagggaaacgatgaatacttttgggacaatctgacagttacctttactgcgtttgagccgaaaggagtgggcgcatgagtaggcataccagcgtagccgtagaatacagtctatttgatcggacggcatctcaagacaacgcgttttccatcgatgagattcagcccttttctgataccgcggaactgaacgatgatgaacagagaatcgaaaagtgggcgacgatggaaaatacaggctttctgatggatgggacattcgagctgccgccggatgacttggcggcggagtttacgggggtgtggtcaaaggaactcagtggggaaaacggaatgttttcctcgccgccggttttgtcgattaccttctcggaagcgcatacctcggcaggactgacgctgaccttttccgaagctactgaggactggtgcagcagcctgaatatcatctggtacgatcaggcgggcgcgcagatcgcaaaccgtgatttttcaccgaatgcagctgtgtatttttgcgattgccaggtggaggatttttacggaataaaaatcactttttatcgtaccaatcaaccgtaccattttctgaaactgaccggaatccggtacggaattctgatgcagttggacgcaccgagactgataacctgctcggttctggaggaagtggatccgatcagttcggaactcagcatcaatacgatgacattctcttttcacagtgagaaaggggaatttgatctgctggatcttaccggagcctatgtcttatttcagcagcggcaggaaataaaagtgctgggagaaatggacggcataaaaatgaatatggggaccttctatctggatgagccgaaatcagataccgatagtactgtgacgatgcagtgcatcgacctcgtaggagttatggacgatacggaatatctgggcggttactggccggagggcattgccgccgaagatctgattgtaaaaatcatgacttctgcaggggtggaaccggatctgtttgagatcaaaaacgatctaagcggccggaaaatttacggttatctgccgatctgtacgcatcgagaggcactgcagcaggtggcttttgctttgtgcgctgtggtggactgttccagatccggagttcttactatccgatcagccaagcaggaagtgaaagaaatcccgctaaatcgaaaagtcattggccacacgcaggaacaggcggctctgatcaccggagtggaggtatttgtaagtaattacgctttaggggacagcagcacaaaactctttgaagaagaaagaccggccggtacgttttttgcgaagttttcctcccctgcagcaaacgtgacctgctccggaggtgtgattacagaaaatgacgtaaattatgccaaaatcgacgtaaaaacagccgggatggtaaccattacaggtatcacttacgaggaaacaaagagcctgtccggaagtgtatatgctgagaatttgccggcaaatgcgctgccaaatgttctgcagatcgaagactgtacgttacatgtcgacgcccaggcgctggcacagcatatttacgattactaccagcggcggatcaccgacaccggcagcattcttttatcagaagaaaccgtcggtgatttggtagaactggaaaactccagcggaaaggtactggaaggcgctgtggaacagatggatatcgatctgaccggtggattcatagcgaaggcggtgatacggggaaatggaaaatctgatttatgatcgaacacaagcagatgtagatgccgggctggataaggcgagagccgatgtagattttttgaatcgtattgaaagctggtgcgcctatctggcggagaggttaagagagtacggatatgcaattgtaacgaatacacgaaaaaaaacgtggatgatgtcagactttccttatcgttctgaaatcgaccggatccggcataatgtcgataatttacagcagggcttttacagtcttccggattggcgggagatcgtgtataacaataccatagattttaaccaggcgaacgcacttgaatgggatctacagaccattgacatctggctgcagcgaatgatggcagcctttttttattgcggtgaattatacagtggggaggtgtagtaaatggcggataccatcacgatcaccctgccagacattaccttggtcagccttactccaaatcccgtcaatacgaacgcagcacttaaaatatccgtaaaagcaactgaaatcagtaaaatactttatccggagtggttttactccggagatatttacacaggggaggaataaatggcaattaaagcagtgaaagccgtaatcaacggtcagacttataatcttactctgaattctggaactggaaagtacgaggctactgtgacagcgcccgcagagtcttcttataatcaacccggacattactataatgttcaggtgacagcagaagatgacgcgggcaatacgaccacgaaagacgcctcggacggtacgctcggcgcatcgttacagctccaggtaaaggaaaaagttgcaccgatcatcacaatcaccgccctgactgaaggtgcgacaatcacaaacaataagcctactatcacttgggcggttacggatgaagactccggtgtggatccagacacgatttcgattaagatcgacagtgggtccgttattacgtctggcataaccaaaacagcatcgggtaagggctttacctgtagctatacaccaacgacggcgttatcggatggatctcatacaattacagtcaatgcatcagattacgacggaaatgcagcaacagcgaaaacaactactttcaaagtggatactgttccacctacgttatctgtcatttcgccggaagaaggtcttgtaacgaatcaggctactatcacggtttctggtacgacaaatgatgcgacgtcatcaccggtgacattgactatcaattccgatcctgttgaagttggagcagacggtgctttctccaccaccatcacacttaacagcggagagaacacaattacaattattgctactgattctgcaggcaagagcacgacggtaacgagacatgtgacgcttgatactggtgcgccggtcttccagtccgtaacgataacaccgaatccggtagatgctggaaagacttttgtcatcagtgttgaggtaaccgactgatggtcaagcgtgtgtttggtgcggtagataatcaggatgtggtatttactccgaatatcgatacggggctgtgggaaactgcagtccccgcagatgtggacggagaatacgtcacagaactgtatgcggaagatgaggccggcaatatcagttatatggctaccgtcctgtttgctgtcgatacgtcaaatatgtgtgtgcgtgttaaggtgattcgctatgcgacggaaagcagtttgatagattatgatgcggattgtagtcttacggatatccgcgcggagaccatccgctgtgaactgtgcgggagatggtaggtgataatcatgaataaagtgaacatgcttataggtgagcgtagacgtttgacagtacgtattactgcaggtgggcaggattttacgattcggaatccaaaatataagttgatgcgtagcggagaggtaatcgcctcaggcacaccgactgtcagcggaaatgatttgatctgtatgcttgagccgccggtcgcaggagggtatacaatggagtttacattcgagattgcgggagagattgtaaaaaaacgagtaacgatcttggtagaaaagtgaggcttattactacagcggcgaaatatatgcgggggaggtataaaaatgaaagatagagtaccaaaatatccggggcgtgtttacgttaccccagaaaatgagggcgcgccgtattatgcgacgattgagagagcggatgatcctgttgaggctggcacacctttaaataaggcaactttgctaagcgatgatgtcgctaacttgattagtttatcgggagatcaggcgaccgtaagcgaagctttaaaagctgtatttaatctcgcaaatccatatgcaagcacttcgcgatacggcagaacgaaacttacatctgctctctctaacagcgaatcgttagctgttacaccgaaagcagtcaacgcaattaacgataagatagagaaaataccgtcacgggaacttctattttcagaatcttatacatatgaagacaatattatcaggatagagttagatttatcttctatagacttatccaaatacatgtctataagtatacatattgaatcttcatcaacaccctccagtttgtcttcttatgtttcgttttcagggatatctaatagtagtgatggagtcgccttagtactggatacagacagtgacctcactatggcaagatacgagtacaacgatgatattcccatatgtaacgacgactggacaagcgcctccctgtcaggagctcgtattatggatattaatattcctatacgtagtagcgatccgacctcaatgccgaccggcttaatatctcgaatagtaatgtccggatactccaatatcgtaattggaaatataaatgatagttgggatggtcagaaaataacggtgtacacagataggctcgggaaaggaagtacatatgtatatggagagaaaatatgagtgagaaaacaaacaaattaatattaagcgcagaaggttcgagaattgaagaaacggatgttccgaaaccgggtaaaattacagaaactcccagtaagtttgtgacgtgggacgcactcgcagatgcctatagagagggggtcgaatccattggataataaatccatcgttttaaatgccatgtgctctcagggcgccgcagatgccgccgcactggcggcgaagtcagtagatggcgatgcagatggtacgactctgatcgccgccgaacatcagatcccgacgtggcggcagcgggactttacggatgtaccgattggcactccgtaccggtacaatggtcaggtatacaagttatggcaggcacatgattccacgaatcagccggactggactccggataaagcggtcagtctttgggacatctgtcatacgacggatccagcaacagcaaaagaatatgtaacccctcaaggcactcgcggtatgtatcagaccggcgagtgctgtttatttgaagggaaaacatatcgatgcacggcagccaacacggtacatagcccgaaggaactgccggcatcatgggaagaagtaacagcggaagagccgggcgcaccggcagaaatggaggtttaacatggaaagaaactataaggaaattgcaaaaacaaatactttcgtgaaacatgcgaaagaggtccgtgaaatctgtctggtacagaatgtcgatgttggcgtggctgttgatatgtacatcaccaatcatcacctgacaagatcaaaagaattgatggaacagagcaaagaattccgagatctctgccgtgagaatccgctgaaaaatatcgtggaggcactgggcaaataatggacatgcttacacagattgcgtggtctgccctgcctgctcttttgagcggtattgtgcttgcgatttttggcagacagcaaaataaacgggataaagccgcagacaaaagggaagaagaacggaaaaagagcgaggtcgtaaagcttgaccttttagtagccaccgcagagctgaccagagctacagccgtagcagtcaaatatggaaatacaaatggagaaatgtctgaagggctgcgcagatacaacgaagcaattgaacagttccgggaatttgagcgggataagttagcggagcaggtatagatcggtcgccttattaaaaaagtggtcgatttttttaataaggtttcaaattcctacattatattaaatagactattaaaagaggtgaaaactgaaatgacaaaaaaatggtggaaagctgcaggaataagagcagtaaagacgatcgctcagacggcaatcgccacaatcggcgcatcggttctgctgtccgaggtcaattggttagcagtagcatctgcttcggcgttggccggcatcctgtctctgctgaccagtgtcgcagggcttccagagctggaggaataatgtggcggttgatataggtctatggtaaaataaggacaaggattaccgtttggcggtcggtcactctctgataaagggggtgacgcttatggttacatactcagagctgtttacattcagctcgctgatcgtgagtattattaccctttgcgtgttgttactgcgcaagaaatagcaaagaccgcctaatctgaggattagacggtcgctttggaaaagtatttctcggactgaccgccgtaccaaaggcggtaatcctttttctatctatattaagattaccatgaagaaagaacttaatcaaggaaatttcagaggaagccgaaaggcttctttttttcgtgcaggaaatcaggaggtgaaaaatgcagattaaacagcagattatcccaaagagcagaaaaacgcagcggccgggtatcgccatgattccgcagtttattacgatccacagcacaggaaatccgtccagtacagcgcagaacgaagcggactatgtttgtaagaattctgtccgtcaggcatcgtttcatttcgtctgcgacgagaagcaggtgattcaggtgattccgacgaatgagattgcctggcacgccggagacggcggcagcggtacaggaaatcgaaagagcatcgcaattgaaatctgcgagagcggcaatcgtaaggcagccgtagataatgcggtgcagctgacgaaacagcttatggatgaatttaaaattcagccgggaaatgtctttcagcatcatcattggagcggtaagaactgtccgcggattctgagggataataaatacataaaggatagaatcgactggaaatatttcacggcgaaaatcagagaagaggaggaagagatgacacaggaacagtttaacaagatgatggacgaatatctggaagagcgcgcagcacagcctccacgtgactggtcagcagctgaccgaaagtgggcggaagaaaatggtattatccagggcgatcccgacggtgacaaaagataccagtcttttatcacgagagaagaagcggtagcgatgatatgtagagcgatagtgtagcaagctgacgcgttgagcaataaaagggaatatatagtagattctttttctggtaatggtttctgtttttcagtgaaaataatattgtcaatgttatttttataatataaaatagctataatatttttagaaaggggtggaaatatgcgttataagaaaatgaagttgttttggagaataaatgatatttctcgtaatgttttttgcatccctttagatgacagcgaagaatattattcgtttttaaaaaaatgtcataagaatggatataggcaaattatcattacttctgaaataatggtgcaattattaaaatattttaccttagaggaaaatctgtcagtttaccagttagaacttgcagaagacgatgagttcttgcaagaggaggtgtcagatttaatcaataaagttttagagaatggaacttattttattaggttagtggaaagactgaatttcctatcagaaaaatcatccattgatatacagcgtgtttattttaaaggcagagattcaaagaatatagctataaatttttatctacagtgcaacggtattatcggaatcgataaagagcactatagtttaatttccagtaaaattagtgaccaggttgcggggtacttgtggtagatgtttgaacatgtttgcaaaattattaaaacagtaatcagtgcaatggtaggagtgtttttactaaattattttaacatatttaactatatttccgtaataccggtcgataaggcttttgatgtaggcgtaattgtatattttactgttatagaattaattttgaatattgtaattcatatttattacaaatattgtatttcgaaactttctgttgttatttctttgaataataacgaagcaacaaaggattcaatccctattattgaatttaataacaagggcttggcagaagcaattgtcaaagttgaaattgaaggcagaaaaaaacattttcttaattggaatcttatgttggcaagtacaaaatttgcaacaatgcaatcgaattctcaaaaaaatgtagcttatgtagatcaagaagggaattatattatttcaataaaagatctatttgggacgtcggatacgaaaactgtaatgtcagtatcattccgaataacttttattaaagagtggcaaaatgatggtgatgtaactactacaataataccggaattgaaaaataaaaactcgaagagatggtatcaacatataatctataaacataataaggcgaaattgaaattagaaaggtaggtttttatgtcaacaacacgttggattgataataaaacgaagagtttagatgatgcgatagatcttctaatgagcgagaaaaagattgaaaatagaggaagt

SEQ ID NO: 457 - DNA, 8444 bp, Unknown
  16S sequences of unknown bacteria
ttatagttttatttaagaataccttgccgcatattttttactccttttctggaattgaattattatatcacatcagttttaggaaaacaagtatctaaaagaaatttttcttccccttatatgtaacaatcataccggcttcctaacgttcagaatggtttctactgtctgctgcggtgtttggttggaattgtccagccaaaagccgatccgtggtgttgtctgcattttactaaatacaaattcaatgtatacagaaagaaatatataaggagtgggagggattccgccgtagtcggcattgtaggaaaatccaaaagtttagattttctcaaaatgcttatcttttggtctttggttcggaatagtgtagtgctggcggtctatctattgttttcggttgcttgcttctttaccgtacatgagcatttgccgaactcggtaagcataacttccacctccgatttaattacatttgatattgtatcacaaaacttttatcttgtcaacaatattgtatacgttaaacataattttgttgacgaatttctccacagtttttgtggacagtttgtaacataaaaatcatccgtttatatccctttatacccaatttgcaaccgtggcgtgtgcttgtcttgatacgagagcgccgcttcgcggcgcagacaagcacacgccaaaaacttaaccgaaccgaccgaaataacggaaaacgaaagcgtaacgaaagcggtgttcgccgctaacccgcttggcgaatcaccgctattcttcgtttacggcaattttccgtttttagtccgtattttcaggcgcggatttccgtttaattgcttttgcgcatttgagctattacttctttgctcaccggtccaatgaggcagccttcgtcccagcaattaaaattatcgtaaagcaacagtttcctatcttcctgccctatcgtgcatacaacgtcttcgtccaaaatgtccgaaataaaatactgtggcaagccttttgaatacacaatcttctcgcccgtcttttccatatatttcgtcagatatgcgacagcctcgcccaacatccgcctatcttcgacgggcttaaaatccgaacgtccgaaccgttcgttgaaatatgtgttctgtatcgtatgctgcactttcttctttatgggagaataatcgtgtacctctataagctcgcctaccattgcgccgtcgggaatataaaataatccgtgaaaatgtaatcgtttcttttccggtgaccgctcccatacccctacgtatttccaattccttctatgacacatcatcttaaaacagccttttaatttccgcataaaactttcttccgtatgcttcgcactatcgtaagtaaaagtgcaaaaatagttgaatgtttgcaagtttaccttacgcataagcctgactcttcggcaaataatgttccttagtttcctttcaaactgtgcgttgacaaactctgccgtcgcttgcttgtcccgaaaatacggcaacattttttctgttattattttctttcgttcgctccgttttttatctctcgtttcattatataattcctcaaacaattccttacgtgtcagcttacgttcagacttactttgggtttcgtcacccttttcgacagactctacgacagacttttcgccagcctcagagatatcgttagtatgttcatcgctctcagaaagtccgtctatagtttcgttatccgcattttcgtccacaacagtgatttgttcttcgggcggttttggtcgtcggcttcgtggattagaaacatacggtatagcgacaaagtgactaccgtcgtgatatatttttacttctgcgtatggcatatcacacctcctcgtcgcggtaaagaccattgatgaaataactgttttgttctttcagttcttggacgcttgctttttccgtcgcatattcgatatagtccgaaagtcctacgttagttcggcttgccaagtcgttgaaataatccgaaaagcagtcggttgtgaaccggttacgataaattttgtagttcatcaagaaatactttttgttttcgggtttgccgtccatcgtgccgcgttccttttctattttgacgatagaatagccgtatttgttgtaaattctggtgttgcgtttccatagccatgccgttatggatttcagaatatgcacgagcaaagtattgtcgccgcgacgataacgaaaatcgtaatatagggctataaagcgattaaacgctatttcggacagcatatcttctatcgtataaaacggtaaagcgagtttcatatcacctgcggaaacgatatttataatgtcgcaaaggtcgcgggcgtcagcaccccaactttcggggcgttgttcgtccgtaaacacctttatgaacgggaaattatctaccgttgcggagtgtctgcacattttgagccacgaattgaaaaggtcgttcttttggtttgtttcatcgtttttcttcttgacttcctttaattcaaggttgtttccgcgttctttaccgatttccgtaattgctacaacgccgaactcgaaactgcctgctttcgggttgttttccaaaacttttttacctaaacgcaacacgtcgaaatccagaatatgagagtgtctgctacgccattgtccttccgagaaaaaatccaacgcccacagcgggaaattatcttccgagagtaagcggttgtccgtccgtatggagtaattcgccacgataaggcttgtttgcaaagcgtatatgaaaaacgcctgtgcatacgtttccaaaacgtcgaatagttcgcttatctttaatgcgtcgttgtatgtaagaccgtatctttgacagtcatatccgtataattgccactctgaattatgatgtcgctcgaaacgcgaacgtttgagttttacccattctttgaccgttgcaaggttatataccgttccgtgttccatacacgcggcgagttctttttcaaagcatatccatgggaaatacgggaacttcatatccgctttctgcaatatctcgaatgccttttgtctgaacattacttcttgggataacgccatatccgttatcattgtggttttgcgtttgcccatactgccgcacgtcatcgaaacgataggcaaagcgtttataaacccgcaattcttcgcttcgcatttgcgtaatttgttaagcgcaacctttttacgccaacgctcaaacaaaacgtagcaaataataaggagcgaccaccacggaaagaacctgaaaaacggttgcagatctcgcgcaagttttacgaattgcgtgtatatcgtatccgcccggaacgataccgcaaagaagaagtagtaggcgaaaaattctatcgcgatacttgctatatttaagtgaaacgcccacataaccgcccacgaaatccatatccacgaatgctcgcgcaagaagtctatatacccgcatataaaccgcttcgtcggttgatatgttacggcagaaattctcttgaatacctgcaagggaatcgtgtctacgttgtgctttgtattgccgcttgcatatagccgttttattacaattataagcacaataatacacggcagaagtatggttaaaacctttgcccagacgcttgcttttagccccaccgcagatagccacgacaagaaattttctttgctgaaaagcattgaaaaatacgtcgtcgccttaaccttaaaactatcgaaatcagacggcaaaagtaccgcccattgcattatttttgaatagtccgttacgctcggcaagccttcggtcggcaaatcgaataatacgcagaaataatacttaaaaccgccgtataagtcgattaaacactcaaaagtgcgacaataggattgtcggaacgaaaatataccgagcaaaataaacgccgttgtaagggctattgtcagccctatattaagccgtcgttgccacttcataaagcacctccgaaatcgtattttcgggcgggatttgcttcgccgtatagacgaaataactcaccgccagaactatgatgataagcaataaaatcgctataattctcttaaatgttttcaatgtaaaacctcctgattttttataaaaataacgccgacagaatttctcccgccggcgtcgtttgttttagtcgtaatcgtcgtaatttccgtagtccggctcgtcaatcgtcgctacgactttttcgtaaattttccgttcttttcgttcctgtcgctttcgtttgcaagtctttccgattgccgcaattcctttaatcgggagcgataccacaaaaacgattgcctgcaatacgtatggcaacacgggagcgagcaaaacaagcaaaagaatgagcaataacagatacaaaatcgtcttgccgcgattgttcaaacttacgtctatttccgtttcgttcgacggttcttttccgcccgtttgcttgttgtcgattacgccgagattgtaagtaatgccgtccgtttcaaacttcaagcgaagaatagttacgtcgccaacgagtgtataactttcaaacgtagaaccggttgtagaatagccgctcaacgagtaactcgtttctgcaaaacgtagcacccatttcttgcctttgagttcggtcaaggcttcgtccgtcagtttcgatgaagtttttacgtcaaggactgcgccgtggtagatattctcgcggttttcgcccttgatgaagtcgtcaatcgtctgaatcctatcccacttatacgttcccgcgaataatcctccgccggtatgttcaactttatccgtgtatttgagataggcgtatttgtccgctttatccccgaacgtttcttttacaccgacaaagggaacggaagaccaatcgtaactttgcgttgtataatacacgtccgcttcgagaagtttatctatgggcttatccgtgttgaacgccacaaaatggctgtcgcacgctccgacgtagagtttgaaaccgtctttataccttacaaaccctacaaatttatccgtaacgacgattgtttcgatgtccacgcaattgacatacggtttaccatttattgaaccgaaagcatattgcttattgaccgcataattgacttcggtaacggtatttccgccgcttgcctgtttatctatgctttcgtcgaacgggcggtaaattgaactgattgcgtaatatctcacgccttcgtctttcaccgtaagccccgaaactttgtatttgtagaatacgccgctactgtttagcagttcgagtttgtaattcagatacgaaatcgaatcgtttgtagtggtcgaaatgtttatagacgacgctttgaagttttttgcttttccgctcggctgatagacgtaaacgaaaagttctttgtcgctgctttccgcaagttggattatctgcaaagaataatcgtcggctttgctcggatagttttccggcttaaacgacgtatcctttttcaaatcttccattactcccgaataagttatgctttccgctcttgccacaaggggcgtttgtgccgccgtggtaatgacggcacagattcccaagacaaaagcgagaaaaattgatactaatctcgtttttgtcgcttgcgtcaaaacataatcacctcccgatcgaacgataccccggtaactttgcctgcaaccgtaaaattgagttttacgcttgcttcgccgttataagacgttactattatcgtaaacatatccgtataacctttgttttcgcaatcggttacttccgtgccgtaaaacgcagtcagaacttcggtaagcgattttcctttcggtttaacggtaaaagatttttcgcctttgtcgattgcaaaagcagccgtcaaatccgtttccgattgaaacgatttgctttcgccgtcaacggtgtatgtaaaatcgctgttttcaatcttgttcggaacaatctttactgaatagtctttcgtttcgtcggtagcgaaattaaaggtatatttgacgtccacttgcaagggcttttctgtcgtaactttgtaaccgccggaagaagtcattacgtcctttccgtcaacggtaacgtagaaagtcttaaagtcgctcgtgaacccgtttgtgaagtgcgccacaacgccgataacggttattacggcaagaataagcagaatataagtaatgatttttgtcgctttattcgtcatttctcacctccgaaaatcgcttcttatattgaaacgttagtcttatcaaggcttacgcttttaacggaagtgacaagccaaactttgattgtttcagaaacgccgcttacggtgtctttaacggttacggtgaaataacacgaaggaagagccgatacgtttgcttcgctgttgatatcgtaatctttgccgcctgtaaggtcgtattcgtcataaaaaacgtatctgcctttataggtcgtgcctgtgtaatactcggtatcgttgaccatttcgtcatagtaattttcaatcaccgtggaacccgttttcagcgtgagcgtattcccggaaatggttgcggacgtgataaatttgtttaccatatccgacattttcctttttgccatatttgagaaactgcccataccgctatcgccgctgacaaactcatcgccgaaatacaattcacccgaaccgccgagcgttaccgtcaggttttgcgaacctactttgccgaaaatgttatcgagaacaatatcgaaattgtaggttttattcgttccgagttgataatacacgccgcgcttactgtcgctgataggattgagcgtagaattgttaatcacaatactgtttgcaacgcccacgaacgataccgtgcattttgccgtatatccgccgtcgcgagtggtaacgataacgatgattttatccgaatcgaaagcctttttacaggaaatcgtcgccgtaagagaaccgtctgcgtcctgcgtaacggtaacgtaatcggttaccgcctcttttccgtgagtgggagcaacgccccaagcgatagaatagtcaaccgcttgatttgccgcgtcccaaggcgaaacgcttgccttgatttttacgtccacggtttgcccattcgcttgcgccgccgctaaactttttgctgtaaatgccatcgttttcggcatagcgtaggttttcgtgttatcgaacccattttcggtttcaacgtttaatgttttatccgcaacgggagcgtcttgctttccgaaatatatcgccgcaaatattgccgcaaaaatcgtaagcacaacaagaacgatagccgtaagttttattgcttttcttttttcgatagccatattttatacctcctgttaaaacgtgatggttgccttactcgtagtaaccttgcttacttcctcgccgataaaaaacttatactgagcggaaaatccgagcgttttatgctgaaccttaacaatcagatacggtttatttccgtcggaatcggtgttaattgaatacaacttattagtgtaagtagtcgtttcgccgttgccttcgactatttttgtttccttggattcgtaataatcgtaaagcgactttgttacgttaatcgacagcgtattgccggaagtcgaacaagttacgaactcttttgcaattttattgaaatctacaatgttactgtgagaactccaacctgcgcccctgcctgattgagaataagagccgcaagtaacagatcctactcccgtaacggttacggtaaagtcattgaaattactacctacgctatgaaaaatgttatccattgcgagattaagagagtaagacttaccgacataaagcaaatccacggaatctttgccgagattgtatttcgtaacgcccgtaggagcggtgatagacatacttgacggcacgccttcataaacgatattgacagttccggttttaccgccttgtcttgtggtgcaagtaagaattgccttgctgcctttgaaagacttgtagcagttgaccgttgccgtaagattgccttgcgaatcgtccgtcaccttgatatagtccgaaatgttcttgtctttgagcggagcgtcgtttgcccatgcgacagaccaagtaacgtatttgtctacgacggtagacggcgtaatggttgccgtaaccgtttgagatacgtattgctgtgtattgtccgcagcgagagcaggcgatttcacgctcataagtttgggttgtccgagggtgagaactaccgccgcgttggtttcgtctggcgattcctgttgcgttccgttctcttgcggtttgatgggcgtgggtttgtcaagcgacagaatgagtgctgcaacaacgcctgccataagcacgataatgagcgtaaaggcgattatccacttaaccgcgtcggattttttgtgttgattgaattcttgatacataatgttttttacctccgaaatttagattttt

SEQ ID NO: 458 - DNA, 19905 bp, Unknown
  16S sequences of unknown bacteria
gctttgccatgttcatagtgcgcaaatgcccggcttttcatgcttttctttgcgcaatcatgttgaaaacccggggggattggggtaaaatacaaggaaaacagtttataaatgtgaaatgaaaaggagtcattggcatgcaaacacatctggcgaacaggatggatggcttgaacggcagtgcgatccgcgaaatctttaagctattgggcgatccttccatcatttcctttgcaggaggcaaccccagtgtaaagagcttcccttctaaagagatggccgatctatccgcccagctattgaaggaaaagggcgatgtgcttttacagtatggcactacggagggctatgcgccgcttagggaaagcatcctgtctgtgctggaagaacgcagcatccaaacgacgacggaccatatcataacgctcacaggttccagccaagggatcgagttgtttaccaagatcctcatcaatcccggcgatgtaatcctttgcgaatcgccgacgttcctgggggcgctgcaaacctttgccagctaccaggccaaggtcatcggtgtgccgatggatgaggatgggatggacgtgatacagctggaaaaggacatccagacttaccaccccaaattcatctataccatccctacctttcagaacccaaccggcgctaaactatcccttgcccggcggcagaagatggcggagctggctgaaaaatacgatgtctatatcttggaagacgatccctatggcagcctgcgctatgaaggcgaagcgctgcccagcatcaaatcgtttgatacgacagggcatgtgatgcatcttatcagctttagcaagaccgtttccccggggcttcgcgtaggcgctgccgttggtgatcccgccttgctacgtcctatgacggtggccaagcaaggaatggatacccacaccaataacctggcacaggccatggtagatgcctatattcgcagcggccgttattttgagcatgtcaaggagatcattcccgcctaccgcgaacagcttcataccatgctggatggcttccgctttttcccggacagctgtacgcataccgtaccgcagggcggcctgtttgtctgggccgagctgccggaaggcatggatacgctgccgctgctggaaaaagccgtcgcacgcaaggtggcctatatccccggcacgcatttctatccggacggcggccatgccaatacccttcggctgaatttttccgcctgcgagccggcacgtattacccagggcatgcagatcttgggcgatcttttaaaggaaactctgaaataacagcacaaaaggagaaaatcgatgaatgtatacgacgttttaacggaacgcggctttatcaagcaggttagccatcccgagatccgggatattctgggcagccagtccgtaacgttttacacgggctatgaccctaccgccgacagctgccatgtagggcactttcttcagctgatggccatgagccatctgcaaaaggcaggccataagccgttgatcctcgtgggcggcggcacaggcgccatcggagatccctccggccgcaacgatatgcgcgtgatgatgacaaaggataccgtggcgcacaatacccaagcgttgaaaaaccagatggcgcggtttttggatttctctgaagccctgcccaacaacgccgagatggtggacaatgccgattggctgctgggtttgaattacatcgatttcttgcgtgaaatcggcgttcacttttccgtcaaccgcatgctgtctgccgaatgctataagagccgtctggcaggcgggctgacctttttggaattcaactacatgctgcttcaagcgtatgacttcctgcatctcttccgtaccaagggtgccatcttggagatgggcggtgacgatcaatggagcaatattctggcaggtgctgaccttatccgccgtgtagagggcaaggacgcctttgccatgacctttaccctattgaccaatgccgacggcacgaaaatgggcaaaacacgggccggcgcgctttggctggatgccaataagaccagcccgtatgatttctaccagtactggcgcaatgtagaggatgccagcgtagaaaaatgcctggcgcttttgacttatttgccgatggaccaggtacacgctttaggcgccttgaaagaccaggaaatcaacaaagccaaaaaggtactggcgtttgaggttacaaagctggtgcatggtgaggaggaggcccacaaagcggccgaagcagccgaagcgctctttggcggcggtggcagcctggacaatatgcctaccactgtgctttcagaagaacaggccgctcagggtctccaggttgtggacctgctcgtgttgagcaacctcgccaagagccgtggcgatgcgcgccgcttggtggacggcgggggcgtatcgctggaggacgtcaaagtgaccgacgtgtttatgcccatcgatcctgaccgccttaagggcgacggcctggtgatccgcaaaggcaaaaaatcgtaccatcgtttcttgatgaaatgaacggatatcgcaccatcgcacacgaaagcgaaatagagatcgtcatcaaaaaaagccgcttcatcggctatgcctttttggtctcctctgctgaagaggccaatgaaaagctggctgcattgagaaagcgccagtgggacgcttcccatcattgcagtgcctatgttttgggtgccgataagcagctgcaaaaatacagcgatgacggcgagccgcagggtacggcaggcatgcccatcctacaagtgctgcatcataaagacgttaccaataccatggtcgttgtggtccgctattttggcggcgtgctgctgggggccggcggtctggtgcgtgcatacagcgaagcggccgccaaggcgttggatgcggccgggctgtgtcaatatgtcccagtggtccgctgggggtttgccgtagactacgcccactgggccaggctggatcgttttttgcaatcgtcggatatccaattggaacaaacggactatggggcggaggttctctgccaagggctttcccgcgaggaagcctgggagtcctttcgccaagctttgtataatcattgcgatgggcgcgtggaagttcagtttgctgaacatgccattgcaccctggcccattgattgatagattcgacccataaagggccaaaacgattgaggagtgaaacgctatggaactaaccatccagaaagcaaccgcactgaaagaaaaaccgcaggatgaatccaatctcggttttggtcagatctttaccgaccatatgttcatgatgaactatacggaaggcaaaggctggcacgatgctcgtatcgtaccctacggtgattttgcgctggaccccgctgcgatggtcctgcactatgggcaggctatatttgaggggatgaaagcctatcgcaacccggatggaaacattcagctgttccgtccgatggacaatctgcgccgcttcaaccgcagtgcagagcgtttgtgcattccggccattgattgcgattttgtactggatgcgctgcgccagctgatccgtatggaacaggattgggtgccgcataccgccggaaccagcctgtatatccgtccgtttgccgtggcaacggatgcgcatttgggcgtacatgttgcgcataactatatttttgccatcatcctttcgcctgtgggcgcttattatgccgaagggctaaagccggtacgtatttttgtggaaaatgaatacgtccgctctgtaaggggcggcatgggctttgccaaggccgccggcaactacgcatgcagcctaattgccgatcacgaagcgcagaaaaagggctgcgcacaggtattgtggctcgatggcgtagagcgcaaatacattgaagaggtcggctctatgaatattatgtttaaaatcggaggcaagatcgtaacgccgccgctgcgcggctctatcctggccggcatcacgcgcgacagcgtattgaagctggccaaacagcttggcatcgaggcagaagaacgccccatttccatccaggaagtgtttgacgcccatgccagcggcaccttggaagaggtctttggcaccggtacagccgctgtaatttctcctgtgggcgcgttgatttggggcgaccgcgagatcgtcatcaacaacaatgaaattggccctacggcgcaattgttgtataatactttaaccggcatccaatacggaaccgtagaagataagcaaaattgggtacttcccctgtaaaaggaaacgaatcgcccgctttgcaaaactgtacaggaggtgtgtttcattgaaacgcaaccgaatccatactctggctgttattatgctatgcctgatgctatgcttttccatgctacccatcccgctggcatttgctgccgatattactgtctccaatgtgtctgtcacgccctcttccctttccagcggcggcaacgtcaccgttaagggtaccattcaaaacaccgttggcgaagagatttctctctccgtttcctatgctgaggacgtgaaggtaaacaaaaccttagcggcgggagattcctatactttttccgttacctgtggcgtatccagcagcgatctggattcctccaatacctatgtggtggtggattggtcctccgataaccacagcggttccaaacgtgttcctttccaggtagcgcgtgaggaggaaaaggtttctctgacctttacccgctccatcagcaaaaccaccgtcaacgccggcgattctgtaaagctgacatatagcctgaaaaatacgggcaccgccgacattaccggccttagcatcaccgatccggccgtgccggacggcgtagcttccgggatatcgctcaaagcgggcgccagcaggacggtttccaaaaccattaagcccaccgaaaccgtgacgagtacacccaaggcaacctttaccgccagcggcagcagccataataaatcggtagaaagcaaaaaaatcaccgtgaacggcggggatgccaagctttctgtgtccgccattgtagacaaggcccttatcaattccggagacagcgttaccttcaccattgccctgagaaacgacagcactgtgccggtaagcaacattaccgttacggatgatcagggcaatacggtgaaatccgggctttccattgcggcctccgcggataacgataccaaaacggagacgtttacctaccaaacttctctcacttccccgcgtgcggttacctttaaggtcagctatccgtccggagaggagacaaaaaccgttaccagctcgcctgtggtggtgaatatcaatggccagccgtttctttccgctgcgcctaccaacgtttctataaccgctacagcagaccccacctcgctgaccctgcccggagatgttacctttaccatcaccgtggaaaacatcggcgatatcgctttaaaggatgttacggtcagcgaatcccgtttgggcacactgggcaccttttctaccctcggcattggggaaaagcagacgcttaccaagcaagcaactgtctctgccgctggaaattatctcttccaggtaactgcccaggatggggacggcatgcagtattccgcttcgtcgtcgaccatttcaatctcttcgcctacggccacggcgacggataatacactaaaccccagcggtggcgattccctgagtacgctgtttatcatcatgatcgttatcgtcgtactcatcctcattgcaggcatcacgctggccgttctggtcatgcaggaaaaacgggccaagaaaaaagggcctaagggcgggccgcatcctcccaagggcggcgctgggccgcgcagccgggcagccatgcacagcacagacggcccgccgcgcagacgtccgccgcagatgcccatggatgaagacgatgaaacgcctttgctggaagaggatcttgacggagaatcacccatgccgccgcgcagagccaaaatgcccaccatcggtgacgatgaggacaatgctgccggcagcgctgcgctgggagcagctgccggtatgatcgccggcggacagatccgcgaaaatcaaaaatactatcgcagagcttcttccaaagatgatggagagatgaccaaacccttctctaaaaaggagatagagcaggcaaagctccaactgcgcaggcagcggcggacagaaactcagcaggccccacagagacgtaggccgccggaaaatgagcaacggcgtccgcagcaggcagctaagcaacctccacggcgtaggccagaagggcagcagccccggccgcagccaaagcgcccggcgccatccaatcgctatgctccggacgaagaggagttttttgcacgcaggcagcagccaaagcgccggccgccgcgcgaggaagagccagaaccccggccgcgttctcgccgtatggtagacaatgacccaggatacgggcccagcacccccaaacggcgtaaacgctgatctttgtttgaacacaataccccgcagctaaatgcctgcggggtatcttttgttatccgcagccttttagaatcaagaagcagtatcccctcccttggaagcattgccatgaactttctttgcaaaaagcttttctccactcccatttcaaggtataatatgaatcaatggaacaggtaggattttctgggtttacccagcagacatttgaattttttatgaagatcgggtttgataatacgccacagcactttgaagcgttgcgcagcgagtttaacgaagttgtattggctccgttaaagcagctctcgctcggggtttctcctacgctggcaaagattgacgggcgtctggatctgcggcccgtgatgggcggcaccatatcccgcatccgccgagatacccgttttagcaaaaacaaagcgccgtaccgtaccaagatgtggctgaaattcatcaccaaggacccaggaatgcgcttggccttttattttgatctagaccctgctggttgtgtgttcggcttagggacaagccatagcacgccccaggaaatgacggaaaaacgtcgctattttttagcgcatccccatccgacccgccagatgatcgatcagtatgcagcgcttgggttcgtccttggcgggccgtgctacaagcgtccgccgcaaaccagcgaggatcccgttttgatggagcttctggcccgcaaatacttttattttgaaaagcccgtgtccatggaaacggtatatgcgtcctcgcttgttgataccttggcagagggatatactcagttggctgatttttaccatttcttcaacaaacaatcataaaggaggattttttagatgcaatctttagacaacctatgcgccaatgccattcgcgttgtatctgctgacgcaattcagcgcgccaacagcggccatcccggtatggtgatgggggcagcgccgatgggctatgcgctttacagcaaacatatgatcatcgaccctaagcatcctgattggcaaaaccgtgaccgctttgtgctgtccgccggccatggcagcatgctgctgtattccctgctgcatatgtttggctttgggctgacaatggaggatctcaaatcgttccgccaatggaacagccccacggccgggcatcccgaatacggccatgcagctggtattgaggccaccaccgggccgctgggccaaggggtatgtatggcggtcggtatggcaatggcagaagctcatctggcggccaaattcaataaagagggctttccggttgtagatcattatacctatgcgctcgtaggagacggctgcttacaggaaggcatttcctccgaggcctgctcctttgccggtacgcaaaagctggataagctcattgttttgtacgatcgcaaccgcatcaccatcgagggcaacacctccgttaccttcaacgaagatgtcgcagcgcggtatcgtgcctatggctggcataccatcgacaatgtaaacggcgatgacatcgacgccattgcagatgccattggccaggccaagcaggctggcaaacccacgcttattttggtggataccaaaattgcccgcagcacaccgctggaaggcagtgaaaaatcccacggatcgccgttgggggccgaaaatgtagctgcgctccgcaaggccgttgagtggccgttggaagagccttttaccatgccccaggaagtgtatgaccattgcgctaaagccatggaaaaaggcgctcaggcctatgaaaaatgggtttcgatgatggaagcttacaaagcgcagtatcctgactgttataaagcgtatcaagaagcttttgccaagggtatgccggccggcgtggacattgaaaaattgatgcaggtagacgataagcccatcgcttctcgcgcggcttccggcaatgtgctcaatcagctcaaggatatggtgcccaacctgtttggcggcagcgctgacctgggcccctccaacaactccgttttgaagggagaggaatggttctccccggaatgccgcgaagggcgcaatatacacttcggcatccgcgaatttgccatggcggcgatgtgcaacggtatggcgttgcatggcggtgtgcgtccgttctgtgctaccttctttgtgttcagcgattatatgcgcaatgccatccgtctcagcgcactgatgcagaccaacgtcctgtatgttttgacgcatgatagcattagcgttggcgaggatgggcctacgcacgagcccatcgagcagctggcctccttccgtgcgatgcctggctgcacaaccttccgccctgccgatgcacgcgaaactgctgccagctatatctatgcgctgggcaatcccgggcctacgctgtttgcactcagccgtaccaacctgccgctgctggaaggcactggcctagaggtagccaaagggggctatgtgcttcaagattgccaaggaacgccggatgttatcctcatgggcagcgggtctgaattgcagttgtgcgtagaagccgccaaggttctgtccgacgagggcaaaaaggtacgcgttgtcagcatgcccagcatggagctgttcttgcgccaggggcctgcgtatcgcgatgccgtactgcctccggcggtaaaagcccgcgtagccgtagaggctggcagcagctttggctggcgcgaggtcattggagacgccggagaggctgtctgcatcgatcatttcggtgccagcgcgccgggcggtgtcctatttgaaaaattcgggtttactgtggaaaatgtcgtggccaaggctaaggcttctatggcaaaataacgcgatttctcaccaaatacacagaggccgtgtgaaaacgcggcctctttccacttaggagggattggatggattggtggatctatctgctcttggcgctcagcgcagccagcctcatcattgggctcattgcgctttccaaggcaggacaacaaccaaaatctgacggctcattggagcgcatgcagcgcgatttgcagcaggagctgcgcctttcgcgccaagaaacctcgcaagctgtacaaagctctgtcaaaaatttatccgagctgctggcggcttctcaagcacagtcctctgccctgcaggataagcggctcgcagagctgaatttacagattacccagcgcaacgatactttacagcgcaccatggacaacggcctaaagctcatggatgatagggtggcccggctcacatcgcacaccgaacagcagctggagcaaatgcggcagaccatggagcagcgtatccgtaccatgcaggaggataacggcaaaaggctagagcagatgcgcgccaccgtcgacgagaagctgcaaaaaaccttggaagatcgcattggtcaatcgttccgcttggtcaacgataggctggaacaggtgtacaagggattgggcgagatgcagaccctggccagcggcgtaggcgatttgaaaaaggtgctttccaatgtcaaaacacgcgggattgtcggggaaatacagctcggctccattttggatcagattctaacgcccgagcaatatgacgccaatgtcgttaccaagcatggatcctccgagcgtgtagagtatgcagtaaagttccccggcgatgaagaaggtgggtttgtctatctgcccatcgatgcaaaatttcccgctgatgcttacgctaagctgcaagacgcctacgacgcaggagacagcgttgccatcactgaagccggaaagcatttggaccgcaccatccgttcatttgccaaggatattgccaccaaatacatcgacccaccgtatacgacggattttgccatcatgttccttccctttgaagggctttatgcggaagttgtgcgccgggggcttgtcgaaacgctgcaacgggattatcatatcaatattgctgggcctaccaccatgagcgccattctcaacagcctacagatgggcttccgtacgctggccatccaaaagcataccagcgaggtatggaaggtattgggggccgttaaaacggaattcaataagtttggggatgctttggccgctacgcaaaagcagctggaaacagcctccagcaagctggaaacgttggtcggtacccgtaccaggcagatccagcgaaagctgagccgggtggaaagtctgccggaattgcaaagccagcaaattttatccttagaggcaatcgatgcctttgacactgcggattccacggaggaagaaaaacaatgagtacacagccacgcatcgacgttgtggggaaaatcggttctatggccctgatccgcccagaagatcacgatatagactacaatatcttttcccggctaggccacgccctgcaccccggaatgatctgggtctcttccggcgcaacggaaattggccgcctggattatctgcgccgccacggccatgagctggaaggctctatggacgatgtaaaaaccgactatgccgcgcaagggcaggccattttgatggaaaactatcggcgtttcatcgatccaaaatattccgtccgccaggtgctggtagagcaccagcatttcaacgacccggaaaagcgggcgcatttgcagggcttgttttttcgggctgccaagcaaaacgccattcccatcgtaaattacaacgaccccgtctcttttacagaaaaccggaaaatggagctgagcgtgctcaagcaacagcatgatgatgtggtggagtgcatcgacaacgacgaaacggccgctgtcattgcggaggcggtgcacgcccgtaccctgctgctaatgacgggggtggacggcatctacgccaaccctgacgacccctctaccttgatccgctccatcaccgccaaaacaccggaacagctcatagctaaggtgcgtgaaatgcaaagccattgtgtaggcgccagccgtccgggtgcaaacggtgccaaatccaagctggaatttgcgctaaaatcggcgttgtccggtacgcatgtcatcatcggccatgccaaacaccatctcagcgatttgttagcagaaactgtcccctgcaccattgtggggctggaataaaatcccttgcttgcttccctataattcctatggcataatagggatatagcaaggaggcgtctgatgaaaatttcaaccaagggccgctatgcgttgcggctaatgctggaattggcactgcatgatgccaatcaatggatctctgtcaaggaaattgcgaaaaatcaagaaatatccggcaaatatttggaacagattatcacccagctgcacagggcaatgctggtacaaagcgtccgcggtgcacagggcggttatcggctggccaaaaagcccgaagagatcacggtgggtatggtgcttcgtgccgtggaaggagagcttgcccccgtgtcctgcttggagggtgaaaattgctgtcctcgtcgggaaaattgtgttacgctagaggtttggcaaaaaatacaggaggccatctcctctgtggtggatactcttacccttcaggatctagtgcatcggcaccatgaaaaacaagcccataaataacggcaattgcttaaaaaaacgcttcggcgtttttttcttttccttattgcgttcctcctgtttctctgatagagtggtagtaacacgcttgtatgtataagagagggggattgcaagtgtctttttttggttttgaagatcgttccttttacagctccttgcgtaaattggccatcccgatgatgcttcagcagctggttgccagctctatgaccatggtggacaacctcatgattggttcattgggggacaacgctttggccggtttgatgcaggccagccaagtcacctttgtcttcctgatctttatctttgggatcaccagtgccacaactgcgcttacctcgcagttttggggtagccaggatctgccaagcatacggcgtacatttggattgtccttgatctgcggacaggtgattggctggggtttttgcattttgtgcgccattatgccacaaacatttcttcttttgtttaccaacgatccggaagtgcttgcgctgggcgcacagtacctttccatcgtttgtttctcctatccttttatcggggcaggctttatattgggcgccattatgcgcggtacgggcgatgtaaaattccccatggcaacagccttgacaggccttgccgtcaacgtggtttttaattatattttgatttacggaaaacttggcctccctgcgctcggcatacaaggcgcagccatcgcctccacgcttagccagattgtagactgcacgttgctgtttatcatccgcaaggtacgttattttcctgctttggataaaaagatccctatttttcccattccaaagacacatatcaagaaatatttcagccttgcgattccagtctttctcaacgaaagcttttggagcatggcacagtttaccgttatgctgtgttatgctagaattggcacccagatgtccgcagcaacggggattttcaactcctttgataagatgggctacgtgatctttgtcgggcttagcaatgcttgtgccgtacagtgtggtagggtcattggggaaggcaatcttaaaaaagcccagacgtatgcaacgcgctatatgcatatcatcccctttattgccatcggggttgccatcgtattgaatattgctgcgccctttatcatgcacctgtatgatgccagtgcagatgtcattgctatttcactgaatatcattcgcatctatggctgtatgctacccattttgatgctcaataacttaatcgttgtgggcatcctgcgtagcggcggcgatgggcgcttttccctgttcttggatgccggcttccagtggacgctgatccttatccctgttgcgctggccgcgtttgtattccatatttccccgatgtgggtttatgcttttacagcgccaggagaaatcatcaagttctttgtgggtaggcgaagggtgcgcagcggcgcgtggattcatacgctcacctatgaagccaatctatagcttttcattctcagcatgcaaaaggcacggattttccgtgtcttttttattccttgctgagcagccttttataggtacactccatacccaccgcccccaagggggcagtaatcaggatcgctaccaccgccaccgttagcaccagctgcccacaggccagccccatcgccagcggaaccgatccgatggctgcctgtaccgttgccttaggcagataagcaatcatgcaaaacagccgttcctttttggtaagcgttgtgccaatcatgcaaaaagcaactcccaagacacggaacgccagggccaaaaaaatcatagcaatgacaccaatgccggccgaggccgcataggaaatatccacagcagcacccaccaggacgaacaaaatcggctcggcagccatccaaagcttggaaaacttttgcgatagatcctgtcccacaagctgtggcgtacgcagttgcaccatcaccgccatgctcatgacccccaacaggccgctcagcggcacaatcccttctagccaatcctccaggcttaccagcaaaaaagcacaggccaaaagaatcaacccctttattgtggcctgtgtgctctgtcctgcctggcagcgacacagctttgccagcaccatgcctaggactaggccagaaagaattcccagcgcgatggaaatcgggatagacaaaaggctgaacgcagaaaaatggcccccctgggccaggcccacaaaactcgtaaacagaacgatgacaaaaacatcatccatcgacgcgcctgccaatatcatttgcggaatcccctttttcacgccgtagccctgctctgtcagcgcaaccatttttggcacgaccacggccggagataccgccgccaatacggaccccatcacggccgcctctatatgcgatagccccaacatcggcggcgctaaaagcacaaatgccaaaatttcacaactggccggcacaaaggtcattaaaaacgcgggtctgcctacccgttttaagctcttaacatccaaagacagccctgctttgagcaagatgatgacaagcgccatctgccttagatccgcagaaacgcctaaaatagagcgatccaatagacctagcgcatgcggacccatcataatgcctgcaagcagcatcccaatgatgcgcggaagccctattttgctgcacacagccgcacacaataggccacccaaaaaaatcatcgccaaagaagaaatcatattcttacccctttcgcaggaaacaaaaaaagccaatgctcctgcagatttgcagaagtcatcagctaaaaagcggtttcggttgcccgagggagaacttcattccctattctagcgtttattgtaccttattcattttggaaaagcaaggccaaacgttttctggtaaatataatttggacagggaacaaacatctgtcgttccctgcccagatcaattttttaatccgtccactcgctcctatgctcttccgcccaggcccagaattttttagcctgcgaagctagcatggccggcgtatctagatgataagggcaccggctggcgcattgcccgcaatggatacagttatccaccaatttttgttcatccctatattgttttgtcaaaaactgctgatagggagacctcgtcgccaatagatgtatgcgacccgccgtcggaatattgatgccctgcgggcacggcatgcagtatccgcaagagcggcaaaattctccagccagctcttttctatccttggcgatcacagcgcgcatttcatcatccattttcggcgggttggcgtctaacgcaataaactcatccaactcccattcatgctggatcccaaaaatcggcactacattatcatactgacggataaaggcaaaggccgccggcacattacccaccaggccgccggacaatgccttcatggcaataaatcccatatccttttccttacagcggcgcagcagatcgtcctctacctcgccggataaataggagaacggaaattgaagcgtttcaaatacgcccgattcaatggcctccaccgccattttcggcgaatggttggtgatgccgatatgccttacatatccctttttctttagttccaaaagccctgccagcggcccatccgggtcctcgtaatctaaggaagacggattatgcagctgataaagatcaaaataatcggatttgatgtttctaagcccctgcatacaatggtctatgacctcctgcttggtattccccattgatttggaggagatgatgacctctttacgcacgtctgaaaaggcagcgcccagcttttcctcgctatccgtgtaaaagcgcgcggtatcataataattgatgcctgcatcaaacgccttacgcaggatccgaatggccgtagggaaatcgtcccgctggataggcaacgccccaaaggacgtttttgtgaccataagttctgtttttccgagtctcattttttccaaagcaactcatccctttacaaaagaagtctgtcaaattgccaaaaaccacagtattattctaccataggcgaaacaaaaagccaaactgttatgtaatatggtatactgtatgtgccttttgaaggaggaatcttatgccagacatttctattccctatggcacaggccatgttaactgttccattccggacaatcggtttgcaggcgttctgcaggccaagccacagccttctatgacgctgcccttgcagcggcaggttgtgcgcgaggcactatctcatcccatcggcagcccttgcctttccgatcttagccggggaaaacagcatatccttgtcatcaccagcgaccatacgcgcccaatgcccagccaaattaccatgccattgcttttggaggagatacgccggggcaatccgcaagcagagatccatattttggtggctacgggatttcaccgcttaacgacagacaaagagctacaggatcgcttgggcgcagacatcctgtctcatgaaactgtattggtacacaatgccagggacgcgcaaagcatgcgttgctttggcacgctaccttccggcggcgctttatggctgaatgagcaggtcgaatgggcagatctcgttttgtccgagggctttattgagccgcattttttcgctggctattccggcgggcgcaaaagcattttgccaggcattgcctcgcaggaaacggttttttataaccacaacgcggagtttattcatcatcctcttgcgcacagcggctcattaaagggcaatccactgcatgaggatatgctgtatgctgcccgccaggcgcatctgcaattcatattaaacgtatgcttgaatgagaaaaagcaaattatacgcgcctttgcgggacattttgaacaggcgcatgaggcagggtgtgcttatgtgcagagccaaacgcaggtaccggcttgccaggcagatatcgtgattaccggcaatggcggcgcgccgttggatctgaatatctatcagtccgtcaaatgcatgagtggggcagagccttgtgtacgtcccggcggggtcatcattgcgctttgttcatgttatgatgggcacggaagccagggcttttatgagcttttccgtcaataccaaagccctagtgctttgacgcaggcgcttttgcagaaaggccgcgcacaaacgcaggccgatcagtggcaggcacagatcttggcccgtgttttgcaaaaagcgcatgtgatcctcgtgaccgatcaatgcgaacctgaattggtcgagatctttggcctgcgccatgctgcttgtctatctaaggctctggagatggcagatgcgctgacagggccgcaaagccgcattttgtgcatgccaaacggggttgagctgatcgcgcagcaatgatctgcgtccatcatattttaaggaggtcgtttccatgattttacgagaagaacgggaattggtccgcgcctatggcgtcaagatgctggaaaagaggcttacgacaggcactgccggcaacatcagcgtcttcaaccgcaaggaaggcttgtacgcgatgagcccctcttcgatggattaccacgaaatcacggccgaagatgttgtggtcatcgatttggaaggccatgtggttgagggcacacgccggccttccattgagcatgtgatgcatcgcagctattacaaagggcgcacggacatcaatgcagtggtacacacccattctccgtatgccacagctgcttcctgcctgggtaagccgttgcctgccgttcacttcatgctatcgctctgtggagcatacgaacttccctgcgccaaatttgcgccgcctggaaccgaggagctagcagagattacctatcaagcaatgcaggggtatagggccgtgcttctccaaaatcatggattgatcgccggggccgaaaccatcgaacaggccatgtatatcgctgaggagatggaatccatggcacagctgtatttcctggcaaagggaatgggagaccccgtcatcttgacggcggaggatatgaatggaaaggcgattggatgatggcaaagcagaagatcaaattggcgctgtccagcgccgttacagagccatatctttccgagctcaaggcattgtgcgacattacaaccgtgggccgtccggccttgaagggcagaaagcctacagaggaagagctgctcgcccagtgcctgggccatgagatcgtatacatcagcgatgaagtcgtaacggctcgctgtattcaggcctggcagcaaagcggtatgaagctgttgggctgcgggcgcggtacgccggtgaatgtagactggagggccgttcatcaatccgggattccgctggtatacacgccggggcgcaatgccaactctgtctcagaatttttctttggtctgttgattggcttagtacgccgcattgcagcggatgcgcatgccctgcgcagcggacgttatcttggtcctgccaaggaaaacgtgcttgtgttggatcctcagcaggatgtggtatggttcatgccggatggcagtagccccatgcgcgattttggcgggggttttgagctgtacggacgcacgctggggctcattggttttggcgccatcggccgccgcgtaggacatacggccaaagaaggctttggcatgaaagtcaaggtctacgatccctattgttcggcggaaaccatcgagagctgcggctgcgaaaaggtatcgttggcagaagcgctgtccacgtctgatgtcgtttccatccatcttccggtcaacgaggaaacgcgcggcatcgtcgatgcttcatggtttgcacagatgaagtctacggccgtttttgtcaataccgcccgggcggctgttgtagatcaaaaggcattgatagatgcgttggatgaaaagcgcattgccggcgctgcgatggatgtgatgtggcaggagcccgcgcctgaaaaccatccgctattgcaccgggataatgtgctgattacatcgcatttggctggcatgagctgcgatgtggatcgctggcaaagcgaaatgatctttgatgaaatacagcgatatgcccagggccagccgccgcttcgtgtatggacgcgcactgaataatcccataaaaaaagcacaggcgattgggcctgtgcttttttcattgctcaataatttttcgccggaagctggaagaaagatttcgggtgttcgcacaccggacaaacctcgggcgcctggaggcctttatgaatgtgtccacaattgcggcactgccaatagacttccccatcgcgaacaaagaccgtgttgttttcaatgttggccaggagcttgagatagcgttcctcatgctctttttcgatcttgccaaccgcctcaaacagataggcaatcttatcaaagccttcttccttggcggtctttgcaaagcccgcatacatatcagtccattcgtaattttcgcccgccgcggcatcctttagattttccatggtatccggcataccatcatgcaagagcttaaaccagatcttagcatgttccttttcgttttcggcagtttccaggaacaggcccgcgatctgttcatagccatctttcttggccttagacgcgtaataggtgtatttgttgcgcgcttgggactcgcccgcaaatgctgccagcaggttagcttcggtctgactaccctttaattctttcatgacatttcctcttttctttatgaatttgagccttggctctaaataataacaattcttattattgtatttttattataggaatattt

SEQ ID NO: 459 - DNA, 5239 bp, Unknown
  16S sequences of unknown bacteria
tgtatcatagaagaaccttccaaacattattttacagaaaaagtttcatactctcttcccatcttttcgtagaagtgctctgcagaggtatttcctgcccagacgttcagggttacttcatagcagcccagttcttttgcctgttgcttcacatatccaaacagactttccccaatatgctgtcctcgtgcctgcttatcaacgcaaaggccatcaatgaacaatgatttaaaagacaccatgttggtggaaaagggctgctccctgagttgacagaaggcatagcccatgcacagatcgtcctcatctacggcaacgtagacaggattattttcctgcttcaatagctctgtcaactcgcaaagggtatatttggtggtacctggtataaaaaatatccgggcggatctctgcatggatctgtaatacctgtcccaacagtacaagaattcttgggatgtcctttttctctgctttgcgaatcttcatttcaactttactcctttacaatactgatttgtcggctttataaaattaaacaccattttcctaattgtaccataaaattattttttttgaacaagccgcctgaaaaagtttactctgatcttttatcaagtcgctgagcgttacgttattcgctctcctcgagtttttatggacattattggagtgctcatgtcatcaattatcactgatcgtagcaaagcgactgcgttcatgacttgttttcatggcgcacgcttttttgaggcatgagatgttctttcccggtcagacggtagaattctacatgactgccgatgaagcgctgaatgacagagactgtttttccggtcaggaatgcacagaagatggtgccgattccaatgccataaaagcgatgcaggatcgtaagcgacaggatgacggtcgtggtcagacagcagagatcaaaagaagtcttgatggttttgtaattcttttttaaaattgcggacagatcgcgcggaaagatatcggttggaatgatcgggagcatgcaattgttggcgaggcagatgccggagcacatcagaagaaagccagagaaaaaatagatgatattcagtggcagggtgtttggcagtgccaaaagccaggcattgtgtacgtcgatcatttttccgaatccgattccgactacgaaggagaacaggtagccgggacagaaggagcgcttcagaaccatcagtgtgaggacgagcagggtctggaatatatagttccatgtaccgaagctgaataccggaaaagcggtgctgaagatcagcggtacggaggaaatggtcgaaatcccgaattcgcttttggacatcagatcgacgccaagagaattaatcagcagcacgatcagaagggctacttcgcccgagaggtgcaattttttcgtgttcataagatggtatccttctttcttgaacggtaatacgctcatttttgcaagctgtgtctattatatggaagataatcaataaaaacaaatgattattttgaataaattcatttagaaactgaatgaattatgctataattttaaccgaatcaagcaagtctcttacttcaattgtgcaaagcaataggcagtgggttggctcttgcttccattgcgaggagtaattgtaaataatgaagctcctgctacgggatggtaattgagaatcggccggcagatctgacaatggtcccgcagcagtaagcatagatgaagccgtttcttgcggaaataagcagacatcaggagagaaaaatgaatatcgaatatttaaaatacttcgctgagctggcaaaaacgcagcactatgggcaggcggcgaaagcgctgaatatttctcagccgggactcagccatgcgatcaaaaccttagaagaggagtatggtgttccgctttttcagaaagaagggcggaatgtgagtttaagccagtatggaaaagagctgatgaaagaggtagaggagatattggatgcgtatctgcggatggaggaacgggcagcgggatttcgggcagaggagaagacggttcggatcggcacagtgtatccgctggcgccgaggatgatcccacagatgctgaagcagtttggtgcgacctttccgttcattatttataatcggctgacgccggagatcgaagaagggcttctggacggcagttatgatattggtttctgttcggatcttttgaaagcggacgggctggaatattatccgattcgggagtcttacatcgcggtggcggtgccaaaggggcatccattagaggcgagagagagtattacattaaaagaagcagcggaatatccgcagattatgttttccaaaaccagtggttttcgaggactgcaggagcagatttttgcagaagaaggaatcaaagtcaggccggtatgctcagcggaagaactggaagtggtgatagggctcgtggaaaatggatttggaatttccgtgctgccttatatggatatgatacagcttcacaatataacagccataccggcacagacgtcgagctggaaatccaggttttatatcgcacgaaggaaatatggaatccgctcgaagcaggaagaggcattttttcagtactggagaacgtaaatgcaagtcccctgcaataaccaatggttacagtatgatatatctcatgaatgtaaccattggtcaatgttcagatcggatgtttgcaaatagacgtccggcgtttctttttttcctcgtagagtgtcaggtccgcgacagccagcttttcagagatcacgagatcttttccgagcgtgaccggcgcaaagccaatcgatagctctacataatactctttttctgatgcggcgttgaaggctgcactttttgctttgatctgttcaacaaatgtgcggcctgcctgcatatcgccgaagagcagcacgcagaattcatcgccgccgattcgcccgacaatgccggatgctccaacctgctcttgcagtgtcgcactgcaccatttgattgcaaaatcaccggcggcatgtccgaatacatcgttgatttccttcagatgatccagatctgcaaagcacagcagtgccggttcaccttctctttcccggtttattcggagtaccttttccatgaatcctctgcggttcagagagccggtgagcggatcagactcagagatgaagttcagcacctgatttttctcctgtatttcctgaatcagctgctcctgctttttccgcaagagcatctgctccctggagagctgatacagccggagcatatttccgatctcccggctgatgagatagaacagaaccgtgttggtcggatcgatctccgcgaccaatatgccatactgcacttcaccggagaagaggcagagcacctcagcgctgtaggtatcagatggatgcctgctgcttaagggggtgtttctgtgagaagagatgctcacctgcggacgctcttccggtcgataggagtgtaccttacgtccttcctggaaggcagcgagatacagcgtatccgggcagatccagtggtcgcctttatagtgcacgacgggttccttcagaatatagaggtaggagtttgctgcatttaaggaggccagcttagttaaggcactcttatacagctcggtctcatcctcgatatagcagagcatatcgcgtgagatgagcgggagaaagcagctttcatgcagaaaattagacatgcgttccttttcgctgcgcaccatatgacagaccgatttttcgtggatctggcgtttacgcaaaagcaggttgtggacggcctgacgatcaatcacggaggcgttcagctcaaattccagccagtcatcgacgtattgctccagcagctgacttaagacatgactggacacctcctcaaagctctggtcatccacaaggcgctgcagcccggtctttaccgtttcttcactctccggaatgcggaaatctgcgcgcagcagctcctgcagacagcgggcaaagcgggatttcagctccggctgtgtcgtttcggaaaatacttccttcaggatttcttttattttttcttctgagcgcacatgccagtcggtcttatcgacagatccgggctcggaggccaggatcttttttttacagcagccgcacgattcacggatcttgagccgggcagggacgacgactgtgtaagagcgccgtcctctgcacagctccagtgcgccgatgacggccatatagcccatgtcattggcattttgcagtaccgttgtgagcggcggatccatgataccggccagctcccagtcatcatatccggtgatcgcgatgtcgcgtccgacggtaaggccgcgtttgaggcattccttataggcagtgtctgccatgttgtcgtttgcacagatcattgcttccatgtgcgggaatcgatccagcagctcattgacctgcttctggacattcgaagaaaaattcccgtagagtatccggtcttctccaaaagaaatgccatattgccgcatgacatccagaaccgctttttcacgctcttcggcatcggtattcccctttggaccggccaggtaggtaatatcccggtagccgtggtcccggattagatgctctgcgatggagtacatgccgtggtaattgtctgtaatgatcgcagtcgcgcgtgtactctgatagcgctcctccaaaatgactcttgggatatcgccgaatttccggagaaagtctttttgctctgcttcgttcagaaacatcccgagtgatccgtattcgataatcagcgcatcaatgtcagcgaagtcctgatagtcgtagatggtattgaactgataatcaaaatccttgtcgatatcctccagctcattcagcttataataaaatccacagtgaattccgaggaaaaagaggacattggcattcatgctttttgctgcctgacagatgccctgcatgacctccagaatgtgtgtagagattgcatttccgatcatagcgcctatggtgtatttgctcttcataaattaaatcctttcgtttgccattaaccctgactctcaatatacttttgtatagttgctgacgatacttctccaatactgcaagcaaagtatccgtctgaccaaaatatccttttcttccaatattgtttagacagaaacgaaccatacttttgccataggtaatatgttgtttcttgttttacaatcttaacaatgtcgcaaaccctatc

SEQ ID NO: 460 - DNA, 32759 bp, Unknown
  16S sequences of unknown bacteria
taaaatggggagaaatttctcattttaacttgtactaaatcttgacataggaccacaatccgttgaaaaagaaacaatccatgatggccattagctgtaagctgatacgagtcctttatgccatcctgacaaatgtagcgatctgtgatccacagaagatgctttctgacattcacaggcagcataagaagatcaattgtgagattcagaggacatccgtcgcaaggcgctggatggaggagaattttaaaacataaagagccaagtcaaatttttccatccgagaagagactcagagtaggagtatcatgacgccactttatggacaagcagagcgaagaaattaagaatcctgcagtatagagaatcccgtatgacatgagagattgagcttccgtaaggaggatagaaaagaaagaccgattatagcagaataagctaacgccttgttttgtgtaccctaaatatccatgatttatggacgaggggaatgatatggacttagatgcaatctctatgaaaaaatgaaaatatgagaaaaaacgagttggcaagagaaaaaccaagattattatagggaggtaaatgtatgattcccgttttaatagctggagcattagtgggattaggtgcacacgcttgtgcatcagtagataatgatgaggcttgtgaaaaaaataggcgtgcaaatgaaattattgatgaatctagcgcaagaagctaaaaaagtatgtcaagggtcaatggatgaattggcaaaagaaaagactagggttcttcaaggaaatatgagaaggtttgtaagaagcttttctcaaataaagcctgtaaattatactgattctagcgatctttttgaagttgctaaatttaataaaaatgaacttacaataatgcaatcgatggttactagtgttcagaaaattaatgcgaatgacgtagttggaggggcttcaggtgctgcattggcagttggggcagcggatatactggcaggtggctctttgttggggggggcaggaatatcagttggaggtttagcaggcggagctgcattgggtgtagttgctgcaccaatttttgcaattactggaattttttctgcttctgaggcttctgcaaatttagaaaaagcgaaaagtaatcttttaaaagcgcaagcatatcaagatgaagtagagacatatgcttatttagtccattccgttagtgaacgatgtgatttgttctatgaaatattagtaaatatagatactacatggtttacagatgcagttaatcaattagagatgctcgtcaatagtaagaagacctttggtaatttcttaaaaaatatcgtgggaaagaaaatatattctaaacaagaaatgaaaatggtagctagtgtagcttcacttgctaaaatggtaaaaactttaattgatactaatattcttgatagcaatggtcatgttacggataaatctgaaggagttattttggaaatacaagataaaatgaaaaatgaggatttgacggttaggatgcctaatccacaagtggaactgattcaacaaagtacataccaacaatttattcagaatataaatatggaactaaagcagattttagttccatttaaacagcaagtagttaggcaatcgttgagtgttaaacaaatttatgatccaaatggatttgttaaatttattatgtggctgcatactattttttatggctttggcggtatatgtggaatatttagtggtgattttattgctggaactattgtttttgcagctggattaatgatgtgcccaaaagtaaataatacgatgaaattttggccacgttttggtttgatgttattattacttatgataagcgcattctctatgtaaagatatatggttaatagttatcactatgatcctatctaaactgtgagataagtattaccacaggagcattaccaatgatcttattctcaacaattttaaaattcaacgccaccctaacaaaggatgcatttatccagctggttttggaatggaactgcacaagtaaatacaaagagaacattgttccagatgtaagcttggatggcagctacagtggaaaatttggaaataataagttatcactggaatttgttgactatccagagaaacaaatcatggcggtacggcatgagaaaatcacggatgatggagtggtatgggacacggattatgtggtgaattttgaagaaaaacggattgcgattcgtctggaccgaacttatagcgcagaagcgttggtgatgaatggaaaattctcaacaccacattttatcacgctgttaatagaaggcggtcatttggcagaggatcgtgatttaccggttttgcgtacaccgatgactgttacggatgagtacaggcatgttttttctgatatgataaagcatgaaaacgaatatcaattgccggtcgtctatgtgaaacgaacatcagacggtcatgagccagtagatgcaaagtggctggcttccagactgaaaggggctgcgcatgtcctgattgaaaaggatcaggaaagctgtaaagagtgtaatgagatttgtggtgcacagaaagaagaatttggttcgataacgatttattatccgtctgagaatattgcttcgagtcgttttctgtgtcaaaacatgaatggagacagggagagatgtctggagaaggtgataaggaatgtgattcagtattggaatgctcaaagggtagaactcctttatacatggcatggcgtaaatggagcggtgttgaatgacagactgaatcagcagatgctaagatatcggaaagcgaaagaagagatcgatcaggtttatgaagccgtcgatgatgatttgaaaaaaatgcaggaaaagctggaagagcttacgagagtaaatgaatcgctgatgctggaaaacagtgctttgcgtgccagagtgaatacggtaaatgccaggccaattatttatcagggagaggaagaagagttctatccagatgagataaaggatgtgattcttagcattctggatgaggttttggcaaatacggaagaaaaaacgcgacgtgcagatatattagaagatcttttggaaaataattcatatcagcatttaagtgaaaaccgcaaaaagaaagtaaaggcgatattcaaggggtataaaaatttaagcggttctatgcgacaggagctggaagagcttggaataacgatttcgggtgatggaaagcattataaattgacgtataaaaatgatcctcgctatatggttacgattggaaagactccgagtgatggcagagccgggaataatacggcggcacttgtaaataagactatgatgtgagaaaaattttttactttacgaaatgttcggctaaaatggaaaagtaatacagattagccgaaggtggtgcactgatgaaagaaaattagcacattaaaaaagaaatatatggtgacaaatcctgtcattccgtttggctataatagaagggacaaaagatcaaacataccaaatacagaaaaaggaaggatttgtcaccaatgtctctgttacaaaaaaatacatcatctactataaaaacgctttactcccagtgcatggaatcgatcacttcccacgatgccatcgagcagtccctgcaggcagatcttcagactcacctgcaggagctgaagctcgaactgtcggatccggaatatcagttgcttaaaaatcgggcagtcgcctttgctgagctcgggcaggaagcggggttcgtgcggggatttaaggcggcgttccggttgtttgtggagtgcatggatgaataatacaaatactacagcgtcttaaaaaaagcaatcagcgcaagctgctgctcctcgctcagccgtccggcttcttcgagcagggtgcgctgtaccggggtcagggaaaaggaagtctcgtcggtggagaagaactgggcgagggtgattccgaatgcctgacagattttttccagagatgggatggatggaacgagatttttgcgataccatgaggagatcgtggactgggtcaggccggattcctcggcgagctgatactcggtccatcctttttttatgcgataggatgtgatgcgatcaagaatatttatcataagtagcctccgttttgttgaaatacttcgttaatagtatttgacaaaacgttgcaatataatatttttaatcgtaaaataataacggataagcgttttggaagacattttcaggtctggagagtgcatgtgagagagcacttgcgcagattcgggatcgacgctacgcggagtacctgaaaggtgaaggccggaatgagattcttgcatgcggaattgcattttgtaagaagcgatgcagggtagtggttgaaaaattataatggttatatatttataaaagcctcattcagaacggattgcaatgttgcagcgacgcctgaatgaagctttttactgttactgatcagcagagctcttccatcagatcgtgaacggtagtcatctcacagatccgatctacattttcaccgcaaaaaatcagtccgtttttaatatctcctttcaccgcatctatcaatgcttttgtaatacaatacggtactgtgcgcggatcacatttttcaagacagttataacattttttaacagacattctggccacctccagattttttataaaatcatttctgagggctcttcccggcattcctaccggactctgtataatctggatgtcttcttttccggcatcaatataagcctgcttataggcatcagaagcatcacattctgcggttgcaacaaatctgctggcaatctgaacaccgtccgcccccagttcgattacatgatcgatgtcctgtctgtcaaaaataccaccggcaacgatcaccggaattttggtattaaacatttcctcgtatattttcttacatgaaataatatctttgatttctgcatcataatcaaggttttccatatctgctaactgttcacgggagaagccaagatgaccgcctgcttttgggccctctactacaataaaatcagcggttctcccgtagcgatgagcccacattttcagtatgagctgagttgctcttctggacgaaactatgggagcaattttaacagagctttttcctataagctccggaagattcattggaagtccggcgccactgatgataacatctgcacctgcacttacagcctcctgcacatgttctttgtaatgcttcagtgcaaccataatattcacaccaacaagacctttaccttttgcaatttctttggcatgggcaatgtgttttcttatagcaattcgattacattcagccggattatgttcgaatccgtcttcatcataaccaatctgtgcggtagagatgattcctacaccaccttcagcggccactgctccggcaaggctgctgcggctcacgccaacccccattccgccttgtataattggtttttcagctatcagttctccaatttgaagcgcatttaatctctttttatctgatttcatacatcgtatctcctgtgatcatattttgattatcaaactatttgacagtatacgcttttcggatattaatgtcaatgtttaattgtttctttttctttataatatagttttcaatactacataaaaagcgccggtcaaatatcgaccggcgctaaaaatcaagcagataaacatttctaaaagacagaagataaaaattaaccggactaatatgtactagcttgtcatcgccagatactcataccgcggcacaaggctcttctcatcgtacagctgataatactgtgtgaagactcgttccatgacctttggaatctgagcttctgcgggttcaaagaggatgatgagatattgcatggcgctgtagcgggtgcacatgtcgacgcggcgtatcgtatggcggatggcctgttccatgcacgcaagagagtgctcgatggcctcgatgtgcgggagggtgtccacggcgatgtccattgtgaccatgacgaggtagcagcgacagtcgctgcgtgcgctcagctggcgcatgtattcgtactgacgggcgaaatcgcggtaattgaggtcaagtgcgccgagataagtgccggtgtcgtgaagcgattttgctacgagagccagatccctgccggtgccggaggcgagatcgcgtcggttgatctgctggtaaaagaaaaactgatttttgccattttgctttacataatagagcgccttgtcggctttggaatagcactcttcaaaggaatcgcccttggtgcacatgcacagtccggcagagagggaagcgcagttcacctccacatcgtccgctgtgagctgatggaatcgggcaaagagccacgcatttgccgggaaatctgctcccggctgatctccggtacaaagagcagaaattcgtctccacccaggcggcaggcaacggcggcctcgtgataatctgcgagcagtccgccgagcagcttcaatgcgcggtctccggctttgtgtccgtataggtcattgatctttttcaggttgtccatatcgatgaaaacgagatggccgctgtgctcctgcatgaattctgccgcgagtcgttcacctaagtgacgcatgggcagtcgggtcagaaagtcgtagctggcggcgtcctcctgcgatttcatcgtgctcatcacatcggaaatgaattttccgattgtggaatcgacggcagaaagtccggaggtatcggcagcggacagaggggctgacgggctgtagagacggtgttcatccatcagccgcaggaaaagatctgtcagctccggatcaaactgccggccacgatttttaagaaattcctcgcggatggcttccggtgacaggctgttccggtaaaggtgtctggtgttcatcgcatcatagctgtctgcgatggctgtaatccgtgcgtggatcggaattccttcgccgacaagaccgtccggatagccggaaccatcatagcgctcatggtggctgcggacaatttccgaaagatggtcgatccacttgatatcgtgtaagatttctgcgccaatgacggtatgcttcctgaccaggacgtattcatcatcagtcagcttggtcggtttgttccatatctgatccgggataccgattttaccgatgtcgtgcagggtgacagcttttttcagattattgatgtcagtatctgtccagccgagctctccggcgagctgtgcggcatactctgctacgcgcaaagagtggccgcgggtgtaggcatccttggcctcgatcgtggcggcaagggtctgaatcatctgcaggtacatgtcttctgtctgctgtcggctgcgcagaatttccgcttcccggcgttgttgttccatattctgcacgttttttatggtgcggatgatgttgacgaagaacaagatgagcatgcccgcgctgacgaacagtccggagatgagtacgacataatagacagaaacggattcaatgagtacgcagaggatcgccaggagcaggccgagcagcagcaggcgatccgctttgcttttgctggcatgcatgtatttcacaagatttataaatattgtgagcagcacagcagcaaggataaacagtcctgccggaagcgtttcgatataatcggcggttccggtgatgagcagaagcgcgcttacggcaaaatttagtacggcgatgccgccgaggtatgtgtagagccgatgatgctgtctgtgctgtatgctgtccgcgtaaaaaaggatcggcaccgggacgagctgaatcatcacgaagcacaatgcgcctaaggaagaggcgtttgaaacgaatatttgccgcagcttcgattctccgagcatccatgtagcgcccatgaacatacaccagccgaggtattccatatcaaagcttgttttatagacgacaccgagtgcgaagctgaacaggatcgtcgccagtccggcaaacaggataaagaaggcaatgaacgtttccagctcatagcggtcaaagatggtatgccagatgttagctttatcgccacaataaatatcatttaccacaccggaatactgatgcgctcgggtcgtcagctcaatgcgaagctcctttccggcatcagcggcagaggtgggacagaagacgtaccggctggcagaggtctttccggacagacgggtacctccggtgctgtattcgacgcggagaacgccatcaatataaaagcggatatcctgcaaagaggagcggatcgcgagcgaggttgctgaaaagtcggaaggtagctgtgtaaagagcaccatggttgttcctgccgggacgtcgtaccggcccggaacattgatgctttcgcggctgccgtccggcttctcccaggtaaagcttccagtataaaaaatggagccggaaggctgatccagatgccgttcgtctgttccaaacaattgcatgaaaaaaaaccatccaaagatgaagaacatcaggatgtaaaaaaaataccgtttctttttgttaaaatcaacagtttccgtttgcactgtccacctccttagcaggggatgtcggcgagcgtctcaagcgccagtaaaatttcgtcctgttcgccacgtgcagcggcagcttccccatccttgtaggaggagatgccatcgcgcaggtcagcctcccattcgacgacggtatttaaaatgctggcggtgcggaggtgtcggattgctccgacagcaaaaagagacgcagtctccatatcggaggcgaaaacgccctttgtggaataaaaggcatcaagctccggttttttcttcagatagagtgcatcatggctgcgggtcgggccgactgcatagggaagccggagtttttgagccatcgcaatgcaggcgttggtgagcgacgaatcagcaggtgcacagcagatggcgttcgggcgctgccttgccgcgatatcggcatctgtggagacagcatctgtgtctgtaaaagaagtgccattatggtccggtttccaaagatatgcaagctctggggctgcgtaggcaaatgtatcaaggtaggtttggctcgttccgtcatcgcagactgcgcggtcgcagatgacgagctggccgagtcttaaatcgcgctgaagcgcaccacaactgccgatgcggatcagatcggtgacaccgagatcagccagctcttcgacacagatcgcggtggatggccctcccatcccggtggaaatggcgagaatccgacggcctttgtaggtgccggtgatacttttgtattcacggttgaagccttcctcgcggacatccgtgagaaacgcggcgatcgcatcgacccgcgccggatcgccgggaagaattgcagcggttgcatggatggaagcatccagttggatatgaggcatttttacggtggttgcttctgtatttgacatagcaatatggtatcctttctgagagagtaattgtaaagaagttcaaaagccttatcatgcaagcatgaacggctttttgaccttttgaccctggcatcatttgattacagcctaccatgcaggcagaggaaagtcaacaggatgccattgcacgaacgggaaaggtagggtagaataaaagcaggaggtgtttaggaacgatggaaaagaacagagatttattacttgtgattgatatgcagaatgtgtatttgccggggcaggagtgggcgtgtccgtcgatgccggatgtcacccggaaggttcgtgcgctgcttgatgcaaaaaaagcaggcgatacggtgtttacgcgctttgtcgcgccggaaaacccggttgggacatggaaggattacaatgtagaaaatgcagccgtcaatgcggatccgtggctgaatgcgattgtagatgatctgcagccgtatgcggcgcagtatccggtgttggagaagtcggtgtactcttccatgaagatcccggagcttgccaagcgggcaaaagcggctgagcatgtcgtgcttgcgggtgtcgtggcggagtgctgtgtgctctcgacaatgatggaggcgatcgatcagggacattcggttatttttctttatgactgcatttccggtcagtcgcaggaaaatgagcaggcaatccggaagctcgcggagagctttgcgccgctacatacgctggtaatgagcagtgaggaatatatcagataaaaggttaactggtctggtcaaaatgaagaaaaatggctatttatttcatgtcagtttctgcatataatacgtccatacttagctgagtgaatttgacgatgaggagagactgatatgaaaaaaatggacgcaaaacagatcacactggctgcacttgcgattgcagtcgtatgcgtatcgacaatggtaattcagattccgattccgcttggctatatgcatcttggaaattgctgtattctgctgttcggagtattcttcagcagagcaatcgggacgtttgcaggcggcgtcggctcgtgtctggcagatcttttgagcggttatccgcagtggattcttccgacactgattatcaaaggcatcatgggctatgccatcgcggcgctttccaaggataagtccggttcggttcacatggcttcgtggcggacgctgctggcatctgtagtcggtatcatcatcatgatcgctggctatacggtagcaggaacggttttatatggaagtgtggcctccggtctggcacaggtgccgggactgacgatggaaggtgtgctcggaatggttctgttttatgcagcaggctttgcgtttgaagcggcgaagcttccgcggctgtttcagaaaaatgcctgatattcaaggataaggaattataaaatgtcacataacaatcagaaaaaaatagctttaattaatgatttcacaggatttgggcgctgttcgattgcagtcgcccttcctgtcatttctatgctgaaggtgcagtgctgtccgctgccgacgtcagtgctgtcaaatcatacagggtttgagagctttttctttgatgattataccgaaaagatgactccgtatatcgcggagtggaaaaagctcggccttcagtttgacggcatctgctccggttttctcggatcaaaggagcagatccggatcgtccagcagttctttcaggattttaagacggagaagaactgcatcatcgtagatccggtgatgggtgattacggcaagacctattctacttatacgccgcagatgtgtgcggagatgaagaagctggtcggctatgcggatatcctgacaccgaacgtgacggaggcctgcattctgacggacacaccgtaccgggagaaattccggatgcaggagtacgcgcgcatggcggagcagctctcagagaaaggcccgaagaagatcgtgatcacgggtattgtccagggagactttatcgcgaattactgttatgagcggggcgaagagccgcacgtattacgctcacataaggtcgggacacagcgttccggtaccggcgatatttttacggcgattattgcagcggatgcagtcaacggtgtaccgttccacgagtcagtgaaaaaagcatcccgctttgttaaaaaatgtattcagcgctcgcttgagctggagattccggtgacggacggcgtttgctttgaggaagtgctcgggacgttgcggtaaggcagctgcatggctggcagtgtgctaaggagcagcaaagaagtgggaatggctgctggaatggattgcgatatccgctttggcgcctgcgctgcataagaaaaagtatagcgggacagattagaaaagaggagaagaatatgaagaaagcaatgacgattttatatgaggtgcatggtaatctgtatgtcaacctgacgaataaatgtccgtgtgcctgtacattctgcctgcgtcagacgcgggatcatatggaagaatcggacagtctgtggctggagcatgacacgacctatgaagagctcgtaggagcactgcagcagatcgatgcagcgacgatggagcactatcaggaggtcgtgttctgtgggtttggagagccgacggaggcacttgatgtgctgcttcgtggagcagcttatatcaaggagtactatcataagccggtcaggatcaatacgaacggccttggcagcctgattaacggcgaggatatcgcaccgaagcttgcaggacttgttgataccatttcgatcagcctgaacacgccggatgcggaggaatatcataagcttgtgcgcagcaaatttggcgatcagtcattttctgcaatgttacagtttgcaaaagaatgtaccaaatacgttccgcatgttgtgatgacgaccgtagatacgacgatctctcacgaggacgaggcagcctgtcagaagatttgtgatgagcttggtgtgaagtatcggatccgtccgtgggaggactgaaacaattaatgtttataggcataggcgagcagcgtccgcgcatcctgccaccgtgccgtgctgcttccggcgcctaaggtgacggagatatactgtttgccgctctttgcttttacgacaccgacgaagcaatagcctgctttattggtaaatccggtcttcataccggtgacgcctttcattgtccgaagcagtgcgttggtcgtggcgacggagtaggagtggccctgcctgctggagaaacgccaggcggatgtcccgacaatcttgcggaaggtggcatttttccatgcatactgagcgatctttgccagatcccttgcagttgtatagtggttcagtccggcatcgaggccattcggcgtcacaaagtgcgtcgatgtgcagccgagctgctttgccttttcgttcattttttttgcaaaggcggaggtggaaccgctgacgtgctcggcgatcgcgactgccgtgtcgttgtgtgatggcagcatgagcgaatagagcagatcgttcagggtaaaggaatcgcctgcagtcatgtacagtttggacggttcctgtgaggccgcataggcggatacggatacacggtcatttaaagatgcgttttccagtgccagaatgcaggtcatgatcttggttgtgctggcgttggcatgcttttccgttgcatttttggagtaaagcaccttgccggtattggcgtcgatcaggatcgcacatttggaagcgatattcaggttcgcaccggtatgctgcagtatgcccttcgcgttgaagtagcaggtttcgccgttgatggtgcgctttccggttacagcccgcccgtttgccagaaagtagtagcgattgccggagacggttttccagccggtcgcgacggcgccgttattctgcagataaaaggtatatttcttataggtaaacagacgattgcggtagagatagccctgagatgctgtaccaaggtagtattttttcttctggatcgtctgccagccggacagacgctgtcccttctgattaaagtaatatttttttccctgccaggtcagccagccggtcgcacgtttgccgctctttttcagaaaataggtctgcttgccgagcttcagccagcgcagccggtagaggtatccctcggactgctttccaaagtaataataatccccttcaagtttcttccagccagactgtcggtagccatttttggagaaacagtatgtctttccattgattttcagcagacagtctttggcgtaggagccgtccttctggcggtacatccattttccatcacgttttacaaatttgccaccggagctggtcgtgacatcggacatcgagatcccggcagcctgtgccggtacgccggacagcaggcaaactgcgagaagcataaagagcaatgagagtatcgtttgagctttttgtgcggttacctggtgtttcatataactcctccttataaaagaatcacgtaaagcggacataagcatctccttttccgcgaggtaatatgtggaaatctgtttctatgatagcagttcctgtgaaaaaagtaaattgtctcgtataagttccgcagaattcggggatactttctctataaaaacgccggaagggtggatgaggagagaagtatggggaaggaagcggatagcggaccgaaaaacggcaggcaggtatcagaaaaaagaatgcggaatgagctgcggggcgctgcggctgtagaatcgcagcaagtttggagcaatgtgaaacaaaatgaagcgatgatgtctgcgttgcttccgatcaaggagagctttgatctgatctgccgggagcttcagatcggagaaagagaggcggcattttatttcgtggacgggatgatcaaggatgaggcaatggtcaagatcctcgggcagctgctcggtatcacgaaggaaaagatgccggaggatgcgaccggcttttccagatgctgcatgccgtatgtggaggtcgatatttacgatgattttgatacggtcgtgcggaatgtgctctccggggcgatcgcactctttatcgacggatatgaagcctgtattgtgctggattgccgtacttatccggctcggagtgtggaggagcctgctcaggataagtcgctgcgcggctcccgagacggctttgtggagacgatcgtatttgacacggcactgatccgtcggaggatccgggatccgcagcttgtgatggagatgctggaggtagggacttcgtcgcggtcggatgtggtgctttgctatatgaagaatctggcgaagccggagctggtcgcaaatctgcgaagaaaaatacaggaggtcgtgacaccggatctgtgcatgaatcagcagagtctggcggaggcactgatcggtacgcgctggtacaacccattcccgaaattcaaatttaccgagcgtccggatacggcagcggcgtgtgtgatggaagggaaggtcgtcattctcgtggacaatgcgccttccgcaatgatccttccgacctcgatttttgatatgatcgaggaggcaaacgattattattttccggcgtggacggcgttgtacctgaaattcacccgcgtgctcattttgctgctcacggtatttatgacgccggtgtttgtacttctgatgcagaatccgcagtggattccgccggaactctcgtttatttcggtgcgggatgtcgtgaatatcccgctcgtgtatcagctgctcatcctggagctggtgatcgacggcctgcgtcttgcggctctgaatactccgaatatgctgagcacgcccctgagcattttcgccggactcgtgctcggtgaattttcggtcaattccggctggttcaacagcgaggtcatgctgtatatggcatttgtagcggtggcaaactatacacagccgaattttgagcttggctatgcggtaaaatttatgcggatcatgctgctcatattgacggcagccctggactgggtcggattcggaatcggctgtatgattctgattgtgctgctgtcgacaaataagacactgtcggggcggagttatctgaatgtgaagaaaaattgagaaaaatggctctgcactgtaggacagtgtagagccaaaatgctgagtttatgattctgtaagcagtgaaagcggatcacgactcaccgtttgcgatgaccggggtcggacgtctctggtcaaagacttcggatgccttgaacatattgtcgagtacggtcgtctgaccggtggaagcgcggtagagcatgtaaccgtcgaggtcaatgcggccctgacgtacatactgatcggtgatctgtacccagtagggctgcgaaccgtctacgttgcagtagaaattgtagcctgcacccttgaaatactggtagacctcgttgtcggaggagtagccttcccaggagccgatatcatttccgtgggcaaagatgattgtgtcggtagcgccgacgatgtctgctacgttgtccatccatttttcattgtcagtacgcagctggtcaacggtctttccggtgacgctcaaatgtccccacgtatggctggcaaaatcccatccttcttcctttaatgcctctgcgatctgctttgcacctgcgatgtcggcgtcatagtcgaagtccggatgctcatcgagccatttctgctggtcttctgtaagatgctgcttcgtctggtagtcagagtcggtgcggtagccgaacacgccgttgtagccggtcagagcgatcgtgccgcgtgcgcccctgtaggctccgtccgggtgctccttcaggaaggtgttcaggcgaggtacgacatcgaagtcgccgatctcttcagatccgtccggcttgacataatgacacttgacatcgccgttctcgtcgagtacgagcttgtccggaaagctggccggctcataggaatgataatagctcaggtcgtcaacggagagcacgactgccttcttcccgggcgggagcatcaggctcgtgttcggtgaaaagtgtacggtgccgtctgcatcggtcgtctcggtcacaaggtcatgcaggcggacaaatacatagccgttgtcgtacatctgctgcgtgatcttgtcaaactcttcgacggtggtcatccaggcattcatgccgtctacctgactctgcccgagtacggagacattgaaggcagcgtccgtgttatttacgagtgagtggtagaagatgtgcgggatggtcgtgacatcaacggcggtacaggtcgccttggtcgcctcatagtcagcgatggcctgcgtcacctgtgcgttgccggcgtaatccggaagctgctgaagcagtgcgatcgctccgtcataatcatatccggcggcgagcagggcagcctggtcgagcgtggactgcaggtcagaggccgctgtctgtgcttctgtctcagccggtaccgcctcggtggcggccgggacggcttccgtctcacgcggtgcttcggtcactgtgacattggaaacggtgtcatttttgccgcttccggaagtgccggatgtaccgctgtcctttttcagcacgattctggagacggcaaaggctccgcctgccacgatcagaagcaggacgagaaaaaagacagcccgcatcatcatcaccttacgccgacgcttctgacggcgcaggcggcgcagctcggcggcccgctcatagtcgtaatcttcaaattgtgaattcatgtgtgtatttccccctctggttatcggttgtctgtttttagtgtatcacagcgtgcgaaaaacgacaacgaaacaaattattaaggttttgcatgaacgtgaaatattcctgtaacagttcggggcgattcggaaaaaggcattgacagaagtgttgcggtgcaggaaaatagagaaagcaatgagtaaacagatagtatggaggataaaagcaaagatatgacggaatccacaaagagaacgtacggtaggagccggggcaccggctggtgtcgcgtattaattttgacagtgggtatctggctgcttgtatggctgctggcagctcctgtacaggcggcatccttttcaaagactgcgccggtggtaaaggcgaagctggacgggagatcggtgacgttgagctggaacaggcgaagcggtctgaccggctatcaggtttatgggacaaatgcatccggcggcgcaaggaagctgctgcggaccttaaaagggacgggctgtgtgcggacagggctgtacagaggaaagacctattattatcgggtcagaggataccggaaggcgaagggaaagacacagtacacgagacttagcaaggtcgtgaaagtaaccgtaccaaagtccgagacgcaggaggccgcggcgacgtcgaaatccacgttgaaaaagcttctgcagacagcgctgaagccggtcgggtcgacgatgtatgtatggggcggaggctggaataaggcagataccggagccggggcagcggcaagaacgatcggtgtgagtccgaagtggaagcagttttttcagaagcagacctcgtcctatgattatcggacaacgaaatatcagatcgcgaatggtctggactgttccggttatgtgggctggtgtgtctacaatattctaaatacgacaaatggcaaggccggctacgtgatgcttgcgcagaagatggcgaagaattttgcatcgcggggctgggggagctatacggcgcgcggtgcagtgagaaattaccgcgccggggatattatgagctcgacctgtcaggactgcggccatgtctggatcgtggtcggctcgtgcagcgacggaagtgtggtgatgctccatgcgtcgccgccgggcgtacagctttccggaacaccgtcaaggaccggaagagcgaacagcgaagcagtgaagctggcgacctactatatgaaaaaatattttccggcatggtataagaaatatccgaattgtgcgaagggaagctcttacctgagccactatgcgcagatgcgctgggatcttaccgggaaaaaggtcatgagtgatccggacgggtaccggaataagagtgcgaaggcgattctgaaggatctgctcggagactgatcgttttagagatttagattaagaatgtttacagcacagaaaaaggagaagaaacgtgaataaacaagtagcagaagcaattgaacagtcagatatcgtgctcatcgggatcgggagagaatttaccgcgaaggttccggaaggaagcagggaggagtgtctggccctgtatgaggagagccgcttttatgcgaagcttccatccgatcatgcagtgattcaggcgtacaatgcgctgcgccggcagatcgggacgcgcccgtattttgccgtgacgttaaataccgatgatttgatttaccggtctgagcttgagccggagcagatcgtagctccgtgtggcagtataggtaaactgcagtgcagggagcatatcatcgaggcagcaccgatccgggagcggattttgcaggcctgggaagacctgcatggcgttgcgtccggggacaaagaaggttcatcggatagaaagcatacagagagacttcggcaggagcaggcagatcagaatgagacagcggattttggtacggccaaggcgttggtttcgaaatacgcagtctgcccgacctgtggtgcaccgctgaattttcacacgatcgccaacccggattatctggagaacggctatcttccgcagtgggagcattacaaaaagtggctgacggcgaccttgaataagaagctttgcattttggagcttggcgtggattttacatttccgcaggtcatccggttcccgtttgaaaagactgctttttataataagaaggcggtctttgtacgcgtaaacagccgcttcccgcagctggaggcagagctggcggccgagggacgggcgatttctcttgcagagtcgccggtggagatgttgttggagtgaggcaaaataccttttgacccttgtatcatcatcataaaattatacttgaaaaacatgctaagaatgtgtatagtgtaaatataaaaacgcatgcacgcaggaaataaagaaaaaatagataaaaacgcatgtaaaaaagaataaaaataataaacaataaacaaataaaaaagaacatcaagggaggtaactgtatggagagcagagcaacgaagatttactcaaacgtgaataaaaatgcgatcattcgtgtgattccggggcatttcgcgacgacgcattcgcatattaactattatgtggatatgacgatcatgaagtccagaaagagtgaggcagaggcagccgcttcggtgctggcgcggaaatacagtaccagtacgtatattgatacgattatctgtatggatgggtgtgaggtcattggtgcatatctggcggatgagctgacgaagtccgggatcatgtcgctgaaccagcatcagacgatgtacgttgtatccccggagatgaacccgggaggacagcttattttccgggacaatatgcagatgatgatccgtggaaagcattgcctgctgttgctcgcatccgcgacgaccggtcggacggtagcgcgtgcactggaatgtattcagtactacggcggtattatggaaggcgtatccgcgatcttcagtgcgagtgaccgtgtctgtgatatggatatcaactacattttcggcaaggatgatattccgaattatcagacctacgatgtggatcagtgcccgctctgtgcgaagaaggtgaaaattgatgcgatcgtaaacagctatgggtattcgcagctgtaaagtagctattcagttatggcatatcataaggagagacccgcttacgggaggattccttatgatcctgcaagcagcggagctagaccctgtcagcagagctgcagggatggattgcgaatgtccgctttactaagataagataaaaaaaggatctgccaagcagatccttttttacgtcaatatgtttgctgttgtccttgctcacacattttcgatctgccagtcgatcggctccagaccgtgttctttcagaaatttatttgcgcgactgaacggacggctgccgaagaagccacggtacgcagaaagcggacttggatgcggggattcgaggatcaggtgattcggattcgagagcatgctctttttcgtctgagcaggacggccccagagcaggaagacgatcggacgatcaatgtcatttaagatccggattgcggcgtcggtaaattcttcccagccaatatttttatgggagtttgcctgatgcgcacgcacggtgagcacggtgttcagaagcagtacaccctgatcggcccatttagtcaggcagccgttattcggaatgtagcagccacagtcctcgtgcagttcctgataaatgttgacaagggacggcgggatctgcacatccggcttgacggagaagcaaaggccgtgtgcctgcccttcctcgtggtacgggtcctgccctaggatcacgaccttgactctggagagcggtgtaaacgcgaaagcattgaaaatatcatcggcaggcggataaatcgtccgcgtgcggtattcttcgttgatggtcttataaagctttgcataatatggtttggagaactccggcttgagcggagccagccagtcattggaaatcggaggcatagcagtgtagtcctttctgaaggtgatgatgatacaagggtcaaaaggtcatgcgtttcatgcttgcatgaaaaagcatgacttattgacccgcaaaacaccgaaaagtagccatttttcgtagaaaaatgagcggatttgaggtgttttaggattgcgagagcatgaaatgcgaagcaatccgtgtatcatcatggtggtcaaaagcgaagcaatctgcagacatcagttgtgggtaaaaggtaaaaatctcctagattcgtaccgacacgcccttctcctgcagatacgttttcacttcccggatttcgagctctttataatggaagagagaggcggcgagtgcagcgtcggcacagccgtcagtcagtgcttcgtaaaagtgttcctttgtgccggcaccgccggaagcgatgaccgggacggaaacgtgtccggcgatcgtgcgggtcagttcaaggtcatagcctgactttgtaccgtcacagtccatgcttgtgagcaggatttcgccggctccgagtgcatcgcagcgttcggcccattcgacagcatcaatgccggtgtcaatccgaccgccgttgcggtagatattccagccggagccgtctgcacggcgtctggcgtcgatcgcaacgacgacacattggcgcccgaatttttctgccgcatcatggatcagcgacggattctggatcgcggcggagttgatcgagatcttgtctgcgccctcgcgcaggagtgtacggaagtcctcgacggtgcggataccgcctccgaccgtaaatgggataaagaccgtctctgcaacgcggcgtaccatatcgacgaccgtattccgggcatcagaggaagcggtgatatcgaggaagacgagctcatcggcacctgccgcgtcataggcggctgcgatctcgaccggatctccggcatcttgcagattgacgaagttgacgccctttacgacccgtccgttttttacatccagacatggaatgattcgtttcgtaaacatcagaactcctcctttcggatggataagaagtttttcaggatggcaaggccggtgctgctgcttttttccggatggaactggcagccgaatacgttgccctgctcgatagatgcgtggatgtgcgtgccatattcggttgtggcggtgacgatcacaggatcatccgcttttaaatagtaggaatgtacgaagtacacataggagtcttccggtattccggcaaaaaggcgtccatgaggattctctccgggctccctgtgataggagagagaattccagcccatatgcggaattttcagtccttcggtatccgggatacgcagaatttttccggagcagatgccgaggccctcgacacctggggtctcctcacttgatgcgaagagcagctgcagaccgaggcagataccgagaaacgggatatgggatgcggaggcctttcggatgacatcgacgagcccgtactggtgaaggcggttcatcgcgtcgccaaaggagccgacacccgggagaatgatatggtctgcggataaaatttcagccggatttcgtgtgatgacaggcgtctcaccaagcttttctagggctttggcaacgctgcgcagatttccggcatcgtaatcaatgattgcaagcataaggatattcctccctttaggttttaagtcaaagcggatattcgcaatccgctttgctacttgcttaattcggttaattaaagggaataccagtccggcattcccctataatttaccatattctctatatatggtcaaaagttatttgttcagattttttacagcggtcgagagcatcagcttgatgcggtttagctgattgacctcacttgcacccggatcgtagtcgatcgcgacgatgttggatgacggatactgtctgcgcagctccttgatgacgcccttcccgacaacgtggttcggcaggcaggcaaacggctgcgtgcagacgatgttgtttacgccggaatggatcagttcgagcatttctccggtcagaaaccagccttcaccggtctgattaccgcaggagacgatgtcggtcgccatctttgccagatcctcaatgtgggcaggcggatcaaaatgttcactttccgccagtgcctttgccgctgtaccgcgcagcttctccagaaatgcgattccgaagtttgcgatcgttgcggaactctttttcgtaccgaggtgctcggccttgaagttctggttgtaaaagcagtagagcaggaaatccatcaggtccggcacgactgcctgagcaccttcggattcgagcaggtcgaccagataattgtttgctgccggcagaaattttacgaggatctcgccgacgacgccgaccttcggcttcttctcatcggtgatcggaagcgtatcaaagtcatgtacgatctcgcggcagagctttttaaactcgcggtaagtcggctttccggatacaaatttacagcagcgctcctcccatttgcggtgcagctcatttgcggagccgggcaccttctcatacgggcgcatccggtagagacagcgcatgaaaagatcaccgaagacgatggcgaacatgccgcgctttaccagatagtagctgatcgagaagcccggattagactcgagtccgcttaagttgatcgagatgaccgggatctgctccatgccggcctttttcagcgcacggcggataaatccgacgtagtttgaggcacggcagccgccgcctgtctgggacattagaacagccgtgtggttgaggtcgtatttgccggagagcagtgcttccatgacctggccgacgaccatcaaagaagggtagcaggcatcattgttgacatatttcaatccgacatcgacagactttttattgtcgtttggcaggacgaccagattgtaatccgatgcgttgaatgccgcttcgagcattttaaaatgaatcggtgacatctgcgggcagagaatcgtgtatgtcttgcgcatttcctttgtaaagatgacgcgttcagtgcttgccggaacgatcttccgttcatcatgcgtgcgctccttgcgtacccggatcgcagagatcagagagcggacacggatgcgggccgcgcctaagttgttgacctcgtcgatcttcaggcaggtatagattttgtcggagttcgagagtatatcatttacctggtcggttgtaacagcgtcgagtccgcagccgaacgagttcagctggattagatccagatcctcgcgtgtttttacaaaattcgctgctgcatagagacggctgtggtacatccactggtcgaggacgatcagcggacgctcgaccggattcaggtttgagacagagtcctcggtgagcacggcaagaccataggaattaatcagctccgggatgccgtggttgatctcggcgtcaatatggtacgggcgtcctgcgagcacgatgccatgtcgtccggtctccttcagatactgtaaggtctcctgacctttttcgtacatcgccagtcttgtgtgagccagctcgtcccatcctgctttggctgctgcctctatttcggaagccgggatgtccggaaatgcctttttcagtccgcttgtcactgtatccagattcgtgaaagcgataaacgggttgtcgaagcggacatgttcggcgcgcaggctctcgacgttatttttgatattttccgcataggaggtgacgatcgggcagttgtagtggttgcctgcctccggaaactcggtgcgctcataagggatgcacgggtagaaaatgtatttgatgcctttttttacaagccactcgacgtgtccgtgtgcgagctttgccggatagcattccgattcactcgggatggattcgataccgagctcgtagatttttcgggtagaagccggggagagtacgacccgatacttcaggtctgtaaagaagcggaaccagaacggataattctcgtacatgttcagtacacgcgggataccgacgatgccgcgtgtcgcctcgtcttccgggagcggttcataggagaagaggagcttgtttttaaattcaaacaggttcggcacgtggtccttgttgcgctcttttccgatgccgcgctcacagcggttgccgctgataaactgacgtccgccggagaagcggttgatggtcagacggcactgattggtacagcccttgcattttgtcatggtggtcgtaaaggtcaacgcattgatgcggtcgatcgagagcattgttgtcttatctccggcatggaaacgctcccgcgctacaagcgccgcaccgaaggcacccatgataccggcgatgtccgggcggatcgcctcgcagtttgcgatgcgttcgaagctgcgcaggacggcatcattgtaaaaggtaccgccctgtacgacgatatgccggccaagctgtgtcgcatcggagaccttgattaccttatataatgcatttttgataacggaataggcaaggccggctgagatatcggagacttcagcaccttccttttgcgcctgctttacctttgaattcataaatacggtacagcgggtaccgagatcgatcgggtgctttgcaaagagcgctgcctttgcaaaattctgaacggaataattcagggatttggcaaaggtttcgatgaaggaaccgcagccggacgagcaggcctcattcagctggacgctgtcaacggtgccgtttttgatcttgatgcatttcatgtcctgaccgccgatgtcgagaatgcagtctacctccggatcaaagaaggaagcggcgtagtagtgcgatacggtctcgacctcgccctcgtcgagcatgagtgccgatttgatcagtgcctcgccgtagccggtcgagcaggaccatgcaatcgttgcggtatcaggaagcttgctgtaaatatcctgcacggcatggatcgcggtgcgcagcgggcttccgttgttgttgctgtagaacgaatacagaagggaaccgtcctcaccgacgagcgcagccttcgtggtcgtcgatccggcatcaatgccgagaaaacagttgcccttgtacgtgccaagcggtgccgtctttacctgattgcggctctgacgctgcaagaagaggtcatagtcctcctccgtgcgaaagagcggttccatacgggccacctcgaattccaggtggatcggctttgaaagacgctcctttaaatcggaaagtgtcgtcaccgtcgcctcttttgcgttcagggcagagccgatcgctgcgaacaggtgcgagttttccgggatgagcgcatgctcctcgtcgagctttaaggtgcggataaatgcttcgcgcagctcggagaggaaatgcagcggaccgccgagaaaggccacatgaccacggatcggtttaccgcaggcgagaccggagattgtctggttgacaacagcctggaaaatagaggcagaaagatcctccttcgtcgcaccttcgttgatcagcggctggatatcagattttgcaaatacgccgcagcgggctgcgatggagtagagcgactgataattcttcgcatactcatttaatccggtggcatccgtctgtaaaagagaagccatctggtcgatgaaagagcccgtgccgcctgcgcaaatgccgttcatacgctgttcgacgttgccgccttcgaagtagatgatcttggcgtcttcgccgccgagctcaatcgcgacatcggtctgcgggagaaagtgctccagagaggatgcgacggcgatgacctcctgcacaaacgggatttccagatgattggcaagcgtcagtccgccggaaccggtgatgaccggggagacggaaagctcaccgagctgctctgttgcttctgcgatcagagcagagagtgtttcctgaatatttgcataatgacgccggtaatccgaaaaaaggagctccttatcggggctcagaacggcgaccttgacggtcgtggaaccaatgtcaatgccaagggtatgtattgctgtagatgacatataagtaatagcagggattccctgcgcctccttttatatactgtgttctgcgacgttcagtgcgcaggccgcagacacgtttgcttcgcaaactatccgctcactgcgtgagctacagtctgtctttgcattttgctgctgcactgaactggtacgtggggattatacgacattttttttgaaagatcaaattacttgcattctgttttgtttccatatatactaatagttcaggaatctgtcctttgaaaaaaaggctggaagccggaattggagcgccgatcaaagtgattatgaacaaattcatggtaaaatctggaacaatgatcggaaaactgacgattttttagcagaatcttaaaagaaaatatttttgttaaaaaaacgttaagaacagacgggcggcgggagatcagacaggcaaaggccggagctgaggagaagatgcggccgcacggaggaggagactatggcagagtataaaatactgaaaacagaagggcgtgcaaaacgcgccgaatttaagaccgtacacggtacagtgcagacaccggtgtttatgaatgtcggtacggtagctgcgatcaaaggcgcagtggcaacgacggatttaaaggagatcggcacacagatcgagctgtcgaatacctatcatttgcatgtacgtccaggcgatgaggtcgtaaagaagcttggcggactgcaccgctttatgaactgggatcgtccgatcctgacggattccggcggatttcaggtattttcccttgcgagtcttcggaaaatcaaggaggagggagtatacttccagtctcacattgacggacgtaagattttcatgggaccggaagagagtatgcagattcagtccaatctgggctccacgatcgcgatggcatttgatgagtgtccgtcaagcgtggcggaccgcacatatgtccagcggtctgtcgagcgcacgacacgctggctggcgcgctgtaagacggagatggcacggctgaacagccttgaggatacggtgaacccgcatcagctgctgttcggaatcaatcagggtgcgatttattcggatatccgtatcgagcacgcaaagcagatccgggagatggatctggatggctacgcagtcggcggattggcagtcggtgagacacatgaggagatgtatcatattctggatgaggtcgttccgtatcttccgcaggagaagccggtctatctgatgggtgtcggcacaccgctgaatattctggaggccgtcgaccgtggcgtggatttctttgactgcgtttatccgtccagaaacggccgtcacggacatgtctatacaaaggacggcaagctgaacctctttaatgccaaatatgagctggatgaccgtccgatcgaggagggatgtcagtgtccggcctgccgccattacagcagggcatatattcgccacctgctcaaggcgaaggagatgctcggtatgcgtctgtgcgtcctgcataatctttatttctacaatcatctcatggaggacatccgcgatgcgatcgacgaaggccgctatcaggagttcaaaaaggagcgtgtggaccggtatacacaaggagcgtaggcaggcaaccagagaaaagctcggaaacgggccagaaattacaaaaaaagacttgcccaatgaaaacagattgtgtattatagtagggatacgtgcagaaacaaggaggaactgaagcatgatgaatcttttaacagagtctgctgcatcggcaggcggtggtattgcattgatggtgatctacatcgtgatcattggtgctgcgatgtactttttcgcaatccgtcctcagaagaaggaacagaggagaatgaccgcgatgctttctgcccttgagatcggagataccgttgtaacaacgagcggtttttatggtgtggtgatcgacatcacggatgaagactgtattgtagagttcggaagcaataagaactgccgaattccgatgaaaaagagcgcgatcgccgaggtggagaagccgggcgaggcataaatgcacaggtgaagaatgccgggagctgatgagccccggcgtttttctgtttgtgaggaataaatacagcccctgtcaaataaattttccagtgtctgtcttttcacgtttgctgctgttcaaaactttaccacatgaaattgctaaaatcagttgaaatctttcggaaaatgctttatgatagtgagaaagcttttggcaggcgtgacggaaatccgtccgtgtggcagaaacggttggctggtgtagagatacagcccgatcagaaagcaggctgcaaggatgcagtattcagaagaaaatgcggcaggcttctgacagaatcagagggctgccatttttaatcgaatcaagcagcatctgaatgaacatgttctggtgaatgctcggctgtatgggatggcaaaatcagaaagacagaggcgccggcagaaaggatgacagaagatgaactataaaattggagtgattccgggtgacggaatcggaccggagattgtaaaggaagcgcgccgcgtgctggatacggctgctgaaaaatatggattttccctggagtataccgagcttctgatgggcggtgcgtccatcgatgtgcacggaataccgcttacggatgagacgatcgcggaggcaaagacaaaggatgccgtgctgatgggctccatcggcggtgatgcgaagacttctccgtggtatcagcttccgccggaaaagcgtccggaggcaggacttctgaagctgcgcaagtctctgaacctgtttgcaaatcttcgtccggcgtatctgtatgaggagctcaaggcggcgtgcccgctgcgcgatgagatcatcggggacggcttcgatatgctgatcatgcgtgagctgaccggtgggctgtatttcggagcgcgcagaacagtcgtagaacatggtgtgcgtgaggcgatggatacactcgtttataatgaaaatgaaattcggcgcattgcgataaagggatttgatattgcgcggaagcgccgcaaaaaagtgtgcagtgttgataaggcaaacgtccttgattcctcaagattgtggagaagtgtcgttgaggatgtggcaaaggattatccggatgttgagctgtcccatatgctcgtcgacaactgcgccatgcagcttgtaaagaatccggcacagtttgatgtgatcctgaccgagaacatgttcggcgatattctctccgatgaggcgagtatggtgaccggatcgatcggaatgctctcgtccgcttccttaaatgagacgaagttcggactgtatgagccgagccacggatcggcaccggacattgcaggacagaatatcgcaaacccgatcgcgacgatcctctctgcggcaatgctgctgcgctactcactggatcaggatgctgccgcagacgcgattgaggcagcggtcagacaggtattaaaggatggctaccgcacggtggacatcatgtccgagggctgcacgcaggttggcaccgaggagatgggtgcacggatcgcagagcggatccggtagtaccgcgttcataaacaggcagcaaaagaggattgtgaatgtccgctttgctttcagaaatatgatccggggcattggctacaggtaaaaggctgtggtcagatccggagagaggatagtattatacaggaggagtaccatattatgaaaagtgatgcagtaaaaaaaggaattcagcaggctccgcaccggtcattgttcaatgcgcttgggctgaccgaggaagagatgaagcgtccgctgatcggtattgtcaattcttataacgagatcgtaccgggccatatgaatctggataagatcacagaggctgtcaagatgggcgttgccatggcaggcggcgtaccacgtgtatttccggcgattgcggtttgtgacggtatcgcaatgggacatgtcggcatgaagtattcgctcgtgacccgtgacttgattgcggattcgacggagtgtatggcgattgcacatcagtttgatgcgcttgtcatgatcccgaactgtgacaaaaatgtcccgggacttttgatggcagcggcacggttgaatattcctactattttcgtcagcggcggcccgatgctggcaggccatgtgcacggaagaaagcgcagcctttcctctatgtttgaggcagtcggtgagcatgctgcaggcaagatgagcgatgaagaggtcgtagaatacgagaacaaggtctgcccaacctgtggatcctgctccggtatgtacacggcaaacagcatgaactgcctgaccgaagtactcggcatgggcttgaagggcaacggcacgatcccggctgtttactctgagcgtatccgtctggcaaagatggccggtatgcagattatggagcttttgaagaaaaatatccgtccgcgtgacatcatgacaaaggaagcatttatgaacgccctgactgtcgacatggcgcttggctgttcgacaaacagtatgctgcatcttcctgcaatcgcacatgaggcaggtgtggagctgaatgtggacatcgcaaatgagatcagcgcgcgtaccccgaatgtatgccatctggctccggcaggtccgacctacatcgaggatctcaatgaggcaggcggcgtatacgcagtcatgaacgaactgtctgagaagaatctgctgaacctggactgcatgaccgtcaccggaaagaccgttggcgaaaatatcaggggctgcaagaacctgaatccggaagtcatccgtccgcttgataatccgtacagcacgaccggcggtcttgcaattctgaagggcaatctggcaccggattccggagtcgtaaagcgttccgcagtcgttccggagatgatggtgcatgagggaccggcaagagtatttgactgcgaagaggatgcgatagaagcgattctcggtggcaagatccatccgggagatgtcgtagtcatccgctatgagggaccgaagggcggtccgggcatgcgtgagatgctcaatccgacctcagcgattgcaggcatgggacttggcagctcggtggcactgatcacagacggacgttttagcggtgcatcccgcggtgcttcgatcggacatgtatctccggaggcagcggtcggcggcccgatcgcactcgtcgaggaaggtgatattatcaagatcaacattccggagtgcacgttgaatctggatgtcagcgacgaagagctggcgaagcgcagaagcaaatggcagccgagagagccgaagatcacgaccggctatctggcacgctatgcatcgcttgtcacatccggcaaccgtggagcgatccttgaggttccgggaaaagagaaataagagaaaggatatacgccaatgaaactgacaggatcagaaattgttattgaatgtttgaaagaacagggtgtggataccgtcttcggatatccgggcggagcgattctgaacatttatgatgaattatataaacacagcagtgaaattcaccata

SEQ ID NO: 461 - DNA, 32759 bp, Unknown
  16S sequences of unknown bacteria
ctggtaaatagtccataattgattctcccttcatttattttattttaatctcattcacgaatattatcaagcattttctcatcattttgtcatccattttatattctcacccccaccaattatccatatttgttcttcaacaccatccctccaacaggaacatcattgaacatatatgttcggggcaaggcaaaagaaaaagaccaacagcagcacttcaaattactaccattggtcttaaaacccttaatttctaggcatttctgcctttgcttattttaccattgacatcaatacaaccgtctcaacatgccccgtaaacggaaacatatcatatccccagcacccttccgcctggtatctgtgttttttgagccatgccacatctcttgcgagtgtttccgggttgcaggaaatgtagacgatgcggtccggtgcgaggcggacgacggaggtgaggaaggcttcatcgcttcctgcccgcggcggatccataaacacgacatctgcgtgctcaccggcctccgccatctcggtcatgaagaccccggcatcattctggtagaaggtaatgttttctgtctggttcatttttgcatttcggttcgcgtcacgcacggcatccggattcagttccacgccaatgacctcgccagccttctgtgctgccaccagtccaatcgttccgatgccgcagtaggcgtcgatcacacgctcttttccggtcagatttgccagttcgattgcttttccgtagaggaactcagtctggactgaattgatctgataaaaggatttcggagaaatgcggaatcttctgccgcacagctcgtcctcgatgtagccttttccatagagcacggtttctttttctccgagcaccatgctcgtcttcttgtcgttgacgttcaacacgatcgacgtgatctccgggtgcagctttaagagtgccttgacgaaattatttttggatggaagaatcggagaaccaagcaccagtaccacgagcacctgattcgtcttatggccgcagcggatcagcgcatggcggaacagaccgtatcccgtgtcctcgttatacgttttaatcttaaaggatttcaggagctggcggatatcgcggatgatcgcgtctgctgtctgattttcaagcagacactcatcaacctttacgacgttgtgcgttccctcctcgtaaatgccggaaatgatctctccatcgcgcctgtgggtaaagacagcgtgtaccttgttgcggtaatgcagcggatccttcatcccggtgatcgcatgcaccgggcagagcggcttcatcagctttgagagctgtttctgcttccaggccagctgctcctcatacgtcagatgcaggaactgacagccgccgcacttcttttccaccggacagatctgccccggaatctttttgcggtgcaaagattcagtttgcgataccgctgctgttcccgcctgtgatgaacgcttccggcctgcagcttcattccgtttttctgtccggctgcttctttcacggtctctttcttctcctctgcttccacgtttcataacggccttaccggataccggaaatctttcttctttcctcccggattgtttccgcccctgatactctcgctctgttttcgccatttctttttcctcgcttccatctattgtaacacgcatatccatttcgtcttccactgtctgtatttttgcagcccgtgacggctcgtcatgccaccggctgcttttactttatatctgcaaaaatatcttttttcttgttctccgtccgcagcactccttcataattaaatgccgggataaagctctccttcgcagtgccgccctcctgataaaatccattcgtcacaccgagatctgccgcatagtccagccatctccggtactcacgcttcgtcactctccggttcaaaagcggatcttcaaacgtttcctgcatcggcgtatactgattcatcatactgatataaatctgatcaccatacgtctcatagaggtatttcacgacgtgctttgcctcccggacatggcccgggagcagaagatgacgcacgatcaccccccgcagcatccgtccttcttcgtcaaactccggtgtcggctgctgacgcaccatttccgcgatcgcttctgtcgcgtacttcggataatcaggtgcttttgaataacgtcccgccagttcggaatccagatatttaaggtccggcagataaatatcgaccagaccctccagcatttttattgtttcctctttttcgtatccgctgctgttgtagacaaccggaatatggaggccttttcttctggccgcttccagcgactccttcacctgcactgcgtaatgtccggccgtcacgagattgatgttgttcgctccctgtccctgcagttccagaaaaatttcggtcagccgatccccggaaatcacaagccctgcttttcctcctgaaatatcccggttctgacagaaaacgcagcccaggctgcagcctgaaaaaaagaccgctccggagccttcctttccggaaatgcacggttcctcccacatatgaagcgcggcgcgtgccaccctgatctgattatccacatggcagcgccccatgcccttacttctgtcagcgccgcagctgcgcgggcagaggcggcacgctgttgaatcattttcatattttgtcaattctgttcttctctcttttctctgtttcagtttcctatattggctatgaccctgcaaagtccggccgggcaatattccaacgtctatgcctgactacactttaaccgagtcaagcaagtcccctgtaagcagtgggtggggacttgcttgtatcagaggagtggtacaagccactcctgataagctgcgaagcagctactcggttatgaaatatcataaggaatggatcattcccgctccggcagctgcgccaggataatcgccgcaaacatcagcacacagcctccgatttccctgtggcttaggctctgtccgagcaaaacccagcctgccaggacggaaaccaccgactcaaggctcaggatcaaagatgccaccgtcggattcatacccttctgtccgatgatctgcaatgtatagccaaccgcacaggacatcactcctgcataagtgatcggaagccacgcctgaagcatcgcgtgaaagtccacctgctccgtcagcagcattccgacagcggacagcagcccgcatacgaaaaactggatgcaggacatccgcacaccttccactttcggtgaaaaataatcgataatcaaaatatgtatcgcaaaggcaaaagcacacagcagcagaagcacatcgccaaaattgacggaaatcccgtctgtcatgcacaaaagatacagtcccgccactgcaagcgcaacaccgcaccagacgcgcagccccgctctttttttcagaaaaataccaagcaccggcaccagtacgatatacatcgccgtgataaagcctgccttgccgacgcttgtatactgaattccaaactgttgcagattacttgcaataaaaagcgcggcgccgcagcagatgccgccaaatatcagcgtcttccccgtctccggctttgcttctgataaaacattatttttcttttttccgttcactttatccagcaaaaacatgcatggtatcagcaccagcgcacccagaatgcaccgtgcaaaattgaacgtgaacggcccgacataatccattccaacgctctgcgccacaaacgcaacgccccagacgactgctgtcgtgagcagaaggaggggatttctaattgatacttttttcataattctccctctcctttgcatcaagatattcaccgagcagcttcaatcctctctcgttcacacaaaaatccggatctccgctcctggctgcctgcagtaccgtttcgtacggcatccactttaccgcatctacttcttcctcctgaagcttcagcgcagccgcgtccaccggctttcggtatacgtaaaccgctgaaatttcccggtcgtgaaatggcctgccgtcaaatttcgccaaaatatcgccgctgtcgaagcgtcctacatactccagttcttccggggcagccacaattccaagctcctcggaaagttcccggagagcagactccagataatcatctccggcctttatatgaccagccgacgatacatcatagcagcccgggaaggaatttttccgcaggctccgtttctgcatcagaagctcatagcgtccttcactctctgccaccgattgctcacgcacaacccatatgtgcgcggtgcggtgcatcagccctgccgtgtgcgccaccgaccgctcggtgacttttccggtcacggctcccgtctcatcgcagacatcaaacagttccatttcttttccgttcagccatgcgcccgtcagcacatcgccgcagtacatcagcttcatcgaaaagaacggggcattttcagcgagcagcttcaggaagattttgtcgccctcccagaggttcagcttcgtcacctccgacttcggcacccactcaagcagcccttcgttacagtccgtcagttcgccctcaaaaccgtccgctgtataaagacacatatactccggcggccagccctctgccacaaaggttacgattccgcggaatttccaggaagtcagccgaagtccgctttcctcatacgcttcacgcagcaggcattcttccggactctcgccttcctcaaaatggccgccgattccaatccatttgtctttgtttacatcattttttttgctgacacggtgcagcatcagatagctgtcgccgcgctccacatagcacagtgttgtaagcggagatctcattctttcacctcatcgtccagcgcaaacatctcatgcagaatgcgttttcctgtctccgtctcaaagactttctcatccgcattgcgcatcgcatgacggctcgactcattttcaaacagatttaccagaaaatccgcttctaccaaaatccggtaatccagcccgtcaataccactatatgtatggtgatgacccaccagataacagatcctccggatcgcatctcccggataaccgacctcggtcagcattttctccgcgaccgccggtccttccttctcctgaagcttaccgctgcagcttccatatttttcttctgcgacacggattccaatatcgtgtaccagcgccgctgcccgcaggatctccatcttctcttcggagagtttttccgcctctccgatcatatctgcaaatgcatataccttcataaaatgctggatacgcgccggactgccgttttcgtaggcgatcatgcgctcttttaatttcagttctctcgtcatttttccaactcctctttcgtccaaataatatttgcaaccaatccatatccatcttacggtacaggcacttctgccactttggtactggccttggccgcagcaatgcatcaggacctcatctcttcccggattttccggctctcccccatcagcacttcacgcctgttttgagacggctcgtccagcacaagctgaaggagttgctcaagcatcgctccaagctgcggtcccggagccattccgtccgcgatcaggtcttttccggtaaccgccagtcccttcagtgacatgcagtcgccatgtgctttaatatgcgcccagatccgctccagttcccttaaataatcaagctttgcagggatcacatccgggtggtgtgccatgatatccgcccgttttacaagcagaaatgaatcaaactgatccggcccgatctgccatgccgcccgtctcacctcccgtccgctgagctgcggatacagggaatggtttttaaccaggttgcacacctgatacagcgtatcgttgtcaaatttcaaccgtttcatgatcgtttttgttatgaccgcactgtaagcggcatggccgcggaaatgatcctttccatcctcgtctgtctcgaacacatccggttttcccatgtcatgaaacagcatcgtcagacgcagcaccttatccgacggaatgctgcgcagcgcgaccagcgtatgttcccccgtcgtataaatgtggtgcggattgttctggcgctgtgccatgatccggtcaaactccggcataatgacagcggtaatccccgtctcatacgccatcttaaaccagtgcggacgcggcgaagtgaggagcttcaccagttccgtctgaatccgctccgcactgatattggcaagatttcccgacattccaaggatggcattcttcgtatcatctgccagtgtaaatccaagctgtgctgcgaaccgcacggcacgcatcatgcgcagcgcatcctcaccaaagcgctcctttgcgtctcccacacagcggatggtctttttttcaatatctgcaagcccgccaaattcatccaccagtcccgtttccggcgaatacgccatcgcattgatcgtaaaatctctgcgcctcagatcctccgtcaggcttctggtaaaaatcacgtttttcggatgacggctgtcctcataatcgccgtcgatccgatatgtcgtcacctcaaagccttcttttccatccataactgtcacggttccgtgctcgattccagtatcgatcgtgcgcggaaataacgactttacttcctgcggcgatgctgatgtcgtaatatcccagtctcccggttcccgcccaagaatcgaatcacgcacacagccccctactacgtatgcctcatatccgtttccatgcagaacctcaagaattttttccgctttctgcggaattttaatgtatatcatctgtccgtcctttctgccaaacgcttcggttttcattcactcaggtctatgataacacagccccacacccctgaaaagttaaaagtgaaaattctatgacttccccaaaagcggtttacaataacttgtccaaaatggtataattcccgtagtattgattatttcgtttcagaaaggattaacagctatgaaaaaaaaatatctcatttccgcacttggactggcagcagcactgatgctctccggatgcggcggtgacaaaaaagaaactgaaacctcggctcaggaaaagcagactgctgcaggcacggaagcttcctctgacatttccggcagcaccggcgaaactgctgatgatacagatacagccgatatcgtcagcgaagagaccgaaaccgagacagaagccaccatcgctccaatcaccccttctgattaccttgtaaaggatgcctccaaatatgtaacgctcggcaattatgacggtcttgaaatcgttcagtatacgtacgatgtgacggatgacatggtacagcagcagatcgacatggatctgcagagcgccggcacagaggaagacatcgacacaccgtctgcttccggtgatattatctatgtctcactgaaggccgtggcagaaaatgctgattccgaaaatacttccgaagccaccacagaagctgccttggaaagctcttccgaaaccaccacagaagctgcctccaaaagttcttccgaggtctccactgaagctgcttctgaaaacacttcggacctcctgtccgcagatgacacttccgacgaatcggatgatgcggaaaacacctacttcacgattggcaatgaagaatacggcgctgattttgacaaagagctgatcggcctttctaccggagatacgaagcagttctctgttactttttctgatgatgactgggtaaatgaagactggatcggacataccgttgattttacagtcaccgtcaacggtgtaacccgcgtaactgtcccggaatacaacgatgatttcattacaaattatacggattactccagcaaagaagagtatgaggcggctgtccgcaaaaaccttgaggatcagtacaccgacatcagttactcggatgccatcgagtccctgttccaggcagcactcgatgccacaaccttcaatggctatccgcaggatctctacaatacatgcaaggaagaatccatctccttctaccgcatgtttgccggagatgacggtacaagcgatgcagatattctcgccgcattcggtatttcagaggaagatattgactccgaagtacttaccgcggtcaaccagcgtcttctgatcagcgcttactgtgaggcaaacaacatcaccctgaccgaagaagattatctcaattaccttgaaaacaacgcagctgactacggtgaggaaagcgccgcttcctttgaagaagattacggacgtgattctcttgtctggtcactctatcagtcgaaggtagctgatctgctttataattccgcaaaaatcacaaaaacttcctattctgatgatctgttctcggatgatctctccgatctgcagtttggcaccgaatcagacacggaagcagcttcagacgcagaaacctccgaaacacttgccgaaggcgatgatctatccatggaactggagactttctcctccgaagatgtagttgatctgtccgaatcatctgccactgaataagtagggatttttcagtattttacttgacaccccctcagtttgtgctataatgggattgcataaagattgactggttcattagtttcactcactattatagaccatgaaataaacctttataatctataatagtgagtgaaattttttgcccggtcacttgtaaaaggttaggaggtaccatcatgaacaagggtacagtaaagtggttcaatgcagaaaaaggctatggttttattacaggagagaacggatctgatgtattcgtacatttttctgcaatccagggagaaggcttcaaaactctcgaagaaggacaggcagtttcttatgatttgacagaaggcgctcgcggaatgcaggcagctaatgtagtaaagctttaagataccgtatgtcgaaagcggggctggattttccggctccgcttttcttgttgtcagtttgtctttctttgcagcaatatttgacccaaattgctgcaaaaccgctgcccgtttctataatttcatgctgatctgtaattatcctgtcaccatctggctgctgtgcagcttacgcggaatataacaaataaagtaactgttcagaaccacctccaaaatgctgcgcatttcgtcggtgtggcgtatccgccaaatagatttccatgtaaaagtgttcattcatgcaagcatgattcacacttttgcatgaaaatctgcctggctctgaacagttaccaaataaatttttctacctatgaacagacgataccgaaaaaaacgtaattatccacattatacacggtctgcccgtgggaaacgccgcagactgctccgcctgatccgccgctacgttctgcctgtgcttcttcttttgtggatcttaacttcactctttccggcgcagacacaattgcttttggatgctgccgatacatatgtcctctctccggtctgtgaatcgatcgtggagccgtatctgcttacaccgcttgatgagcacgttctgcggcctctaaatgaacacattctgacaccaatcgatgatacggtcggcgctccgcttcgcaaatggatcttcacacctctttcggaacatgtgctgacccccgtctggaacactgtttccagtgcactcaccgagcatgtaatcgctccattccagacagaggttattcaacctctcaccgctgatgtccatactgcccttgaggattatttttatacgccgcttggtctttccccaccgtggaatccgaatcccgattcagacagcggtgacaatgattccaaactcacagccgataccgtaaaaggctctgacgattttgaagtccattacctcgatgtcgggcagggactgtcggttcttgttcgctccggtgatcatgcactcctctatgacggcggtgaccgcagtcactcttcgttcgttgttgcctatctgaagcgtcaggggatcacaaaactcgactacctgattgcctcgcactatgacgcagaccatttgagcggactgatcggtgtgctgcacaccacgcaggtcgatacagtactcggcccggattatgtgcacacttccaaaacgtatacatcctttcaaaatgcggtgactgattccgggaataccgtctgccacccgacagccggaagtgactatcagcttggggatgcatattttaccgtagtcggcccgatccggtcgtacacggattccaacaacaattccattgcaatccgcattgtaaacggcgataacagctttctgctgaccggtgatgccgaaatgcagagcgaggaagatatgtgccgcagtggtctgaacctctacagcgatgttatctgccccggccatcacggctcctccaacgccactacaagcctgcttctcgcctgtacgcagcccatctgggctgtcatcagtgtgggtgccggaaatgactacggacatccgcaccaggaaacgcttcaaagacttgcggacgcaggcgttaaggtgctgcggacggatgagcatgggacgattgtggcgaggtcagatggacaaaatattacgtgggaaacggagcaataaaacaggaaacaaaaggcttaagctttaaagcttagggagttaaagcttaaagcttaaagtttgatgcttactccggacggaggcttccgctcgccctttccacaccctaaaaatagcaggctcaaaatcgcctgctatttctaatcctgataagtattctcttttattttcatcttcaggatacccctgcatctcactcagcggccagcatcacgatgttctcgatctcctggtctccgtccttaatgtaaccgcaggcctgaagccccgcacgcacgatatcgttccacatccccggtgtaaagctgcacaccgtatgatcgctgaattcgattcggcaggactggtttttgcagccttcctcacaggaaatgcgatacatattctttctgctgatcgcaccgatccgttccagcatattcaccatgcggtaaaccgttgccatcccgatgcctggatccttcatggatgccttgtaataaatctccttgcagcaggagcagtcttcctccagaatgatgtccagcaaagtcagacgctgctttgtgattctgcatccctgatccttcagctgcctcaagatctgctctttctgcatctttgttgtctggtagcgtacctcttccggagcggtttcttttctgtgatccgtcctgtgctcagtccgataccgttcttttgccgactgcatctgtataatctcacttcccatacgcatcacctcagtggcaacggccgccacagtttttacactcaccgccgcactggattgattttccgttctttttgtcctttaccatactgcgaaccgccagtcctacaatgcctgccagtacgagtcctactattacagatcccattctgccacctccttattttattcccgcgagcaacgagccaagtagccatgcttgcatggagatttggcgactgccgcgaggatcaaatatcccgttgcttgcagcggggtatttgattacttccagttcgcgtttccatagaaccataacacacacggccggtaccggtgcgctttcgcggaaccgtcaccggccgtgcaaattacaggatgaatcttttattgctcaattattttgcttttgatacttttacatccatatccagtgtctttgcctccttgtacggacgaaacagcagataaatgaatgctgcaacgattgcaaatgcaacaatcgtccatacactgaagccagcgcctgtaaccagcataccgattcttgctacgcaaagagatacgaggtatgcaagaccacactgatatccgattgcgatccagaaccacttcgtgttgttcatctcacgtttgattgcacccattgctgcgaagcacggtgcacacagaaggttgaatgccatgaagctgtatccggtaattgcagtaaacttggaagccatctctgcgtatacgcttccgtctccgccgccgtacagaataccaagtgtaccaacgatattctcttttgcaacaaggcctgtgatagaagccactgctgcctgccagttgccccagccctgcgggatgaacagccagctgattgcgttaccgatcattgccaggatgctgtagtcgatctgatcctcagaaagcatctggaatttgccatctacaactccgaagtaagttgcaaaccagattacgatggtggagcacaggatgatggtgcctgccttcttgatgaaggaccagccacgctcccacatgctgcgcagtacgcttccaaccgtcggaaggtggtaagccgggagctccataacgaacggagccggatcgcctgcaaagagctttgtcttcttcaggatgataccggagcagatgattgctgcgataccaaggaagtatgcggacggtgctacccaggaagcgccgccgaagatcgcacctgcgatcattgcgataaacggaaccttcgcaccacacgggatgaaagtggtggtcataattgtcatcttacggtcatggtcattctcgatggtacgggaagccatgatacccgggataccgcatccactgccgatcagcatcgggatgaaggattttccggaaaggccgaacttacggaagatacggtccatgataaaggcaacacgtgccatgtagccgcatccctcaaggaatgcaaggaagataaacaggatcaggatctgcggaacgaatccaagtacggcgccgacaccggctacgataccatccatgatcagtccgtgcagccatccgtctgttacaccggctgcgccaagtacgttctcaagaagagccggaatacccggaatccagataccgtagtcagccggatccggagcttcgcagttccatttttcaaggactgctgctgcatctgcaaaatcagcacctgttgcaattgcttcttcttctgcaagtgtctcttcatcttcgattgtgtaagttacttctgcgtctgcagccacggtcggagcgaactctttcagtgctgcggttgctgcgtctgcatcaaagtcatcagactctgcgtcaagcatttctaccaggctgtcatctccggcgtcctctgcaaatgcatttacaattgcagatgcatcatcgaactcgcctgcatcgccatcgtaagcgcttctgccgataccggccagataccaaccatcgccgaatacaccgtcatttgcccagtctgttgcgataccgccgactgttgttacagatacataatatacgatatacatcaccagtgcgaagatcgggagtgccagccagcggttggtcacgatccggtcgatcttgtctgatgtggtcagtttctcttttgtctgtttcttagtcacacactgtccgataatggaagatatgtaaacgtaacgctcgtttgtaatgatactctctgtatcatcgtcaaacttgtcttccagctctttgatctgagcagatacatccggcacgtttgtcatctgtgtctggatcttgtcatccttctccagaagcttgatcgcgaagaaacgtttctgctctgccggtacggaggtaagctttgcagcaacctcatcgattacggactcaacctccggtgcaaattcatgtacggagttcataacacctttcttctgtgcaagtgctacggcacgctcagcagcctttgtgataccggtgcccttcagtgcggagatctcaactacctcacatcccagctttttgctcagcttgtcgatgtagatcttatctccggtcttctctacgatatccatcatgttgatcgccatgattaccggaataccaagttccaggatctgggttgacagataaaggttacgctcgatgtttgtaccatcaatgatattgatgatcgcatccggacgttcagaaatcagatagtttcttgctacgacttcctccagtgtatacggagaaagagaatagatacccggaagatccatgatgatgacatctttatgtcctttcagtttaccttccttcttctcaaccgtaactccaggccagtttcctacaaactggtttgatccggtcagtgcgttaaacagtgttgtttttccgcagttcggatttccggccagtgcaattttgatagccatttttcatttccctcttttcttaaactttttcctgtcctgcacgaaatatgcatgcttacttttatttgccttatgaaacataaattactgcaagcttccgcaagtactcttcatcttgcttttattagcatttgctaaccatcaggcaaaaaaaattactctacctcgatcatttccgcatctgcttttcgcaaagacagttcgtatcctctcacggtaacttctaccggatcgccgagcggtgctacttttcttacaaacaccggaacgcccttggtaatccccatatccatgatacgtctcttaaccggaccttcgccatgcagtctcttgaccgtgacagtctgcccacaggcaacttctctcaatgtcttcatgtctctctccttcttttctttttggctgtatcatccgcataaaccagaatctgcggcagcttacaccatgatcttgttcgccatatcttttccaatagcgactctggagtccttgatatttacgattatgtttccttcaacctgagaaatcaccgtaaccgcagcccctactacaaagccaagattctccaggaatctacgggtatcttctttcccgcctacttttttgatgatattttcttcaccagcattcgccattgtgagcggcatcatcgtgtcctccttctttcttattgatttgttttttcaattcttcgttagtgtatgctaattttcattagatgtcaataagtttttttgaaaaactttctcaataagcggacagtaagattcaggcgaaccggccggcccgcctgaacgtatcattctggcattctttctgaacttgattttcagcctgatgtactgcctgtctgatcctccttctggtctttcagaacaccatttcgggctgtttttctttatgcgagagattttccaagctcctggcacgctgcctttgcatcgtcatccggttcttcctggcagattacactctcatgtgtgagcactgcgccctcatttttgcaattctcttcccaggtacgcatccactcaccgtcaccccagccataagagccaaacagtgcaatctttttaccgccaagccttgagatgcaggcgctgaacatcggctcaaactctgtctcttccagctcttctgcgcccattgccggacagccaaatgcgatcgcatcatactcatccatcttgtctgcggaaaaatcatccggagtcattacagagacctctgcccctgctgcctttgcgccctctgcaacctcatttgccattgcctctgtattgcctgtgctgctccagtaaactactgctactttgctcattgttttgtccttctttcttttttgatatgtaactgctcagaaacagccattttttcataaaacagctgtaaaatgcctataaaacagttactatatatggcatgcgatatacgggcaggttttctgctccgccatcgctggttatgcagctacggtgagctgcagaacgctccttccctgatgccacagacgcatataaacatcccggcattttttgtatcgtgcaaacagctttacagcctcgcactcgttgcagtacaccttccagcagccggagcatttgaaattgtgtcccgcattctcaatgaaaccgatcacatcgccgagcggataatcgaggaaaagcccgatctcatggggaaatccttcctgcccggcaaggcgttccttcagatgcgcaagtgccgcatccacatccatcagatctccggttatctgatatccataccgtgtaagaaatcccaccacgccaggctgcttcagattcttttccagacgtgttttccggcacacatacaccagtgccttcgtttcatgtctgcgcagcagcacaacgctgatcccttttccttccatttcctgattccagtatccgatctggtcagacagctctttttctgattcatacggcatgctgaacaggtttgctgttttcagtgacgcaagtgtcggcgaacaatttccgatcagatattcttccagcataacggctcctttttctgcattttcttttctcactgttcaaagccagtctttcggtctgaacagtaacagtgtagccgttctccggctattgtatgcactgcaaccaatttgcgcagcaaattgattgcctacttgcgcatatcgtgcgcagcacgattctcatatgcgcattaccgctttcctgcaaccaatttgcgcagcaaattgattgcctgcctgcgcaatactcttatgcgcaatactcttccagcacatttttcagtgcagccgcactgctcgcgtggactcttgccaccggaatattgctgcgttttgcttcctgagccgccgcgatcaccattttatgggaaacggtatttgtaaacaagatcagaagatccggacatccgatctttttgcggatcggtccgttctcctttgcgaacaccttcgccttacatccatagcatttgcagatatccgcatactgacataccattctctcatttcctccgataatcacaacgctcatacgttacctccattcctgatgttctccgcgcagctgtgtgaagctctgtaaactcctgcagcctgatttccctcagccatacttttcacgttttttcactgtttttgcgttccagttctactataactatcttttgttagctatcgctaactagtatttacaaaaacagggatgatgcaaaacgcccggtcggaccgccttttctggttttacagcatcccagctctcctgatgttttctactgctttctttttttgtcaggagcacctctcagacgacattctgtgtcactttacatgaggctttcctgtctgtattttcagcttttgtcagtagctatgactaactatgattaatatatactaacttccgttatctgtcaagatgattattgagaatcatttctcgataactttatcgcagtacagcgaaaaaccgtcattttatgctgtctgtcgacccgtctgtgcgttcacggcatctcgcagctgatccagtgcctgcttcagcgtcgctctcgggcatgcgatgttgatccgttcaaagccttcgccgtccacaccgaacatcgcgccgctgtcaacccagagatgtgcctttttctcgatcagatccacgcgctgtgcctctgtcaggccaagtgtgcggaaatccagccacaaaagatacgttccttccggctcgatcagatgaatctgcggaatattttcctgcaggtaagtgcgcacaaaattcagattctcagccagatattccttcagctgactcagccattcctctcccgtctcataggctgcctgacagccgatcagccccatcaggttcagctggctgtagcctgccgcatcgacggcttttttgaactgtctgcgaagctctggatccgggataaaaatattcgacacctgaagccctgccagattgaacgtcttgcttggtgccgtgcagatcacggaattctttgcatatgcttctccaagcgacgcaaacacggtctgatggtgtcccggatacgtaaaatcaccatggatctcatcgctgacgatctttacgccgtgtgcaaggcagatatctcccatgcgccgcagttcctcctctttccagacacgtccaaccggattgtgcgggctgcacagcagaaacagcctgacattctgctccttgatcttctgctcgaaatcctcaaagtctacttcataatggccatgctccagcttcagcggactgttcaccggcacgcgcccgttatccttgattgcttcactgaacggatagtaaaccggctgctggatcaggacaccttcccccggctttgtgaatgcccggaccgccgctgcgatcgcaaagacaacgccgggcgttttgatgagccattccgccttcggattccagttaaaatgtttttcataccagctgcgaatcgcctcaaagtaatcctctttcgcttcactgtagccgtaaattccgtacagcgctgcctccgtaaggcgcttcgatacctccggaacggtccgaaaatccatatccgccacccacagtggtaaaatgtcctcgtctcttccgcgttcttttgcaaaatcatatttcaggctttttgtgccatgccggtcgatgagtgtatcaaaatcgtatttcatgctgctttcctccggagttttctttccagtcatctgttttcgtctttcagttattccagtgcctgcgccaggtctgcgatcaggtcatccacgtcctcgatgccgaccgacagccgcaggaaatcatccgtaatgccaagccgctcttttacttccgccggtacatcgccgtgtgtctgcatggtcggataagtcagcagtgtctccacgccgccaagactctccgcaaacgagatcaactgcaccttctccagagtacactttgccgcctgcgcatctttcacccggaacgagatcattgcacccgctcccctggcctgtgctttatttatctcgtagcccggatgctccggaagccccgtatagtacacctgctccaccttttcctgctctttcagccactgcgcgattttctgtgcgttgctctgctgacggtccatgcgcaccggaagtgtcttgatgccgcgcagaatcagaaaactgtcaaacggagaaagacagcagccgttcgtcttaaagtaaaaacgcgccgtttcggagagttccggcgtcttcacgcacagaaaaccagccagtgtatcgttgtgtccgcccagatactttgtgccgctgtggattaccatatccgcgccaagatcaatcggtttttgcagatacggcgttaaaaacgtattgtccacaatcagatacaggccgtagcggtctgccagacggcgcattgcccgcaggtcagtgacgcgcattgtaggattgctcggtgtctcgatgtagatcgcttttgtatgttccgtgatctgctgctcaacgagcgcctcgtccgcagtgtcgacgtaggtaaagctcaggcctctttgtttttttgcattgtcaaacatgcgcacagaaccaccgtaaaggtcctccgtgcagataatatgatcgcccgggaagaaaaattccagacacagcccgatcgccgccatcccgttcgtgcaggccatcgtatcgtacgcatgctccagcgaggaaaccgtcttctcaagctcatctctcgtcggattgtttacacgtgtataatcgtagccggtcgactgtccgggacccggatggataaaggttgctgtctggaatatcggggtagaaacggcgccatacggatgatccttgtccaaacatcggtcgccgtggatacatcgtgtctcaaaatggtaagtcatagtctttctccttgtaacgttttcctgtatattattcctatcagtttagtagaattaacttagaaaatagtaccacagagggaaagatgtgtcaacgcgggaaagaaactctggtattcgatatctcctataactggttatttctcctgcacttgacacccttttgccgcagctgttacactgaacgtatacacctgacattggctgtaattataatttcctctcattcagaggtccgccatcattttattgttgcctggaaaggagcctttttattatgacactcgacacccataaacttgccagactcggcctctttaccgcactggcttccattctcggctatatcgaatccctgctgcccgtttttccgggcatcccaggtattaagcctggccttgccaatctcgctgtcctctttcttttgcttcgctatacatggaaagaggctgccgtagtatcggcagcccgcattttgatcatcggttttctgtttggaaatttatttggaattatctacagcttttccggtgccgtactcagtctgtgtgccatgacattcttccagaaaaaaacggatgtctctcccgttatgctcagcattctcggcggtgtttttcacaatgccgggcagcttgctgctgcgatggtgatcgtcgaaaattctgcactgatctattatgcgcccgcgctgcttgtcgccggggtcgtaaccggcgcggtggtcggcattatcacttcagaagtgtcacaccggatctgactgtggcaaagacacagaaaagaggattgtgaatgtccgctttacttcagagagccagacatctcagtcctcctcaatatgctcctgaccctgtgcaacaatcgtccggacatgctcatctgccagggaataaaagatggatttgccttctctccggctcttgaccaggcggctctgtttgaggatgcgcagctgatgtgagatcgccgactgcgtcatattcagagtttccgccagatcgcagacacacacttccgcctcaaacaggacgaaaagaatccgaattcttgtagcgtctccgaaaattttaaataattccgccagatcgtttaattcctcttcctccggcatcgtctgttttacaatttccagcaaattttcgtgtacttcatattcctcacagcattcctgctctttctcgttttctgtcatcgctttttctgttatttctttttccgtcatccgaatctgcctcctcttatcttataaagatccttctgtcaggatttcccatccgtacggcgtacccaatgactcttcacgccactgccgcatggcaccaccgcatctgttctatcatcagccactgattcctgcgaaagccaaatataccgatccaatctatctgcttacagccgggttcttttatctccccggctgtatctgtttcatcagtcacaaatggcctgtatacttctgctccctgacatatcttatattttaccggctgtcctgctctgaatcattacagattttttacgaacagtgcgcggatcgcattaagcactgcaatgatcatgactccgacatccgcaaagatcgccatccacatgtttgcaataccaagcgcaccgagcgccaggcagatcagcttgattccgattgcaaagtaaatattttcataaacgatatggatacattttctggaaatcttgatcgcctttgcgattttctgcggatcatcgtccatcagcacgacatctgcagcctcaattgccgcatccgatcccattgcgcccatcgcgataccgatgtctgcgcgggacagtaccggcgcgtcgttgattccgtcaccgacgaaagcaagcttttcattttctttcttttcgccaagcagatgctctacctgtgttaccttgtccgccggaagcagctcgctgtgcacttcatcgatgccaagctcctgtgccacctggtcagctaccttcttcatatcaccggtcagcatgacagtcttcttgattcctgcgcgcttcagatcgcggatcgcctctttcgcatgcggttttatcatatcagaaatcaggatatgtcctgcatactcgccattgaccgcaatatgcacaaccgttccaacatgatggcactcacaatactcaatgccaaggcgcgtcatcagcttgccgtttcctgcagcaacctttacgccgtctacgactgcggtgacaccgtttccgctgatctcctcaatatcagaaaccctgcttcgatcaattgtttttccatatgccttctgaaggctcttgctgatcggatgcgaggaagcactctctgccagtgccgcatactcaatcagtttcgcatcatccatgctggaatgatgcacaccgctcacctcaaacacgccctgggtcatggttccggtcttatcaaataccacatattttgcctgggaaagtgtctccagataatttgaaccctttaccagtacaccttccttgctcgctccgccgattcctgcaaaaaagctgagcgggatactgatgaccagtgcacatgggcagctgattacgaggaaggtcagggcacgataaatccagtcgccccactccggagacagacccatgaaaaacatccgtacaagcggcggaagaatcgccaatgccagtgcgccgtagcagactgccggcgtatagattcgtgcaaattttgagataaagttttcggaacgggatttgcgggaactggaattttccacaagctccagaaccttcgctaccgtagactcgccgaactccttcgtcgtacggatgtgaagcacacctgtcatgttgatgcagccgctgatgacttcttctccctcggaaacgtcacgcggaaggctctcaccagtcagtgcactcgtattcagagaagattttccttcagtaacaataccatcgatcggcaccttttcacccggctgtacaatgattgtcgttccgatcgcgacctcatccggatcgacctgctccagctttccgtcacgctctacattcgcgtaatccggacggatatccatcaggtcactgatatttcttctgctctttccaactgcatagctctggaacagctcgccgatctgataaaacagcataacagctacaccttccttataatcgccaagcaaaatggcgccgatagtcgcgatcgccatcagaaagttttcatcaaatacctgcttattgcagatacctttccacgcctttttcagaatatcgtgtccgatcaccaggtacggaaccataaataacacaaattgcagccagccctctgccggaagcagagacagcacgacgatcagcgctgccgccacgatgatacggatcagcatttttttctgcttcttgttcataatcttttctcccatcccacagcgaacccacgtgtcctgcagaacagccggcttctctttccaccgctgcctctgcacatccccggtccgatctgtgcgctttctgtctgataaaccccgggctttttctatccgaatccatacggaaagaacaggcccggggcaatctattctaatacagagctcacaaacagatcgattctctctcttttctgaattctgtacaagttcgtaactgttcagagccaacctccaaaatgctacgcatttcgtcggtgtggcgtatccgccaaataaaatttcaaaaacaggcttaaaaatgcgagcattttacgcctgttttatgaaattttgcttggctctgaacagttacacaagttctttatttttcagcatctgccaaaacaaagacggtcaaacaggcgatgcccgctcagtcctttacgtgcttcgcctaaaatgttacttttacagatagatttcgcaatcgtcttctaccttcttgcagttcttcagaacatctttcataacagtcttcggatcctggccctcttcgaactcaacgatcatcttcagggtcatgaagtttactgtcgcgtcctttacaccggcggtgttttttgcagcctcttccatcttgtttgcacagtttgcgcagtctacttcgattttgtacgtctttttcatgattgtttttcctttctcttccatattatagtgtaatttatttttttgttctttttatcatatgaacatttattcatatgtttgtttttattataacgtctatttctgatttgtcaagtctttcttctctttttcgcttcattttttcactttagttttttccgttttcccgcatgcaaacttactgttttttatatttcctattgacacaatagggaatatagagtattatgaaaataacttttttttgaatagggaggactattatgaaacgtttaaatctaatgaaaaaagtaaccggtcttcttctgagtgcagctatggtagttggattctctgcagccgcaatggcagaagagccacaggcagctgcaatcgatgctgaggcatttgacgcactcgtctcttccggcccggtcgcagacgacgctgctatcgaggcaaacagctgggcatccgcagtaaaggaagcaggcgtactccgtgtcggcggcacacgcacctctttcctcttcagccagcttgacgagacagacaacagcatccgcggatttgatgccggtctgtatcagctgctcgccggttacattcttggcgattcttctaaatacgaagtaactcaggtagattccagcacacgtgagtctgttctgcagagcggacaggtagacgctgtatttgctacctactccatcacagatgcccgcaaggaagtcatttccttcgcaggtccgtactactcttcccagcaggccgttctggtaaaagcaggcaacaccgatattgcaggtgtagacgatctcgcaggcaagaccgttgccacccagtccggttccaccggtcctgacatccttgccgagtatgcaccggaagctaccgtacaggaatttgcaaacgaccaggaagcacgtaccgctctggagcagggccgtgtcgatgcttacgtgacagactacacacttctgctgaatgcaatcgtaaagaacccgggcgcttatgagatcgccggagatgtatttggaccggaagataattacggtattggcttgcctcttgactctgatggtgttatatttgtaaatgatttcctgaagaaaattgaggaagacggtacatgggcagatctgtggaagatcagccttggcgaccgcaccggtattgagactgtaccggacgctccggctatcgaagaataatcgactgaccaattcaaagatcacagtaagagctttcgggatttctcctggaagctctttttcgtgaaaggaggactctatggacatttctgcacttcttacccagtatggggacaaatacctgcaggcgcttctgacaacctggaaactgactgtattttcttttgccatcgcatttctgatcggcattctgatcacagttatccgcgtctgcccaattcgtccgcttcagctgtttggtgacttttacgttcagattttccgcaacattccgggcgcagcccttttgatcctgcttgtttatgcgcttccttatctgaatatcattctttcctattatacgtgtgtgctgatcgcgacctcgctgatcccatctgcgttctgttccgagtatctgatggccggcatgaacacgatcgctccggggcagatcgaagccgcccgtgcacttggcatgtccttttcaaagatcatgaaaaatatcgtgatccctcaagcactgcgttccagtgtgctttctctgacgaatctgctggttgccactatgctgacaaccgcacttgcctcccaggtgcccctgaatccgatggacctgaccggcctcgtctcccacatcaacacgcatgccgtcggcggtgttactgcctttttaatctctgctgttttgtactgtgcaactgccgtcgtcatcggacagatcggtgccagaattgaccggaaagtgaggatcctgcgatgaaacaaaaacaaccaacgattcgtgacgctctctatgaagcaccaggtccgaaagcccgcaaacgaattgcagtggcaaccgtactctccattttagccctcgccgctctcgtgatcgcagtcatccgtcgttttgcagaaaacggacagcttgatgccagatactggtcgatcttcacacgctatacgacctggcgttttctcggctacggtctcgtcggtacgatgactgctgctctcacagccggcatcatcaccttcttcgtcggccttttgctcatgatgggccgcatcagttcattcaaagtgctccgcgcactgtgcaccgtgctgatcgagttcagccgcggtgtcccgacacttctttttatttatttctttctgcttgtcgtaccacagttcggcatccggcttccggctctttggaaggtcgcagcccctgttgcgatttccgcctgcggtgttgtggcagaagtactccgctccggtgtcaatgccgtaccgaaaggtcagacggaagcggcactctcactcggcatgcgccgcagcagcgtttttttcaagatcatcttcccgcaggcgctgcgctttgtcgtaccggccctgatctcagaacttgtcatcgtcctgaaagatacgacgttcgcctatatcgtcagctactcggaccttatgcagaatgcacgtgtcctgatcagtaattacgatgcactgctctccgtttatcttgtgacagcgatcatctacattctgatcaactacattttaaataagatatcagttgctgtagcaaggcgcactcgttaaaaccatctccctgtcagggtatgtctgaaaaatattttctgcatcctgcagattttccacattttgcatcttttgtatctacaggccattgttccattaaaggaggtactccatgaattcttctgaaacgaaaacagctccaccgatcatcgagctctcccatgtcgataaacactttggacagctgcatgtcttaaaggacatcagcctctccgtaaaaaagggcgaggttgtcgtaatcatcggcccgtccggttccggaaaatcgaccctgtgccgcacgatcaaccgattggaaacaatcgattccggtgagatccgcattgacggtaccacactcccggaagaggggaaaaagctcgccgagcttcgctcccaggttggcatggtatttcagtccttcaacctgttcgcccacaaaacaatcctcgacaacgtcacaattgctccgatcgatgtgctcggcaagtcaaaaaaagaagcccgtgcggaggcaatggagcttctgaaacgtgtcggcgtggacagccaggctgccaaagtcccggctcagctctccggcggacagcagcagcgcgtcgcgatcgcccgcgcccttgcaatgcatccgaaggcaatcctctttgacgagccgaccagcgctctcgaccctgaaatgatcggcgaggtgcttgatgtcatgactgcactcgcaaaagacggcatgaccatggttgtcgtcactcacgaaatgaatttcgccagacgcgtcgctgaccgcattctcttcatggacaacggcagcatccttgaggaaaatacaccggaggaatttttcaccaatccgcagacaaagcgtgcgcaggattttctgaattcgattcaggcgcactgagcggataattgcaggctattctccagttcgaatgatacgcggctattttgcagcttatccttttacacggttgatcaaaacaggcagatatgtttttatgaccttttcgggacacataaaaacatatctgcctgttttatcgtgtttcatacggtgatccatctcaccgcactctcacatcactgttttctgatttattctgtttctgagtaaagcggacatcggcaatccacttcgcgactgcgttcatgcaatgtattgtctgtttttattcaccgtctacttgtgaaggaaagaaaaaagtcccttcttctcatacggctcctgcttaattcctgtcaccgtataaccggtctttgtgatcgcctcacgcagcttgccctcgtcaatcggcgtttctgagaggattaccgtctctcccttgctgtgtgatgacgttaccttctttactttaaaagcgccgcggactgcttcattgatatgtgcctcgcacataccgcactgcattccgtctacgcctactgtgatctgtgtcataatttctgttttcctttctgtctcattccagcaaagcaaatccatgcgattgttcttacttattatactggtatatcgttatcgaaataactataccactcacttgtatgcgaatccatcaaacgaaagctcacacccatgcgcaatcctgctgcagatattgactgcagctcccatcactccggcatactcgccgtccttcgtctccaccttcatcctcttacggtcctcgctgagttccacgtttttcaggtcatccttttctctcagctctcttaagatctcttctgcttctgcatctgtaatctcttttgacaaacgatagtatctgcccatcattttcgcctcactttggtttgttttttctaacttttgtctgtattataacacttttgtgaaaatgcggcgtttttttcttgtccggtaattgactttttttctcattttcaggcacttttctgtaaaacaaaaaaagtccccgccgcactctgtacgacaggagcttcaatttcaaattcaaaacaaatattctctctactatatcagaactattatggcaatccctgtttcttattctttagcgtgatcctcatcactttcggctctgtttccggtggattcctcctgctcttttttcgcggtatcatccccctgcggatgcttcacattctggtacagcagccagccgccgaaaatcagaatcccgatcccgatcaccaggaacagcaccataaacacattgatgaccatcgactgcgaattcgcatccggattttgatacatctgatatgccagatagatcagataagcgcccacaatcatatacaaaccaaatcttgtccgttctcttcccatactgttccctttctctcaccttatttttacttactttctcagttctcttttcacttctcaactactgattacgccatccctcagatatgagtattattcggctcacctatagcaattcaataaaataatgcaggcaagacgatttggcagagcgcgaaagacaaggatgaaatctgcaggcgtgctgacgcacggcaaagatttctgacgcagtatttcacgctctgacagatcggatgggatgcattattttgcagaattgctataagccattatatcaaatcacggaaaatataacaagcacaggagcgatttctaccttttcgctgactgaattttctgaattgtcccgtttttttatttttttgcaaaacttcattttttataaaaaaacacttgctttttccaaaaacatttgttatacttttagagctgtaacaaataagcagtttcatcacagcaaagcgatgcgtggctcagcttggtagagcgctgcgttcgggacgcagaggtcgcaggttcaaatcctgtcgcatcgattaactggcaaaagcatcgcagatctttctataagatttgtgatgttttttattttacgttaaaaaatcaaaagcgtatattgcaataaaaaaatgcatatgttatatgcaagcaggcaaaatgatgagatgtgttcataagtagcacagcaaaaggccccgaagttcgcaccttcggggcctttcttattccgttttggcggggcaacatgctctaaagaccgactgctaactgctattttcaggcactgccacccttctcgttctgcaacgttcctttcagtttacttttttcgcagctcatcttttgaccgctaatcagttcaagaatctgctccccagctctccttcccatctcaaacagtggcatttctactgttgtcagtctcggtctgagcacatctccgattttatttccaattccacccacaaaaatatcttttcctatcgtaagattctgatcccgcgcataatcatatacacctgctgccatactatcattcattgaaaaaattacatttacgtgtttgcccaaaagccgttccgccgcttcataaccaaattctctgctccagtctccgtaataaaccagctccggattaaaaagcacacccctgcgaaacaatgccttctgacagccaagcagacggtcaatcgtatgtacgctgtttttttctcctgcaataattccaagtgaaaccactttatccttaagaaggcagctcacaaccgcatcagctgccttttcgtcgtcaaatacgatcgatggaatttcttttttatcagcaaagccatagactactacaattggcacgtttgcatcctgttccagcatttcggataagtctcggctatgtgcactcacataaataatcccttccacctgtttcgcacgcatcatggcaatttcctcatcgagatgttttttaaactcctcatgataactaaaatcatttccatattttttataaatacgcagatttccaagcacaaaattgtagtcctgctcttccagatagtcatcgataccgtctacaatctccggtgcattaaaaacagtgagatcctctgtaataattccaatcattctggtctcacggcacttcagattgcgcgcaacaacgttcggaacataattcatacgctccacctgttccaaaaccatctgccttgttttttcacttactttccctttatgattcaaaatgtttgaaaccgtcgcaatggatacatcacatgcttttgcgatttcccgtatcgtagccatatttaatccccgcatctcttccaggtatctggaattttaattttattataatcttgccagatgcttttgtcagcacctttttgtcctgcagaacggatgcagtcccctctgctgtttatctcgctatgccccagcgggaggcttttctggctcggttaaaacacctcttcacaatacggtttcgaatcccaaaattacaaacgcccaagccacgatgaccgtacctgcataatcttctcccggctatccagcatctttttcatgcgcagtacagcttccacatccaattccccgtatttttcctccatacgggtcagagactcaatctccgcaattgtacaccatggaagccatcgtccaagaccgttgtgatactgcattgcaagttctccgctctcttctaccagcccaggataataatgccccagcttacgattccagtctgtcgtctgctttgtatttccatttaggaaacggcaaaattccagataatgctcatcccctgtccaaagccacaaccgatagtactcatatggcatatatcccatcataacatccgcatgagagtgacctgttgcaatcaggctcaaccctgtaaaggttaccttgtcaaacacagcatttcccttatacggatacaccggataattccagacatacgtccaggtttcacagaaatccgctgccccacaggctgcatccagatatcgactatctccggtcatttcatataacgcattgaatgcatagactgcaatcatcccggcttccttgtcgattgtgttatcattgtccgccgttccgcccacaaactgcatcggctgataaatatgcttcagacaaaattcccccgctttttctgctgctgcccgatacttctgatcaccggtccaccagtagagattcaccagaaaacgcaccacattgcttgtattaaatttcccggtatgtactggatatcccttctcatcgtaggcacgataccacgaaccatcttcattctgatgttctgacatccagttcccatagcggatacaaaattccttccactgtgtgcattcctgtccgttttgctctgccagaagcgcacacaccagaattccttccattccatccgctgccgtcctcgtataggtcggatattcttttcggaaagtgtctggaaatgcgttataccacacacgcggcagaacactgtccttcgcagattcattcacccagaaatcaatgatccgaaacgctttttctatttttttcgagtcatgattccgatatccataccgtaagagctgataggcgcacattgtctgctgtcctacaaatcccatttgaaagctaatatcacacacggttccctccggcactgtcgtccagaacggaattcccatcgcaccgttgtactcctgacagtatgtatcaagcagcctgattccatcctcatataccattttctgatctgcccgcacatgttctggcgtttcttttttatagaaatagcgccatactgtccgcagcgcctcatatgaatctactgcttctccaccggaaatggatattgtatattcatgcttcacatcctgccgtaccggatgactcctcctagcccatccagtagtgcgatcaatataatttttttccccttcgcttcccggaaaattgtaacacagctgtacaccccctgcttttctaattccaagcgatgcatattggaacgatgcatctgtaagccagccagcttccggctctttcattccaatatccggaaccggtgaaacatgtttcaacgccagatactgttttctttgcgtatgatacagctctacatacggcattgccatgcgcgtcacacgcatcaaaaagtatcggtcatccggatcacttccaaatgctcccgctaccacattttcatttttccgataccagattcccggaataaacatctcatattccgaaaaactgccgctgttttcctcacttactgcaaaacaagtggaaaatccggcatcatgcccatctgcattctctactgtcacctttcttgaaagaatccattccctttcttcctgtctgtaacagtccttaaacaaaaaacggcttccgttttttgttgtaatttccgcaattccaacgtatcctctttctgttttttccacctgctcatatccacttttgtaaacggttcttccgccgtccgcttcatgaatctccagttcagccggttcttttgccacacaggaaccatttttgaagcatattttcattcctttcctgtcatttttattcttttcaaaacagatttcacctttc

SEQ ID NO: 462 - DNA, 2789 bp, Unknown
  16S sequences of unknown bacteria
tcctggtcgatcgcgatgagctcacggttggtgacgagcttcagagcctcgggcgagatcttgcagatgtcgcagccgagcatcagcggagcgcagtacatacaccagaggatgaactgctgacggtactcagcgtcgccgcagcccgcgtttccgacaagacccttgccgtacataccgacggtcagcatatcgacgtcattgtagcagttctcagcggagtagccgaacttgttcatctggctcttcgcgatgtcatagtagctctggaacgagtcgacgatgtcgccggtcgaacggtacatatgcgcgccggtcgagcggatccatgtccagacgtcctcggttccccagttgcaggcggagaagagaatatcgcgtccgcagttctcaagcgcgattcccatgcggtgatagagcagctggcagtcagcggtgtgcggcttgtagcagttgtcgtacttcaggaaatcgactccccactcggcgaaggtcttcgcgtcgaggtactcatggtcgaagctgcccggatagtcggcgcaggtgcgcacgccggtgcaggaatacataccgaacttgagtcccttcgaatggatgtaatcgccgacgctcttcattccgctcgggaacttgatcgggtcggcgacgagacggtcggtctccgggtcgcgctgccttttcgaccagcagtcgtcgattactatgtattcatagccataatccttgagtccgagctcagcgaaagcgtcggtcgactcgcggacgatctgctcgtttacgtccggaccgaaggtgttccatgtgttccagcccataggcggtctcttaactatcattctgatgttcctccaaaaaatcttgatgttatcatctaccgaattataacggtaaatgtattatatcacaaattaagccggattgcaacagtatttcaaaaaaaacacaattaattacaaccggaagcggattttttcacacaagcctcgttccgcggcactcgctcgggagctttccgtacttttttctgaacgccgccgtgaagtgcgaggcggtcgcaaacccgcaggacgccgcgatccgctcgatcggcgaagggctcagcgcgagctgtgaatacgccgtcgtcagcctgtattcgagcagatatctgtgaagcgtcatccccgccgtctcgcggaagacgcgggagaggtaatagggatgatacccgagagacgccgcgatgtcgctgttcgtcagctgctcgccgtagtgcccatggatatatctcttgacgtccgcgacgagcgcggcgcgcccggaggtgtccgacgcagagtgcctgacggcgtttatcagataatccgccgcgagaagggaagtccgcgcttccgaatacggcgcgccgccgagaaattcctcgaatatctccctgaccgtcccggcgagcccgttatcctcggtaaagaccagcggacgtcgcagctccggcagatcaaggcgctcgacgatacggctttcgtcgtattcattgagcagggacggctgcacgaacttcacaatgtccgtgtgctcccgcgtgaggtcgagattcaggcagatatacttgaaccccgagctgtccgggcttctgaaatgatacggctgaccggtgttgaagaacgccgtcccgccgcaggacagcgtgtactctctgtccggcgtcctgagcgcggctttcccggagacgaccgagaatatccggcagtcataagccgacgaaaagtccgggttgtcccacgtccagaccgacattgtcgcgttccggatgaacgggcggatgtcggagagactctccggcgtcattttctgaacgagaaatgcttcggtatcccggcttcccagacgaggtccggctcgccctgaatgagcgggagcaggtaatcgatacatttgtcggtgacgttgttgccctcggcgtttatgaactcgtccggtacgtgtcttatcttgttagctatcgccgaaatgtcctcgctgtcaatctttatgtgatacggagaatcggatacgcgtgtaaaggtcatcatacgtccgctctcaccgttgacagccgctttgacagccgcctttccgacgtcgaccgattccatgaggtcggtcttcgacgctatgtgcgacgcgcagcgctggagaatgttcagctcgaccgagcggaccttgcagccgatctcttccttgacccggagctcgagctccttgccggtcccggcgagatagcggtgaccgaagacgtcgacggctccgctctgggtgccctcgccgacgtagcttccgtccgcgagacggattccctccgaaacggcgacgacgacgttcgggtggattttcagcgccgcgcggacgtccgcgaagaacttatcgtaatcgaacggtctctccggcaggtagacgaggtccggtccgacgccgcagattttcctcgtgagcgccgaggaagccgtcagccatccggcgtcgcgccccattatctcgacgatagtgacggcgttgcagacataaaccgccgtgtcgcgaagcatctcctgcatagacgccgcgatgaacttcgccgcggagccgaagcccggcgtgtggtcggtgccgacgacgtcgttgtcgattgtcttcgggacgcccatcacgcggatatcccagccgaggtcgccctttgcggcgcggcgcgcgagcttcgcgaccgtgtccatcgaatcgtttccgccgatatagaagaaatagcgtatatcaagctcgcggaaaagcgcgaagagccgcctgtagatctcgtcccc

SEQ ID NO: 463 - DNA, 27697 bp, Unknown
  16S sequences of unknown bacteria
cagcatcatgccttttcgctctgagcaagtatacttacaaaattcatcatcatccgtcccgtgagaccccatatacaatatttgccgtaattgtaaacaggaacttcgctcacagattcaccccaatcgtacatatcaagaccgtacgctttggaaagctctttgtagtcctttgtcggaccgatatttacgcgcataacagccggttcattttcgagaaaatatgaaagcggtacgagaaacacctcttccacttcattttttgaaagctcaagacgcgaaagcgcatcataagagatttgccccataaacctgtatatcacagagcctgcggaatttctgctgctgtcaagctcacaaaaaacctctatatcctctttgaatattcccagctcttcacaggcttcacgcacagcgcaatctacagccttttcacccggctctatccttccgcccggaaaacagacctctccgggctgagttttcatatgctttgcccgcagctcaaagaggacatatgtatcgccgtccttttcaacaagcggcataagtacagaaaaatatctgcatttttcaaccgtgcctacaggtcttccgctaaatatatccgcaagctcggatacagaaaaatttttcactaattaagcacctcaaaatctgaaaagtcgatgcctaccatctcttctttatcgaggcttacgcttacaacaaactttactccataaagtttagttatatttgtaagtcttgtaagaaatgccggcagatccgatgggcttacatcggcatgctttaatatgctgtcgataaacacatactcaagatcgtgatctgagcttatgatgccgtatataaagccgatatattcgtcaggattcgttatatggctaaaatcctccatacatactaccctgattttatgcttaagatcgtgtataagtctgtcatttttacttaagaatacaatgcttcccgatgacttttcaatgagctcatttgccatatcgcacatgctcttcgtctttccgcttcccttatgaccgattaataactgtaccataaaaatcgcctccttataataaaagccgcagccttttttcttaattataattatacactaccagcaaatataactcaacctcaaatcatttttaaaatgacaatattttcagaaaattttaccctttatttttgctaagcctgagctggccgcaggccgcatttatgtctgcgcccatttcacgccttattgtcgccggtatgccgctctctatgagaaaatcacggaaatcttcggctctttttctgtctgagccctccattcccgtttcttttaccttatttaaaggaatgagatttacatggcacagcccgcgtgtttcatttcttgcgcagaaatagtgccgaagcagtcccgaaagttcctccgcatttccgcgggcatcattcacccccgcggcaagcgcatattcaaatgttattctgcgtcctgtgagccttacatattcgctgcacgccggaagaagttcttctatcggatattttttatttatcggcatcatattgtcacgcgtcctattatcgggcgcatgaagagatatcgcaagatttgcctgcggaagttcttctgcaaaacgccttatcatcggcactataccgcatgtagaaaccgtaatatttctcatgcttatcccaagtcctttcgggctgtttgcaagctctataaagcgttttacattgtcaaaattgtcaaaaggctcgccggtacccattatcactatatgtcctatgcgctccatatctgatgccagaggaatactttgctcatcctttatatgccgcagcactgatgtcacctgcgccataatttcaccggcagtcaggttgcgcttaagtccacctatcgtactcgcgcaaaaagcacagcccattctgcatccggcctgcgacgacacacaaacagaattgccgtacttatacttcataagcactgtttctatagcgttgccatccgcaagaccaaacagaaatttctctgtgcttctgtcgcttgatcttcgcgaatcgagtttttcgagcctgcctgttgtaatctgtcccgctgcctcggcttcttcaagctttaaacgcaagctttttgacaaatccgtcatctcggaaaagttcaccgcgccgcggtacagccacgctgctgtctgcgcggcacgaaatttcttttctccaattccttcaaaaaaatcctctatcaattttttatctgcatcgagtaagtttaacatttgtctttctgcttatccgatatatgcgatagcttctacttctacgagtgcatctttaggaagtcttgcaacctcgacagctgaacgcgacggataaagtccctctgtaaaaaacttcgcatatacgccgttcatatcggcaaaatcgttcatatccttgagaaagactattgtttttacaacattatccatagtgccgccagcagcctcaactatggcttttacgttgctcagcgactgctctgtctgtgcaataacgccctcaggcatctctcccgtctccggattaagcggcagctgccccgatacataaagagtatttcctgcaaggttgccctgtgaataaggacctattgccgcaggagcatttgttgtgactattacttttctcattttgttttcctcttttcgtttattttaatttatcgtaacatatcacattcaaaatttccatatgtttttaccacttttttcagcttctgcctttaatacttttttctcactattttaagaagctccgttatatggtatatcgcagtttcctgctcttctgcgctcaaattttcaaatacggaaataagctctttcgccgacttgctcaagcgtgtttcacccagcataaagtcaccatttatgaggtcatcaagcggcttatcgagtgcatttgatatttgtactgccgtattaagactggtattaccgttttttataatgggatgcagcgtcgattttggaatgccaagctctattgcaaattccttgaccgacttatggcgcgcctttctaatactctccaaattgcgtccaaaacgattttgccaattatcatctttttcgtagttcattatcattttcctccgtaaaaattcaaattaaattacacttattcaggcctatctaccaatctcggatattatgtagtgataaaactaattattttactgcacttttttaaaaaattttaaaatttttattttcttttattatgaacaaattaaaagcgtcgctgcaatcgaagcgacgcttttcgcaatttatttctttttagaaataatctccaaaatttttattatataatactcaagtgtcgtctgctgctcataatcaagcccatcaaatattgcaataatttctttcaccgactcacaaaaccttatatcatcaaaactttcttctttgctgatcaggttatcaagagaaatatgcagcgcgtctgcaacccgggatgctgtatcaagcgttgtgttaccatcttttaaaatggactgcaatgtagactttggaatgcctatttctcttgcaaattccgtcagcgacttcctttttgtttttcttatactttctaaattctttgcaaaattttctactttattcatttcttttcactcttctctttcctattttttatataatgataaagcatattatcactattttgttgtacgagctttcgtaaatgaataccgacatttcgtattttagtcgataattattatttctttttcactatgccaaagatttcatttatgtggtgggtgatgagttcctgttcctcggcatccagtctatcaaatttttcaagcatctgacctgccagcgttataaatctcgtctgctcaaaagcatcctcgcctcttataagttcatccagtgaaacatcaagcgcgctggcaatactgactgcggtatttaatgtcgtgtttcccgttttcagtatcggttgcatagtagatttgggaataccaagttcttcggaaaattctacaatcgatttaccgctctcttttcttatattttcaagattgcggctgaacctgacttgccattccgtatagtctgccttcttattatttttgatttcgttatcagtatccttttgtttatatatcatttttctttcctttcttaaaaaatttctataatgtgcttttattttgttccatctcttatcatctttatcaccttccctcctgtaatcgctcaagtcgaaagctcatacaagatatagtgacaaaatcgcatatttgactgcacttttttttaaaattttttaagtttttataaaatacaaaagcagcctgtttctatcagatttttttgataaagaaggctgctttgttgccgagaatgattgattccccgtttcctcgttattctatttctatttccctgtttgctttattttccccttattgatatgacctactcagttttaaagcgactgcaatagtttgccagtatagctaagaactgcgaattacatggtttttcggaaagctcaaatcctgcgtattccgaaagtgcatccggatttgaattccaagccacattcgtcgctgtgcgtatattacgctcaactgatttccacgatgtttcatagcgttccgctacatccggataaagccacttggtaacaagaagcaatctttccggatcttccattgccagctcaacagcacaggatgtatggaaaaatccaatatatttcgcggttacgcccattcgatagagcagctcctgaatgttagccgggctgtgtccacttacgcttttatctttctcacctatgctcttatctttctctttcattctattctattatgcctcctttaatgatacctttcagcaaggtgcgatttaaattactgctcggctttcggtatattctcgcatttgccaaattcgcaaaaagataaaaaatcttattatttttttctttttgttgcatattaagcatacaacaaaatatgcatcttttgttgtacgggttttcggatattcgtaccggattttcgtttttcccattatttgtctttgttttgcatgatttatatggaataattattgcaagacggcttgatttgtctcgcaattataaaatacttatgcaaaagaaaaggagaaaaaaaatgaaaagaatctcgacagttttagttttggcaatgatgctcgcaagcattttttcctcaagcattgccttcgcagcgatgccgcctgataacacagcgtcgcctaatacgattatgacttgtgctcgttcgtttgtagcggtttcatcaacaagcgcgatagccgaagtttttgctggaagttccggtgacacaccttttattacatctgaaataactttacagtcggcgcctctcggtacaacgagctttaccgatgtaaaaggcagcacaaagacaaaaactgttgaaaatcaaacttccattttgcatacatgcagttttgacatttcctcagataaagaatatagaataaaagtaaaacttaccgataaagttaacggcatacagtcaacgaaaacatattataaaacattagattataaatagccgcacttcacagccgctcaaatgacttctaaataagagtctttccatatttattaattacacttatccgtccgcggcactatatttaatattaaaagcttttgtatttcttaaatctataaattactaaacgatacctctttattcatcgaaacttaaataataagctgcctctattttgaggcagcttatccgtttaacacacttgttactcagacaaagtccggttttgaccattttctaatatccaatgttctttttttgttgtacgggttttcggatattcgtaccgggttttcgttttttccattatttgtctttgtttcgtatgttctttatggaataattattgtgagacatcttgatttgtctcagaattataaaatacttatgcaaaagaaaaggagaaaaaaaaatgaaaaaaatgaaaagaatctcaacaattttagttttggcaatgatgctcgcaagcgttttttcttcgagcattgccttcgcagcgatgccgcctgataacacagcgtcacctaatacgattatgtcctgcgttcgctcatttgttgcaacttcatcaacaagagctcgggctgaagtttccgcaacaagttccggtaaaacgcctttcattacatccgaaataactttacagtcggcgcctctcggtacaacgagctttaccgatgtagaaggcagcacgcaaacaaagacagttgaagatagtatatcaattttacatgcatgcagtttcggcatttcctcagacaaagaatacagaataaaaatagaactcaccgataaagttaacggcatacaggtaactaagacatattataaagacttagattattaaaataacaacaattcacagccgttaaaattgcttatgctaagcggttctaaggatagcattgcctttatccggcagcaatgttatccttaatattaaagcctttgtaccctttacgtctatagctgactaaacgctgcagctttattcaaagggtcataataagaagctgcctcaaaatagaggcagtttcttcgtctatcacaggtgttactaagctaacgtttacaatattcgatttttacctttttatcaaatgttctttgccgaaaatgcaaagccgaagttatactatccgcgaaaacatgtaaaatatattctcactatagccctacttcaagttttctgctaccttcaccatctcttcgctgtctatactaccaacaacatttattacataatgaccagaacataaaatcacgccataagaatcttctaacatatcctgacatatgtaaatattactttcttcacgttctattttctctatcacattgtccacatccattgccgtatagtcgccttccgggttgtaataaatattaactgcaaaataatcactccccgcacctttaaattcatatgttgcattataagttccaacatataatctatcaattttcagtgtaccaaacaaatatccttccggcacatattccaattctaacaaactcggcacttcttttttaactctgtctatttgttcaacgctgtcagccaaaagactctctttattatcatacgtataattttctgattcatccggatcagtagagaaaaatccctctttcagctcataaagtttttttgcgaattgcattttccacgcacttgcgctgccgggaacatctgttatcagcgccagacttatgccggcaaaaaacacaaacagcataaccgaaacgcgcgccacggctttgagcagccttctcttcgctgcaacttcgacgcggatgtctttatcgccgccttcatctaaaaatgagtaatcgatgtgcggcggctcggggtctgcggtatgttcttctactgatttaataagtaagtctgaaaattgctgctcgtttttagtgaaatcgtttttcttcttcatcatttaccgccctccctcttagattcggcttcgaaatacattgcgcgatatttcttaagcgctctggaaagtttcgatgttatcgtcttttctttcatacctgtgatttcaacaatttcttttatcgataaacactcgacataacgcatatgtatcaaaactctatattcttctttgattttcatcagagttttatacgcgagatcggtttcaaaattagtgattatcgtttcgagcacatcagtttcatcgcctaccttttcatacaaatcgaacgtaccgttttctgtctccacaatgttggaaattactctgccgtctttgacggctttgcgccaatattcatagatacaatttctgataatcccattcatccagcttttcgctttggttttatcttttaatgtgtcaagtctcttccaagctctggagtatgcttcttacagtatatcttctgcaatctctttcttgtaaactttgctaatgatatatttgttaaaatcattttcgtttacaattatgttttttataaagaattcttttgcattcatcttgttcatttgcattgtttttaaaattattaaatagttaagaaatatccattaaaaaatatattgctgcgttatgcgccgaatccagtatttttttcttattctactctatattacacatttaggcaatgtattttcaagataaaataagttattttcttcattccttttattttcagcaagcaaaatagtgttatatagctctgctatcgagtaattattggcgttttattgaattcttttcgattttttgttgaaataatttcaaaattattcgattgaattatagtatatattacctgctttgtcaataataatcttaatcttctaaataagccttttatcttttccagtgacttttattaccttttattaataaagttatgaagctcgtcatcggtgataacgccgcaggcgaccatatttgtcggtcccgacaaatatacgcgctctatgagcgcggcgcacccgtgcgcggtcgcctgcgcactccgcacctctgccctttgccactttactgcccctgttccttcgcattttttcatttctgcattctttattaccgcaccttttgcatcttgaacttctgcctcatctgcaagctcaatgcgcacgccgagctcaccgccacgcatcagaagccgtatcgcatacgcttcacctcgcggagacagcgctatatcttttcccatttctgcatcttcacctccgcagacgccaatccttccccgcactgcaagtactgccgctacagaagcgctgccgctgccgcaagcatatgtaaaatcctctacaccgcgctcaaacgtcatctccagcacgcggccatcatccataaattcatagaagttaacattcgcacctttaggaaagcaaggactcttccgtatagcccttcctatttcacggagctgcaaaataccctcgtcattttcaggccgaaacactaacccgccatttgtctcgctgtcaacttcctttccacctgcggtatgcgcgcctgcatatgtcacaatcctgctaagcccgttatattccaagacggcatgcggtacccccggctctccgagctccacataatcacagcgataaacccgattgcaacccgattgcacgtcccaaaccgttatttccttatcaagctccatcacagacggcctgttcataagcactcggtattcacgtcccgaaattttcttaccgataacaattcccgcgtcagtctcaactcgctgcactgcgcctgcaagtccgttttcatatccatacctgcaaatacaccgcgctccgttgccgcacatttcggcacgactgccatccgcattaaaaaaacgcattcgaaaatccccgcttccccgtgccgtttctacagcaatcagcccatcggcgcctatcgacatacgtctttcgcaaaggtgcgccgccagtgcagaaagctcgctttcattcattcctgcctcgcggttatcgataattataaaatcattacctgcaccgttcattttacaaaaattcattatttcacccgcttacccatatattctattgagcgcaccgccagcacttccatagcatctatatagtaatcgctgagttttttctcttcctttatcactgaaagctccgtacaggcaagtatcgccttgcggcagccgctgtctataagctcctgctgcactttagaccacgccgcgtcatcaacgggctttccgcgctttacacaattgtagatttcatgcatcacgagcttctgtcccgcatcccccggcacataaggcacaaccccttcagctaaaagcgccttctgatacagctctgtttttatcgtaccgtcagttgcaagcacgcccactctctcgccccggcaagtctttgccacctcgcgcgcactttcttttatcatatttataataggaatggaaacttctctttcgagtctctcaagaaaatagtgcgatgtattgcacggcaccgccgccgctttgcagccgtatgcagctatcgtctccaaattttgcaaaagctgcgcatgtacaggttcagtattacccgaaagtattgcttccgtcctatccggcatcgacgcatctcctatgatcagcacatttatgtggtcttgatccttctctgctactgtatgctctatcagcattttatagaacagctgtgtagcaagcggacccataccacccattattccgagcacatttttcataccttacccctttccggctctttacagcatctatttaaaaagcgccgttcagggcgcttttttacgcaaattcgtgaattgcaaagctataaaatcagcccggcggccaggtaagctttctctttcccagcagatgaaaatgaagatgcttcacagtttgcataccgtcctcaccgcagttattcacaagcctgtatccattttcaagtccgaggatcgccgcaatatcctttaccttcgtcataatatatccgagcagctccgcgtcatcatctttaacatcatcgagcgaagcaatgtgcttcttcggtataatcagcacatgcacaggcgcctgcggttcaagatcgtgaaagcacacaattctgtcatcctcatacacgatgttccccggtatttctttgtttgctatcatacaaaaaatacaatctgccatacctactctcctttcattccgtctttatacggtgcaagcagctttacatcacaaaactcattgcaaatgtacggcttaccgctgccgcccgcagcgtatactcttatataattatcagtataacctataaattcgttattatcaacatcaaattcctcaaaaagcactctgcgcaccgtccccgcgttcttcataaaaaaatgttccgacgcttctgcgcccgcttttatcaatgccgccgtacgtctgctctttacatcaggcggcaaatgtccttttatataggcagccgctgttcccggacgtttagaataattaaaagcgtgcaccttgcaaaactccgcctcgtatatcatatctatactttcgcggaaatcctcctcactctcccccggaaatcccgctataatatcagtgcttattccgtaattggggtcaaattccttgagcgtgttcactatttcaagatattcctcgcgcgtatagtttctgttcataagctctataatgcggttgcttccgctctgcagcgcaagatgcagatgatggcagagcttctcgtatttgaaaagtcccttcacatattcgacattgattacggtcggctcaagcgacgagaggcgaatacgaaaatccccctcgatttcattaataatgcttatgaccgattcaatacccggtttgtgcgcacactcagggtatttttcagcaaaacccgcttccgttccgtagagcgccgtatttattcctgtgagaatgagctctttaaaccccttttcgacgagcgcccgtgcttcatgcaaaacatcctgcggcgcacggcttctcaccgtacctctcgcatatggtataatacaatatgagcaaaacctgtcgcagccctcctgcacctttatatatgctcgtgttctcgattccattgaagttatgatccccatttcgtcgtaatcaaggaggtcttttcgctctttaacagcaataatctgttttcttacagccgtatcacccgcggttacactgccgcagcctgccatatatgcatctatgtactccggcaggcggcttttttcgttcgtaccggtcacaatattcacgccctcgatcgccgccacctcatccggcgctacctgtgaataacagcctgttacaacaatgacgcttttcggacttaccctcttcattctccttatgtattgcctcgacttgcggtcggcaagcgacgtcacagagcaggtatttataatgtaaacatcggcaaattcgttttctccaactatttcgtgccccttctcgcgaaacctttctgccagagcctcgctctcgtactgatttaccttgcagccgagcgtatgaaacgctaccttcaaaattcaccgtctcctttcgttcaaaacgcatatttataaagcgcgataatcagtgcgaaaatcccagaagccctgcgccatctgcaattcgctctataccgcagcactccggatattccgccttcttctatcagtataccacaatccgcagcctcattaaaacataagttaccttttttcttcatatattctacttgaatcaatgtttaaaaggaggctttattttgaaaaaaaagctgacaataaaatctgtcttgcgcgcgttttggaccatattctttatcgcagtagcggcagcaattctcatcatcaccgatcttttgcccgtttccaatccgcttcctttaatataccgcagcggaagcaccttatccgctctgtcagatgaaagcgatactataaaatgggtcgattttgatgtttcctatgaggctctgaaagatgcaatgaaaattgatattgacacgtacggaagcagtgcccatgtgagctggattgacactctcgcctacctcggagcacgctacggcggcagcttttcttcctacaaatcagctcacgcgaatgaatttgcggaacgtgtcaaagcaggtgaatctatcaacgatataacaagggatatgaaatatttttcgtattaccaaaaggcctacggcgcggtcctcggcggtttcctcggagaatttaacgaaaatggagaagaaaaatacggattaaaagcattttcgccagtcgctagcggatattactacacacattatgacgatttcggtgccggacgttcttatggatacgaccgcaagcacttcggccacgacctgatggtaagcaccggcacccccattatcgctgtcgaaagcggcatcgtggaagctgtcggctggaatcagtacggcggctggcgcatcggcatcaggagttatgacggtcttcgctattattactacgcccatctcagaaaagatcatccttacaacgaccgtctttacgaaggaatgactgtcactgccggcgatgtcatcggctactcagggcagacaggatacagcatcaaggaaaatgtcaacaacatcgatacccctcaccttcactacggtatgcagctcatctttgacgaggcagaaaaagacagcccaaatcagatctgggtagatatgtatgcgctaacaaagctgctctccgaacacaaatcggaagtacagcgtcccgaaggcagcaaagaatactaccgcgccggatatttcagtgaacgcagctattatcgtgacgagcttctgcgtgaagaaagtgaaaaacttcataaatattacgagctccaggataacatagtgctgtcagatgccaacgccggcagcaatgaagagcagtttgacgaaactgcgactgcggcggcacaggaagaaggcatccgtcttcctatccttatgtatcacgctcttgtcagcgaaagcaaataccaaaacacttattttatagacccatctatatttgaagcggatctcaaatatctaaaagacaatggctacacaaccatcgtcgtcgcagacctcatcgcctatacagagcagggaacgcctctccccgaaaagccagtaatgctgacattcgacgacggctactacaacaattacctacacgcatacagcctgcttcaaaagtacggaatgaaagccgtaatatcacctgtcggaaagttaacagacgaatacagcatcataaacaacactcacgaatattacgcctacttaaactgggatcgcatccgcgaaatgtcgctttcgggaactattgaaatccaaaatcacacatacgacctgcaccatgctgacggtgccgcctcaataaaaagaaggagcggtgaaagcgatgaagcttacaccgaaagaattcaaagcgactttttacttttccaaacgcgtatgaacgaaattgcaggtatcacgccgacggctatggtatacccttacggcacatataaccaaacaagcgaaaaaatagcgcgtgagcttggcttcaaagcaacgatgacctgtcgtgaaggtataaattacataactcgcgatcctgaatgccttttccgtctaaaacggcaattgcgcgctcccggcaaaagcatagaaagttttctttaaacagccgttttacttaaacggattttatcaaattttacgtattgacatttaagttttagcgctatagtgacaaaaaagggcttggagcaaatctgctccaagccctttcacatcttcattgataatcttcaattaaagcgtagctccaaaccgttactcgattacagcgctctctaccattgacttaaatgtatcttcgtattcgcctgtcatatctgtcattgtgcatgcatatgtaccgtcagcagtagctaccataatctgatactgagtaaattcaacgccctgcactgaatacttaatactcatgctgtatcccggtgctccaaggaattcaccgccttcaaaatataccatttcagcttctacttcggtgccaaatacctgctccatctgatctttaaccatagtaagaagctgatcttccttcgcattctctaccgatggatccgaatctgtctccgacatattgatgtttgaaccgtcttctgcaagccaatactgcgaaatgccctcaggtacatccgactgctcttcaaatccgtcaggaattgtaaccttaagcctgcctgacggtaaatccgaatcaccgccgcatgcagcaagtgatatgatcataacaagcgtgacagctaacactaaaacctttttcattctaatttcctccttagacataaatttttaaggttcatattataatactttacaccaccctgattgttttgtaaatattaaatagcaaattatcagcgtcataaaaaaacgtcgtccggcaagataccaaccgcatccgttgctgtgataaacgcaaaacttagcgcagcaataactgcatttatttttaaagttccatcgcatacattatcatcgccagcattgccggtcccgcagtctctgtcctcagtatcgtctttccaagcgttacagagcgcgcgccgctctctgtcatcagttttacttcattctcggaaaatccgccttctggtccgataattattgcaattttctttggtttttccgctccttttttatctatcgcttcgaggcagtctttcaggctctgcctttcttcattctcgtaggcaagcagcacaaggtcataaccgtcaaatgataattctgcaagctttgcgtcttttgccacactgggaattattccacgccggcactgcttaactgcttcgtctgcaattttttgccacctttcaagcttctttttaaaattccccttgtccgtcaccacggtacgctcagtccagacaggcactatctcgtatatgccgagctccacgcatttctgcactattgcctccatcttgcccgcctttggtattccctgaaaaagcgtcaccttaacagcaggttcgcttgcaaattttctctttgccgcaatttctgcaattattgtatcctctgctgccgaagctataatgcagtcatattcatactcggttttatctgatacttctattctgtccccctcgccgagccgcagcacgcgtgtaatatgccgtatatctccagtatcggttattgttacggtgctttcatctatcatttcgggattcacaaatactcttgtcatccttgcaaaatcctttcattatattactatgttgtctttaacaattctttaccttttttattctttgcacagcagtatatcctgctgcgggtcttgtacgggtcttgccgctattgcacaccattcgccctttatgcgcacctcttctatctcaaagccgcattttttgatgacggctcctacatcgtctgcaagctgcgcaagtatgcccgatgatatgtatattccgccgggctttatatgccttgccacatctgccgaaagtatttttactatgtccgccatcagattagctgcaacaagatcagccttaaaatctacccctttcgtcaaatcgccgtaaactactttaacattctcagaaagcccgttaaggcgtacattgctgtttcctatctctacggccacagggtctatctctataccgagcacatctttggcgccgagaagcccagccgctatcgccagtatgcccgagccgcatcctacatcgagcacatcgtcgcccgctttgatatatttttcaataagttcaaggcaaaggctcgtagtctcatgagtacccgtcccgaacgccattccgggatctatttctattacaagctcaccttcctttttttcgtaatcttcccaggtcggctttacgacaaggcttttcgtcacctttgtcggtttaaaatactctttccacttatctttccactcatcatcacatacaagccgtctctccgtctcgcatgccggaagcacctctttaagtttttctgaaagcgcgtcaagaaaattctgctctgccgcattggcatccctgtaaaccgtcaccgaagggcgctccctttcaagctgcagcaccgactcatccacataatcccaatcgtacgagttcttcttttccaaaagctcatgtatatcctctgggtcgctgattacgctgtcctcgatgccctctgcaatgagtactccctctataagctcaagctgcgccgaattttccgcatatataacaaattcaatatagttcatacgttttctcctcgaaatttccaagcaaatcctttttcacagtataccatactttaccataaaatttcaagtctctgtgaacgtttgttctctattgtactaaacaaaaacccctgcatacattccgtatatgcaggggcctctattcgctctataatattgctgctaaagcctgatcagtttcccatctgctttgcaacttcttctgcaaagttttcttccttcttttcgataccttcaccgacctcaaatcttaccatagaagcaactctgatcggctttccaagctcctttgcagcttcgtcaacatactgctttacagtgagatctccgttctttacaaacttctggtctacaaggcatacttcctttaagattgccttcatcttgcccggaatgattctctcgagcattgcttcaggctttccttcattaagaagctgctgcacggcaatcttcttttcttcttcgagccagtctgcatctacttctgtgtcgtccacaaacttagggctcatcgaagcaacctgcattgcaacatccttacctactacttcaacttccgctgccgaagcttctgtctccagacctacaattacaccgatcttgcctgctccgtgaacatatcctacgtatacgcacccaggctgtgaaaagtttgcaaatcttctgatgttcatattttcaccgatctttgcaatcttattattgagagcctcctgtacagtaccttcgtctgtatactgaagctgcataaacttatccatatccggctctgcatcgatagccatattggcgagcgtctgaacaaaatcaacgaattcgtcatttttagcgacaaagtctgtctccgaattcacttcgataacggcagcctttttagcgtcatctgagaaagcgagttttacaagtccctcagctgctactcttcctgcctttttagctgcctttgcaagtcccttctcacgaaggagctcaacagctttgtccatatctccgtctgcttcaacaagtacatttttgcagtccatcatacctgcgcctgtcatttcgcgcagttcctttaccattccggctgtaatatttgccattctttatccctccaaaccgataatcgatactattcgttgtcttcctctttatcttcagcttccttaacttcctcagctgcttctgccgtttccgatgcttctttatcttcggcttccgcctctccttcgtcaaagctttcaccctgatttgcttcgatgattgcgtctgccattctgcctgcgatgagctttactgccctgattgcatcatcatttgcaggtattacataatcaacatcgtcaggatcgcagtttgtatcaactatacctacgatagggattccgagaattctcgcttccttaacagcgattctttccttcttaggatcgacaacaaacattgcgcccggcattcctttcatatccttgataccgccgaggaacttttcgagcttttcagcttccgctctcagcttgataacttccttctttgaaagcttctcgaatgttccatcctcttccatagtatttatatcgttgagtctttttattcttgttgcgattgtcttataatttgtgagcattccgccaagccatctttctgaaacataatacataccgcatctgtttgcttcgtcaacgatagcctgctgagcctgcttctttgtacctacgaagagtacaggtttgccgctttctcccacttctctcataaagtcatacgcttcttcaatcttcttcaccgtcttctgaaggtcgatgatgtagattccgtttctttctgtgaagatgtacggagccatcttagggttccatcttcttgtctggtgtccgaaatgaacacccgcttcgagtaactgtttcattgaaattactgacatttttatttcctcccggtttttttcttccaccgtattttcccgaaaaaggaccctgcgggggggaattctttaaatcctcctgcccaacaaggcaccgctctttcagtgacacgatgtgcgaattattatttttgctttgcccctcggacaaaactatagataattatatatcaaatccattggaattgcaacacttttatttacatataccgctctaaatctaattgctgttcttttcgttgcgaatcagatatcctttatacgcctgtacagctttagtatatttttccgcacagatcgcaagagagtctccgcactcaaaatatataaccctatctttcatatttattactttttctaaatttattatgcagcttttatggcatctgaaaaaattctccggaagcttatcaactatttcatccagctttctatacgctgaataattgccatccgctgtatgtatgtgtattttccgcgcctcgctctctatgtagataatatcgcttatatacacttttgccgcttcgctcctgcttattaccgagataaattctctcgcttcgttctttctctccatattcagtcctttcgaggcgcgtgcgactatttttttacatataatagtttaattgtatctattttgtcattatagcacaggatggatttgttttcaacaccattttaaataaaaaatacaataaaaaatccggctctgcgctgccgcataatgccggatttctgttcgtgtcacatttgcattttatgatttatatcttgcatttgccgtattacagcgtctcacgcttatatgtgatgagatcttccgcaatctcgtgtgccgcgatcgacaccggtctatcaatttctacatctgcaagcttaggctttccgtctataatatcccttgcacgcttcgccgcaagcactacaagcgtgtacctattatcggccttttttctcatttcgtttatggatggataaagcataccacattcccccttttatatatcaatcttattaaaaatttcttccgaaaatctcaaatgttcagcacaccatatcgattttaccgcagcgaccgcctcttcaagatctccgtttattatacaataatcgtattctcttgcgtgctgaagttccgctatcgcagcccccagccttattttaagcgtttcctccgtctctgagcctctggttacaatgcggtttttgagctcctcaagtgaaggcggcaggacaaatataaatacaccatcaggataaatcttctttacattctgcgcgccctgtatgtcgatatcgagcataacatcaattccgacttcaagcctctcgagcgtctgcgcaatcggtgtgccgtatctgttgccatatacctctgcatattccaaaaatccaccttcatcggctaccttctggaattcctcatctgtgacaaaaaaataattcacgccgtgctcttcattttcacgcggctttctcgtcgtcatcgacacagaaaatttcatcccagtctcttctaatatgcgattacaaatcgtgccctttcctactcctgatggaccggaaattacaaacagcttgcctttctccatttgtttctcctttgtgcggcggattggcaaagctgccccgctgccattcgcataaatattcctaagacgtttgtaaattttattataacactgcgcagtctgatccgcaagaaaaatctgctcccgcagtccttcaattccaccatatttattcaatattctgcacctgttcgcgtattttctctatctcggctttcatttccagcattaagttcgttatttctatgtcatttgccttggagccgatggtattcgcttccctgttcatctcctgtacaaggaagtcgagcttcttgccatccggctgattgctgtttgaaagtatatttttaagctgcatcgtgtggctgtcgagacgcacaagctcttccgttatgctcgacttgtccgcaaatattgctgcctcaagcagtattctgtcctccggcacagctacgtttttacccacgagctcggttatgcgctcgcgcagcttttcctcataagccttagtcaccagaggcgacctttgctcaattttcttcgccagcattcttatcgtttcgccgcgcattatgagatcctccgcaagctttgccccctcggctgtacgcatttcatcaatctttgcaagcgcaccgtccgttgccgcaagcaacgcctttgttatttcttcttcatcctcaacatcgggcattgacttcatcacatctggcagcgtcgcgagaaactgcagcgtaatattattttcgagtccaaattctcccgcaagctccttgagattatcgtaatactgccttgctatcatcgtattcagcttgacatttacatcggactcggctatattttcaaccagaatcgaaatgtcaacttttccgcggcgcagagtttctttcaccgcgttttttattttatcctcggcaaacgaataacgccgcggcattcttacacttatatcgctgtatctgtgatttaccgactttatttcaactattatgttgcgtttttcgtcggtatattcactcctgccaaatccagtcatactctttaccatacaattctctcctcttttctatatgtaaaatttatgataatataaatattatacaacttttgcaacagcggctgcaaggtcaataaggaaataaggtgataattatggcatttgacggacttgtaacgcgggcggtcactcttgaactcgcggataaaatcaaatacggaaaaatagaaaagatataccagcccgacgcggacgagctcgtatttaacatccacacgcacgcgggaaatctcaaactctacgcctcgtgcaattcttcacacgcgcgggtgcatctgacgcatgaaagcttcacaaatccagcagctccacttgcattctgcatgctcatgcgcaagcacttttcaggcggcagaataacggatatcaggcagcgcgaaacggagcgcatcatagaaatagacgtagaaaccatgaacgagctcggtttttccgtaaacaaacgcctgatctttgaaataatgggcaagcacagcaacataatcgcgctcgacatcaaatcgggaaaaatcatcgactgcatcaagcgcatatcaatagacgtaaacagagtgaggcagctcctgcccggtaaaatatacgaatacccgccttcacaaggaaaaattccgctcgatgaaataacagaagcatcatttgcagatattgataaactgttcgcagtcccaatggatttcggcaaagcatctgccggttcgccttacagcagcactgctgctgctcctgccattgatgaaaatgcgctggcaaaggcaattctcggaaaagtgcagggaatttcgcccgctgtcgccaataatatcgcagaaaatgctctcgctgattttaaaaccatatgtaatggtgccagctgcgaaaaaagcggtggcgaggatgctgacgatgaaagagcagacactgaaaatatcagctctgccacccaaagcgctgccgtctgcaatttaagcgctataatatatgaaaaaattgtgcaaatgcgcgctgcatttacagcatatagcacagaaaatcattcaccgaaagccgctcctgctcttacccctgtcgtctatacagatgcaagcggcgtacctgttgaatttcatatattcccgctctctgcatacgaaagctactacaaagcgatacgttttgacaccgtaagcgaagccgcggaatatttttacgcaaacaagaattcctcaaatcgcatcaaacaaaaatcaaatgacatttcgcacgcgctcaaatccgcactcgacaaactgtatctcaaaaaacagcgcctttccgaggatttgctgaaagccgaaaactcggatgacttccgcctctacggcgaactacttacagcaaacatacatcttgcaaaagctggagatgcgagtgtgactgtcacgaattactacacaggcagtccggtcacaattccgctcgatataaaatacagtccctcaaagaacgcgcaaaactacttcaaaaaatatggtaaggccaaaacagctgtcaaggaaaaagctctccagcttgaagaaacggagcgcgacatagaatacctagaatctgtctccgtctttgccgcaaacgcttcctccgtcgaagaaatagaagagctcagaaacgaactcgttgaaaacggctacctgcgccgcagaaaaaacgcttttcgccccggcgctgcaaaaaacaaaaccacgccttacgaataccatacctcggacggcctgcgcatactgataggaagaaacaataaagaaaacgatctgctcacctttaaaactgccggcagcaaggacatatggtttcacaccaaagatattcccggctcgcatgcaattctttttacaggcggagtctcccttgatgaaatatccgaaaaggcaatttttgaaaccgcagctctcgcagcgtatcacagcaaagcccgtgaatcggaaaacgtccctgtggactatgtgcctgtgcgcttcgtaaagaaaccaaacggtgccaagcccggaatggtcatatttacaaataaccgcactgtatgggtcaaccctaaagctcctgacagcaaatagcgcgcaaattttctcacagaataatatttcatctgcgcactcgctgaaataggtgttttttgcctaaatactcttaagcggcaacatcacctcagcagtcgcaacattgaccgaatatcctatcttctttgcttagttcactctataaaattaaaaagtgtacatttcagcacgccaaatgtacacttttttaatttatcactggtaatttcagctcatttcaatattatgccaatcgccgttatcttttaatgcgacttctgataaaaaagacaatttcaaatttatgctcttcgctatttggcggcagtatcacagtaaacgcagcgatacacgcctttttcgcggtctgtcagacggaatatatggtgtattccctgttccgtcgaggtgatgcagcgtggatttttacaggcgattatatcagtaagctcttccggcagcgctatatgcttctttttcgttacccgcccgtcctccacgatgtcaaccgtaatattgggactgatgtagccgagcacatcgagatcaatttctatattcttgtctattttgattatatctttcttacccattttctcgcttggcacattcattatcacagctaccgagctgtctagcttatcgagtccaagcatttcgtatatctgcatcgcttttcccgcgatgatatgatctataactattccgttctttatcgcatcgacattcatctattccacctccagaagtttgagtatcagcgccatccttatatacttgccgcagcgcgcctgttcaaagtactttgcacggctgtcttcatccaccgcagtcgagatttcatttacacgcggcagcggatgcagtatgcagagatcctttttcgcatttttcagcttttcaggagtgagaatgtagctgtccttgagcctgatatagtcttcctcattaaaaaatctttctctctgcactcgtgtcatatagagaatatcgagcttttctatcgcttcgtcaagcgattcagtctgctcgtaaggtattgcttttgccttgatatatgtttcctttacatagcgcggcacctttaattcttccggtgaaatgagcacgaattttattcccgtgtagcgcgacatagcagcgataagcgaatgcacagttctgccgaatttgagatcgccgcaaagtccaaccgtcatattatcaagcctgtcaaacgtacggcttatcgtgagaagatcggtcagtgtctgtgtcggatggtggtgtcctccgtctccggcatttattacaggtacgagactttttgacgcagcaacgataggcgcaccctcttttggatggcgcattgcaataatatcagcatatccgctgacaactgtaattgtatcggctacgctctctcctttggcggctgagcttgaggctgcttccgaaaatccgagaacatttccgccaagctccatcatcgccgcctcaaacgaaagacgcgtgcgcgtggaaggctcaaaaaacaatgtcgccagtttcttatatctgcatttttctctatatttctccggatttgctatgatatcgtttgctgtgtctatgagttcatctatttcgtttaccgacaaatcgagaatatctataaggtttttcatactgttttctccttatttgtacaataaattcgtacttccctacttattatatatgtgttttttcatctaaattatgcgcttttaaaagaagctttaattccccaattactgcctattttttaatccagctttcatcggacgggttattgcgaaaagcgataagcctcttcacatcttcaggctttatgtagttttcctgcgcagctatttcggctatcatatcaaaattcgtgaggctgacgttctttacctttgcttcggcaaggcgctcaagtccttttttcataccgtatgtaaaaatgctcacaattccgagcacatctgcgcctgcctcgcgaagcacattaacaacctcaactgcgcttcccgctgtggaaataagatcctcaacgacaactactttctgccccgtctcgagccgaccctcaatttgattgccgcggccgtgatcttttgcgcctgaacgcacataacccatcggcatatcgaggatgtgcgccgttattgcagcatgtgctattcccgccgtactcgttcccataagtacttccgcgtgcggatattctctctttattgtctccgcaagcgcgttttccacatcatttcttacagccggagatgtgagagtcagccggttatcgcaataaacagggcttttaattccgctcgcccatgtaaacggctcgtccgggcggaaaaatactgccttaattgccagcaagtcctttgccactatccttgaaatattgtcagtgctcataccttttctcctcctgctctcgtatctttcaatttgtataacattatgtacccttgtacgttcttatatctgtaaatcaatcaacaaactctaacacgcagcgtctgtacgccgccaccggatcggcatcacctgttatcggacggccgactactatataatccgagccaatttccttggcacgagccggtgttgttatgcgcgcctggtctccgctctcgccgccagcaaagcgtaccccgggagttaccgtaagaaaagaactgccgcatactttatgcaccatacctgcttcaagaggtgagcagacaacgccgtcaagccctgccgcttttgcattttgggcatagtgcatcaccacatccgcaagcggtttttctatgagaaggtcgcttgccattttctcctgatcggtcgaagtgagctgcgtaaccgcaattaaaagcggtcttgtgccgtccggacgcgtaagtccgcgtatcgcggcctccatcatcgcgattgtaccgcctgcatggacattgcacatatcaacatcgagttttgaaagcacactcatcgccttcatcaccgtgttcggaatgtcgtgaagcttgagatccaagaaaattttatgtcccctgcgcttaatttctctcacgatttccgggccctccgcataaaaaagctccattcctatttttacataaggtttctcgtcagtaaataagtcgagaaattcaagcgcttcacgttttcccgcaaagtcgcacgctattatcacatctttgcccatcagtgcgcacctcctattatttctctcagtgaagttatattgtatttcgccatttcttttggcaaattttcaactatttttttgctcgcaaacggatcgacaagatttgctgccccaacctgcacagctgatgctcccgcaagcatcatttcgattgcatcgcgcgcgctcgcaacgccgcccattccaataatcggaatttttacggcctcatgcacctgatataccattcttaccgccaccggaaaaatagcgctgcccgaaaagcctcccattttattagcaatgaccggcttctttttatttaaatcaatgcgcattccgagcattgtatttataagactgatgccgtccgcccccgcagcttcgcaggccttggcaatttcggttatatcagttacattagggctcagcttgatgtaaacgggttttttcgtcactttttttacagcccttgtcacctctgctgccattttcgcttctgtgccaaaggtcattccgccgttatggatattaggacagctcacatttatttccaatatttcgacttgctcttccttgtcgagaagcgcactgttttctgcatactcgtctatcgaaaatccgcatatgtttgcaattatcggttttttaaaacaagctctgagcttaggcagctcttcgcttataactttttcgactccgggattttgcagtcctatgctatttataagtcctgccgtgcattccgctatgcgcggcagcgcgtttccaaagcgcggttcacgcgtagtgcccttaaacgacagactgccgaggcagtttatatcgtaaatttcagcaaattcgtatccgtaaccgaaagtaccgctcgcgggaatgataggattatcgagggtaacaccgctcagcacaacttcagtgctgcacatacctgcatcagcaatatttatcattttttcctctgctgtttttgaatctaccatatgatttcctccttttccagcacaggaccatccttgcagatgcgtttactgccgtactttgtcttgcatgagcagcccatgcacgcaccgaagccgcagcccatacgct

SEQ ID NO: 464 - DNA, 10691 bp, Unknown
  16S sequences of unknown bacteria
cgcccgcgcctacggacgcgcccgcgcctacggatgcgcccgcgcccacggacgcacccgctcccacgccggaagcgacgctccccccggtgaacccggatcccacggcggaagtgtggggtggcacgcccgcgcccggtacggcgacgcccgcgccaacgcagaagccttcggatggcggctcttcgggcggcgggagttcttccggcagcggctcttcgagcggcggcggttcttcgctggacggcatctcggtttccggcagcggcgcgaacgcgcggatgatcgtcacgattccggcgggcatcaccaatgtggatgtaaccattcccggcgagcaatacgatatcacggccacctatacgctgcccgcgggggaagggccgtttccgctggtcgtgatgagccatggctttctggcggagcgcaaccagcgcggcggctttacggcgctcgccgtggcgctggcggagcggggcatcgcgtctttgcgcatggatttcgccggctgcggcgattccccggcggatttccagtataacaacttgacgggcatggcgagcgacgtgatcacctgctgcgagtgggcgctgaacaatttgccagtggatgcaaacgccgttggcctgctgggctatagcctgggcacgctggtcaccttgcgcgccaccctcgcccagccggacatttgccacgcgatggcgctgatcgcgcccgcgggcatggtcaatatgcgcgatatctatatgggcgagtaccagcaggcgcagcaggacggctatttcaccaccacttccaatgggcgggaataccgcatcagcacgagttggtatgaggacctcttctccctggaactgctcttccagacctatgcggagcgggaaaattccctgatcatttacggcacgcaggacgccatgatccccgtggaaaccgcgctggcctgcgcggagcagatcggcgcgcaaacgttggaagtcgccgggggctaccacagcatgggcctaagcggcacgctgcccgccgtgttcgaaaaggtgcgcgcgggcgtggtggatttctttgtggaaacgctggagagcaatcccgcttccgcgagcgcgggcgcgtccacggagcagggcggcatgcagtcgggccagggctcgggttccatcaccttcaattgatggatacgcgcttcctagcaaattcgcaggggattttaatccgtttctcatctttttcaaggacgctgtaattttcggatggtataatgccagcgtcgaaaggaaaaaagaaaacaaacggaggctggaacgatgacgaattatgaaatggtggaactgctgcgcagcaaggcgaatgtgacctatgaggaagcgaaggccgcgctggaagagagcaattgggatattttggacgccatggtgctgctcgaacgccagggcaaggttacggataagggggcggcgtattccaccgcacaggaggaaacgcaggcggaaccggaaaacggcaagaagggcgcgcaggatgagagcgactttaagagtggcatgcgccgcctgggtcagttcttgcgcaagctgattcaaatcggcaatgccaattcctttgtggtgagccgccatggcgaggaaattctctccctgccggtgacagtgctggtggtgctgattccgttcttgttctggctgatgattatcttgctggtggtgggtctgttcaccgatttccgctattcgttccggggcccgaacctcggcagcgatgcgatcaacgatacgatttccaaggcgagcgacatggccgatagcttcaaggcagaggtcattcatggcgacagcgaagagaattcccagaaatagcgctcgcgatttttcaaaatggctgggctgccatcgcggatcagaaggcgcgtatggcagccctttgatttgggggtaggacaatggcggagcgaatcctgattgtggaagacgaggaaaagctggcccgcttcatcgagctggagcttctgcacgaaggttacgcggtggaaaaggccgcggatgggcgcgatgggctggaaaaggcgcaggcgggcggtgtggatttggtgctgctggatgtgatgctgccgggcatgagcggcatggaacttttgcgccgcctgcgccgcgccagcgatgtgcccgtgatcatggtcacggcgcgcgacgcggtgatggacaaggtgacgggcctggacacgggcgcggacgattatatcaccaagccatttgagattgaagaattgctggcgcgcatccgtgcggcgctgcgcaagcgcggtggggcggcgcagggcgcggaggggctgacttgcggggcgctcgcgctggatccggcgcggcatacggttgcctacaatggcgcgcccattgaactcacgcaccgggaattcacacttttgcaaatgctgatggagaaccagtccatcgtgctcacgcgcgaccagattctggaacacgtgtggggctatgatttcatgggcgaaaccaatgtggtggacgtgtacatccgctatctgcgcgcgaagatcgacgacgccttcggcgtaaagctgatccacaccgtgcgcggcgtgggctatgtgctgaggaaaccgcaatgagcgaaaaccggcgcatgagctccatcgcccgccggttcagccgcgcctggctgggcgagctgttctggacgtatttttggctggattttgtgctcgtcgttttgagcctggcctgcctggtatatacgcaggaaaaggccgtgttcgcgcaggactgggggccaggcatcgagcgcagcctgaaaatggatagcgcgcttcgcggctgggattggctgatgagcgccgttttgtccttccgcgggccggacggggtgtggcacgatattgtgcttaaggactttgcggatggcgtgcgcccgttcgcgctggcgctgttgtggtttgagggcatcagctggtttttcagcatttttgccatgcgcaagcgtgcgcgcaggctgctgcgcccgctggatcagatggcgcgggccgcgcgcgaactcagcgccaagcagcgcgcgcaggaaagccgcgggttcgacgatgaaaaagtgcacgacctggaggcggcgctgggccgcctgagccagccgggcgagcagttgcacatgggcgaccgggagctggctgggctggaagaggcgatcaattccctgctgaagcgcatgcacgaatcgtatcagcagcaggcgcgctttgtttccgacgcttcgcacgaattgcgcacgcccatcgccgtgatccagggctatgccaacctgctttcgcgctggggcaagcaggatgaaaaggtgctggaagaatccattgccgcgctcaaatccgaagcggattatatgaagaaactcgtggaacagcttttgttcctggcgcggggcgacatcggcaaaaacaagctggatatgcgcccgctttcccttgcggatttgatgcgcgacgtttatgaggattgccgcctgatcgacgccgcgcacgaataccagcttcagtgcgaggaaggcgtgcgcgccgtgggcgacgcggacatgctcaagcagtgcgcgcgcatctttacggacaatgccgtgaaatacacgccggaaggcggcacgatcctcctgcgcgcctatcagaacgcggcgggggaagcgtgcttcgcggtgcaggatagcggcatcggcatcccgccggaagacgtgaagcacgtgttcgagcggttctaccgcgccgaccccgcgcgcagccgcaattccggcggcacggggctggggctttccatcgcccaatggattgtgagccgccatggcgggcatatcgaggtgctctcccgcgagggactgggcacgcggttcaccgtgtgtttgcgcgcagaaggggagtcggaacgctaaaataaatgtgccgcttttccgagaggggcgtgcacaaaattgaaggcgaattgcgagaaaaggggttacaattcttcttatagaaacgcaagcgcgaatcgaatgcgggaaaggtgcgtaggagtatggcttcgaacaaatttgccctggtggaacacgaagcggatttttgcgtggtgggcggcggcctggcgggcttgtgcgcggcggtggcggccgcgcggcacggggccaaggtcgttttgatgcaggagcggcccatgctgggcgggaacgcgtccagcgaaatccgcatgtgggtttcgggcgcgcacggcaagaacaaccgggaaaccggcatcatcgaggagctttccctggaaaaccattatcgcaacccggataaaaactattccctgtgggatggcgtgatgtatgaactggcggcgtatacgccgggcatcacgcttttgctcaattgcacctgcgacgattgccagatggagggcaaccgcgtggtttccgtttccggctggcagatgaccacgcagcgcaggcatacggtgcgggccaaactcttcgcggattgttcgggcgatagcgtgctcgcgccgctcacgggcgcgcagtaccgcgtgggccgggaagcgcgcggcgaatatggcgagagcatcgcgccggaagtggccgaccgcaagaccatgggcatgagctgcctgatgcaggcacgggaggaagaccggcccagcacgtttattccgcccaagtgggcctaccattacaccaaggcggatttgccgcaccgcgtgcccaacatgcaggcgatgggcgaaaacttttggtatatcgagctgggcggcgcgcaggacagcattggcgacacggaaagctgccgcgatgaattgctcaaaatcgcctacggcatttgggactatgtgaagaacgatcccgaaaaccgcgaaaagaaccaatattggcggctggactggctgggcatgctgcccggcaagcgggagagccggcgctatatcggcgatcacgtgatgacgcaggacgaattgcgcgcgggcgggcactttgaagacgtgatcgcctttggcggctggtcgatggacaaccacgagccggagggattcctcacgccgctcccgcccaccacgtatcacgccgctccctcgccctatggcatcccttaccgctgcctatattccaagaatatcgaaaatttgctgttcgccgggcggaacatttccgtcacgcacgtggtgtgcagcagcgcccgcgtgatggcgacctgcgcgctgctcggccaggcggcgggcactgcggcggcgatcgccgtccggcgcggccttacgccccggggcgtgtatgaaagcgcgctggaagagctgcggcagacgctgatggacgacgattgcttcctgccctatgccacgcgggaaatccccgcgctcacgcggcaggcccgcctggtgtgcgcggcggagaacgccgaggcgctgcgcaacggcatagaccgccccgtaggcgacgtggacaacggcgcgcgcctcgcgctgggccaggcggtggaataccgctttgcggaggagagcgtggtttcgcgcgtgcggttggtgtttgacagcgatttgaacgatgaaaccatgcccgaatacgagcgcaacctcaagcggaatatgatttgcaaccgcccgcgcaatttgccggacacctatgtgcccaagaccatgacgcgcgcgtaccgcgtcgagggcatcacggcggagggcattgtgccgctggtggaagagacggaaaattatcagcgcctgcgcacgcacgcggtgcaagcgaagctcctgggcgtccgctttgtgccgctggctacctggggcgcggaggattgccacctgttcgcctttgacgcgcgctgacgggcaggcatggtcacgcttggtctgggggctgctcgccgcggcgcttgcgataggcgctgggcgggcagcccttttcccgctggaaaacggtggaaaaataattggaatccccatagccgagcgcataggcgatttcgctaacgggcatatccgtgttttccaggtagaccacggcgtcgcggatgcgcagggcgttgatatacgcgcgcagggaaagtccgctcatggctttgaacatgtggctcaggtaggaggcgctgcaatggttcgccttggccagggtttccagggaaaggtttgtgcggtagtggtcttccagataggccacgaccctttgatagaaaacatcccgcgcacggccgccgggcaggtcgcgaaaatcgccctggggtacgctttgcgcgagaaaggccagcatatcggccagcggacggatgcgcggccggagctcttccaggggcggaatggcggtgctctgtgccggcagcagggaaaggagcttgtcccggtcgatgggcagccgctttgccgcgtgattcgcgcgcgccagggcggtttgcgcctgcgccggatagccgctcacggaaacgatgccgcattgcgtgcgttcgcggttcaagggaacgggaaagacgtattccgctatgccgaaatagcacgcgccaaagcattcgccgcgctgccgggcatgggcgacggcaacgcgctggcagcgattgcacaggcgcaggccgcaagccttggcgtagagacacgcgggatgcgtgtgcgtgttgtaggggagcaggcgctgaaaatagggcccgagcacctgttcaacgccgtgcacggaaacgcggtattcgcgatttaaaacgtcgagatagcccacaatatcatcgagcaattcgttcccatccaaaattggcaggcgcataaatgcagtcctcctttttgcgttgcctatattatagcatattttcgtggatcctcgcagggttttcgcaagaatgtttggtgttttgcgggcaatgcttcacgacgagcgccatacgcagaattcacttgacaaaatccggttttgcgattatgattatgcacaagagagcatatagcaaccacggaattcaagtccaattttgctttgttttccgcgcgacgcggccctggccttttgcgcggcacgccctttttggttcttttttccgcggcttgctatggattgggaggcatatgcgctttgctgtttaattcgtacatattcgtgcttttgttcctgccactgagtgtggcaggctatttcctgctgaaccggcgcaatacgcgcctggccacggcctatctattgggcatgtcgctgtggttttacgcctacttcaacgtggcctatctgccgctgatcgtgggcagcattttgctaaacttttccctcaacaaactcatgcggcgcttcccggcgcaaagggtgcgcaagggcatcatgctcctgggcgtcttcatcaacattggcgtgctgttctactataagtattacgattttttcgccacgaacgtaaacagcctttttggcgcgcactggacgttgctcaacctcgtgctgccgctgggcatcagctttttcacgttccagcaggtttcgtatatgatcgatagctataagggcgaagtacccgactatccgctgctggactacgccctgtttgtgacctttttcccgcaactgatcgccgggcccatcgtgctgcacagcgaaatcgtgccgcagtttatggatcccgccaagcgccgctttcagtgggggaatttttcccgcgggctttacgcgttcgcgctgggtatggcgaaaaaggtgttgctggcggatgtgttcggcatcgcggtgaactacgcgtttgccaacattccctcgctcaattccaccaacgcgctgatcggcgtggtggggtacatttttcagatgtacttcgatttcagcggctatggcgatatggccgtgggcctggggctaatgttcaacatcgagattcccaacaatttcctcgcgccgctgcgcgcgcgcaatgtaaaggaattttggaagcgctggcacatcacgctcacgcggtttttcacgcgctatgtctatttcccgctgggcggcagccgcaaaggcctgctgcgcacctgcatcaacacgatggtcgtgttcttcgtcagcggattttggcacggcgcgggctggggctatatcctgtttggcgtgaactggggcattgcgcaggtcatcgatatattcatcgaaaaatggtggaaaaaggtgcctggcgcgctccaatggctgtgcacattcgcctttaccgtgatgaacgttgcgttcttccgcgctgccacggtgggggacgctatggccattttccagcgcataggcgcgctggatttcggcccgatcgcgcaggaaatttacgaaggcttccgccccatggaagtggaattcgtgctgtacgatatcctcggccgcctggttgccatgccggattggatgggtaccgcgctgttctttggcctagcgttttacttcatcctgttcagcaagagtgcgagcgagcgcatccgcgattttaccccccgcgccgtgaatctggccacgaccatcggcatgctgacgctgtcgattctgtcgttttccggcgtatcgaccttcctgtactttaacttctaaggagcaaagctatgagtgaacgccgctggaccaagagagtgctttcgggcattgggattttgctggcgctgtatatggcgctggtctttgtgctggacccggtgatgctgtatcacgcgccctggtttggcctgaaggcgcaaaacggcacctcccgctacaacaactatggcattgcccgccatatggagtttgattccgtgattttgggcgcgagcacgttccgctacgcgaaaacgagcgattacaacgcgctgtacgacgccaacgccgcgcgcatcgtgtttatcgcggggtattaccgcgagcagagcgactggctgcgctttgcctttgagaaaaagggcacgctcaagaacgtcttctgggcgctggacgcgcagggcattctcatgggcaaggacgattaccattacgacggcattcctacgtatctatacgacgacaatctgttcaacgacgtgaactactggttcaacaaggatatgttcccctggatgctgcgcatggtgctcaaccacacgccgctggacttcgattccagcgacttccgcgatcccacgggcatagaagccatccgcgccgtgtaccagcggccagagacggtggcggagccgctgccgctggacgaggcgtttgtggaaaccgtgacgggcaatgtgcaacagaacatcgtggaaatcgtggaagcgcatccggaaacgcaattcaccatcgtattcccgccggtggatatgttctattgggatggcgtgatccggcgcggcgagctggaccgcgtgctggaagcggagcgaatcattttcgaggcgctcgcgccctacgaaaacgtgcgcgtcttcagcttctttgacgacgcggagattgccacgaattttgatctctatagcgataccgtgcattttctgccggagatcaacacggaaatctttgaaatgacggtggcgggcgaataccagctcaccgtggaaaatgtggatgcgcgcattgcagcgcagcgggcgatgatcgagggatacgattacgcggccctgttcgcccaggaggaggaagaagaatgacccgtcttggagaaaccatcaaaaaagcccgcttgggcgcgaagatgacggaaaaggccctggccaaaaagtgcggcgtggcggagagcttcatcaaagaggtggaagcgggccgccgcatcgtttccgacgaccaggcccagcgcatcctgaaggcgctgggcgtgaagaaccccgtgtccgcggaattggaagtggcgaatgagggcgaagtgaaactgcggcccaagccgcgtccctacatcatccccgtgccgcagccggaaaagaaggaaacgccggaagaaacccatgccgcgggcgaagcggcggacgcctggctcgacgcgctgggcggcgtggtgaagcgcgtgcccgtgatcggcgaggacaatgtggtgatcgatcatgtgctcacgcccgtgatcggcggcaaaatcgagggcgggcacccggaaaaggtgctttattaccgctgcccggacgattccctgcgcggtttccgcatttacgcgggcgatttgctgcttaccgtgccggccaaagccgtggtttccaacgcgattatgctgatccagcgggatggacagcgcattgcgcgcaaaattactaagatggatggcagtcgcttgaacgtgcaatcctttgacgtggattttgtgagcgaaattttgcccgcgcaggatgtgtatgtgttgggcttgtgcgtgaaactggtgcgcagcctataagaaggtcgattgaagttattttgtggttaaataataaacgaatggcaacatgagccatgccatatacgtctaatactatggtgaatgatatttttcgtgagtttgaggcgcgaaaaatgcttttcgagggggttggatactgtgaaacgatggatcgcatggttgcttgccgcgctgctttgcttgccggtcgccctggcggaaccggcgggagagggaacgcaagagggcggcaatgtattggatcagttttttgtgacggagggcaatgagcccacgcagccgggtggggaacccacacagccgggcaatgaacccacgcagccgggtagcgaacccacgcagccgggtggggaacccacgcagccgggtagcgagcccacgcagccgggtagcgagcccacgcagccgggtagcgagcccacgcagccgg

SEQ ID NO: 465 - DNA, 15054 bp, Unknown
  16S sequences of unknown bacteria
ttcactttggagggcctgcgggccctccaagcctcccgaaaggtttttttgacagtctgaagcagtcctctcaagggctgctttttcttatgcagatgaaggaggaaactcatgaaacggttgattattgcggaaaaacccagcgttgcccaggccattgccgcggtgctgaacatccgggagaagaagcccggctatctggagggggcggacgtcctggtgagctggtgcgccgggcatctggtggaactggccgcgccggagagttacgatgcgcgctacgccagatggcggcaggaggacctgcccatcgtcccagggccctggaagtacgaggtcattgaaaagagcgcccggcagtttgaaacgctcaaacgcctcatgcgccgcgccgacgtttccgaggtcgtcaacgcctgcgacgcggggcgcgagggcgagctcatcttccgcctcgtctatgatctggcgggctgcgataagcccgtcctgcggctctggatctcctccatggaggaagacgccatccgcgaggggctgcggcagatgaagccggccgcgcactatgacgcgctggggcgggccgccctgtgccgggcgcaagcggactggctggtgggcatcaacgccacccgccacttttccctgctctatggacggacgctcaacgtcgggcgcgtgatgacccccacgctggccatgctggtggagcgcgaggcagatatcgccgcgtttcagccatccgcctattatcatgtgcggctggactgcggctccttcccggccgaaagcgagcgcacggaggatcgcacggaggcggagcgcatcgccgccctgtgcggcggcaaggaagcaagggtcgtatcggtggaaaccagcgaacgcagggaacagccgcccaggctctacgacctgaccgcgctccagcgcgacgccaaccgtctgctcggctacaccgcgcagcagacgctggactacgcgcaatccctgtatgaaaagcagctgctgacctacccgcgaacggacagccggtatctgccgcagggcatgacggagaaagcgcgtgggttggctgcttatgcggcggcggcgcttccatttgccgcggggctttccctgccctgtcatccccggcagcttgccggaaaggtcagcgaccaccacgccctgcttcccacggcggctctccgggatcacccgctggacgccctgcccgccggcgaaaggagcgtgctgacgctggtggcgacgcgcctgctctgtgccgccggggaggcgtgcgtgatgctggagacaaccgcccggctggaatgcgagggggtctcctttaccgccaggggaaaaaggacggtgcatccgggatggagggcgctggacgccgctttccgcgccacgctcaaaagccgggagcgcgaggaggaggcggacggcctgccgcccctgaacgagcgcatgaccttcctccccgtgacggcttccgtcagggaagggaagaccacgccgcccgaacggtattcggaagatacccttttgtcggccatggagaacgcggccaaagagaataccccaaaggatgcggaacgccgcggcctgggcaccccggccacccgcgccgccatcattgaaaaactgcttaagtccgggcttgcggagcgaagggcgttgcgcaggcgcatctgcctcgtcccgacggacaaggggatttccctgattaccgtgctgccggaggcgattcagtccccggccctgaccgccgcgtgggaacagaagctgcgggaggtggagcagggcgcgctggacggggaggcgttcctcacagacatcacggacatggtgcgggagctcgcctcctccgaacatcccgtccgggacgtgcacatgttgtttgccgacaaccgccgggccgtgggcgtatgcccgcgctgcggcgcttcggtcgtggaaaacgcaaagggtttcgtctgcaccgcgcgtggctgcggcttcgcgctgtggaagaaggaccgctttttcgccgccatgcgcaaggagctgacagcctccgtcgcggccgcactgctcaaggaggggcgggtgagcctgaaagggctgttttcccccggaacggggcgcacctatgaggcggacgtcgtgcttgaggacactgggacgccgtttgtaaagtatcgtctggaatttgcggaagggaggaaacgaaagtgagccaggaaaagaccattcgctttattgacaccaattaccggacgctgtttacccttcccgacggagggaacctccggatgaccttcccggacggcagaagcaaggtaagccggtgccggtatgtggacgagtaccacacggaggtggccgggcgggtgtaccacatctgcgagtttgccgggcatatggagcggggcggcatcgcctgcgcgccggaggagcccctgcccaggcagacggacaagcaggcgttccaggagcgccgttttctccgggctcccttcggcgcatatgccatctaccagctcagacgcgaggaggcgacccgcaatctgcgctttgaaccgcttgagcatcttcgggcggcggggctggcggtggaccgtgccaactacgatctcgtctacaccggcgccctgccgtcacgccccgatctgtcgcgggaagcgttgctcgaatcgctgtacgagcggttcaacctcgaccctccacgcgatttcaccggccatagcctgtccgtcagcgatgtggtcggcctcaagggaaagagcggcgtcagctttcattatgtggacagcttcggctttgcggagcttccggccttcctgcctgcccctgacagggctatggaggaggcaagccgtgcggcggagctggcggagcagccctttgcgctggtctcctttcggggaaagcccgcgctgctggcagactggcgcgtggacaggagcctgctgccccaggaaatttatgcgtatgacctgcggtatggggaggagtggggcgtgcctgtcacgctggaaaatcaggcgcgcgtcaatttttgcggcacgcttcttttcaatgaacctctgaccctttcgcccgacgggcgcatcacgctggacagggatgcaatcgatcatctggatggaaaagcgatctccctttcggaatttcaaaagcagcaggcgcttcagcgccggccgccgctgctcaagcggctcagggagccgcgccccgcgcagacagaacgcaaaccggcaaaagcagaacaggagcgatgacatgttcaatacgacggaaatgaatctcatgatcctctacaaccccggcacccgcctgggactgatggaggagctgggcaacatgctggggtatctgtccggggaggaaaccgggctgcgccgcacgacggtgggcgtcatccgcaagctccaggccatgaccgacgaggactttgaccggctcgacctcgatccgtccggtctctgcctgaaaggaaggtgaacgcatgcccgacagcaggacggacagtcttgtgcagctagcgcaggatacggcccggcgcatcaccggcagccatacggcgtggatggcgtatcttcaaaccgccgcgcgcctgtacaaatacccctatcacgaacagcttctcatctttgcccagcgtccgcaggccacggcctgcgcgggttacgaggtctggacaaacaccatgcgccgctatgtgcgcaggggcagcacactatgcggacctctttggctggcgggaattgtacggccttctgcttgttcagcctccgcataatacagaaaggatgcgtgagctgaaacaaccctctgtggcaaaaaaagagctaaaagtcctgattcacagcgatcattccgataggggccggtttcttaaggtggttgatagaaagagctcttgtgtatataataaaatggaaaatgttccgcctgtcgccagtgagagttgaacaatggggtgttgttgtggacattaaagcctatattggtgaagcgaccgaatacgataagaaggaagcgctggaagatcgcaggcccaaaagctggctgaaaagtgtcagtgcttttgccaacggtaaaggcggcgtcctgatttttggtgttgccaatgacggcgctcttaagggcctttctgatgtaaagacagcaagcgaaaaaatcagcgaggcaatcaagagcaaaatggacccgcttccaggcatcgatttgcagatcaggcgggaggatggaaaggaattcatcctcctgcatgtttctgccggggctgaaacgccctattactatatcggtgacggcggaaggatcgcttacatccgcgtaggcaatgaaagcgttcaggcaacggccgctgacctcaagcgccttgtcctgcgcggcagcaacagcacttatgacagtctttccacgctgtatcgatttgaaaacttcgcctttaccaaactccgttcggtctatcgtcagcgtactggtcttgaaatggatgcacaggatttcctctccttcggtctggtggatgagaggggcttcatgacccatacgggtgcgttgctggcagatgaatcgcccatgcgcttctcccggctgttctgcacccgttggaatggacaggataaagcgtccggcaccatggaggcactggatgacaaggagttcagcggaagcctgattgctcttttgcaaagcggcgaggaatttgtacgcaacaacaccaggaaacggtggaaaaagactgattatggccgtgtggaaatgcctgattatccggatcgcgccgtgctggaatgcctggtcaatgcgctgatacatcgtgactacatgattgccggcagcgaggtgcatattgatatttttgatgatcggatggagatttattctcccggcgggatgatggatggctcgctggtgcaggagctggacacagatcatgttccttccaaacgccgcaatccaataatcgcggatgtgttcagcagaatgaactacatggaacgccgtggcagcggattcaggaagatcaaagcggactaccatcgggccgtcaacttccgtgaggcgttggaaccaaaattcttctcggatcgcaacaacttcatcgtaacgctctttaatctgaactacggtgttgaggtcggaaaaacaatccttccgaagcaagaaccatccttcacgacaacggaaacaatccttccggcaaaaaaaacatccattgagaaaaagctgaacgatatggggttcacagccagaaccagcgctcatatcttgaaactgtatcagcattatagttacgaacagtgttttactcgcgcacagattgcggatgtccttggcataacgacggctccggctactgtactgattcggaaaatgaaagaaaccggactgattgagcttgccaacggtaaaagccgtggcgcataccatttcaaaaagatatgagcttttcgggaaaagcgccgtgcagaggaatgcgttatgtagtatcagctatcaggcaggaagacttaacagacacccgtcacatgaagattcttaaccctaaaataatattcagattctaaccggtatggcagctcatgccggtttttttattaccattgtcatgtgtttcgcaaacgcaaaattgatactggtcagaagttggaagattcaggagcatgatgcatttgtattggaggtgaatgaatatgccggataaaactctgacctatgtgcagctagcgcaggatacggcccggcgcatcaccggcagccatacggcgtggatggcgtatcttcaaaccgccgcgcgcctgtacaaatacccctatcacgaacagcttctcatctttgcccagcgtccgcaggccacggcctgcgcgggttacgaggtctggacaaacaccatgcaccgctatgtgcgcaggggcgcgaagggcattgcgctgctggatacctccggggacgcgccccggctgcgctacgtctttgacgtggcggacaccggcgagctttcgcagtcgcgcagcctgaacctctggaaactttcggaggaaaacgcgcaggcggtttcgctttcgctggaaaacggctacgacgtgcccgcccgcgaggggttggagcggcagctgcgcgccatctcttcacagcttgcgggcgcttgctgggtggaccgcaagcaggagatcttcgacatcgttgacggttcgtttctggaggggtacgatgaaggtgcgataggagcttccttccgcagagccgcatccgtcagcctggaatacgcgctgcgttcccggtgcggactggcaaacgaggggcgcttcatccgcgaggacttcatccccgtgacggaatggaacaccccggaggcagccgccgcgctgggcacggcggtcagcgagatgagcggggaggtcctgcggaccattgaaatcagcatccgaaaccatgaaaggagcgtcgaacatgatcgcctacaggcagaacggagagaccctgattcccgacctgaagctcagcgaaacggagacccggcccctgggcaggtacgcgcggatgcgcaggacgtacctgcaaacgcatcggacgatgctgtggaacagcctgctgctaagcgggacattgcaggagcacctgctggagaccgacgcggcggcacagagccgtctggagctgctgatgccggagctgatgaaggacgcgggcgcgacggaggcattgaaagccagcgacccgatgcgatgggtcggcctgatgaacgcctgcaaggcgcaggccgaggaaatcatcctcagggagctggtgtacagctaagttttctggagggccttgcggcccagcccggtacggaaagagcggagagcgatatgccctccgctctttccattccccaggaagtggtggacgaggtactccgggtgggcgggaacacggcccatcaccgggaacggatcgtcgctgcctttgagaagcagaaacctgataccccggatttcctgagaagcctcctgcatggaggaaacggaatcgtcaccgatgcaggaacctttgccgcatggtacgacgagaccggcattcgtatctcacgcgggcgctccgcccggcatgctccttccgcgaggctcgttttatggcaggaagccgcaggccgtatcggacagcttctggaggagggacggtttgccgccaatgtggagctggccggggccgaaggatacgaacgttttcggcttgccgaaaagctgtggtacctgcggcaggatttcagcggaaaagccatagacgccgggtatctgtccagcctcgccaaagacatggaaggcggtttccaagaggggaccgaatggcttgctgaaaagctgacggaccctgcgtttcgcgcacggcttaatagcgagtaccggcagtttctgtcggatcagcagcaaagcggcgatctgcttcggtttcactttcaccggctggatgaaatactggaagcccttgaagaccttgaccttcctcgcagggccttttcatctgaaatggcggaaattccgcctgcccggcagttcatcaccgaagatgaaatcgacgcaaatctggcggaaggcggcctcatgtccggcagcaagggacgcatctttgccttttttcagcagccctactccgacagggaacgagtggattttctcaagcaggagtacggtacgggcggacgttcgcacgcgctgtccaatgcggatggaagcgacgaatcgcatagcggaaaggggatacggtatcaaaaaaggggttgccctgaggtgcgtcttacctggcagaaagtcgccggacgaatcgccgggctgatccggcagggcctttatctgactgagcgggagcaggcagagcatgaccgaatccaggcggaaaaggtccaggctgaaaaagatgccccgcaagccccgcagccggacccggctgtgtgggaatacaacggcgtcaaggaacgccatccggatgatctggtcctgtatcagatgggcgacttctttgagctgtatggcgaggatgccagagaagccgcgccggagctgggattgcagctggtctcccgcgccatccctgggggtgggcgcgtggagatgtgcgggtttccggcaaaccggctgaatcagtacctggaacagctccgggccaggcatgatgtgacggtttccaccgcgtcggagggcagcgcccagcgtcgggagtattcggttctttctaccggccatgaagcgcaacaggagctgcatgagcaatacaagtccattgtgcgggaggccgtcacccaagacaccgcataccgcaatgcctgcggccacagcgactacgagaacgctgtgatcgagggccatgccgctatccaccgtgctgtcctgggggccggcaatatggggttgctccgcgcctattccgatatgccggagttccgtcagcgcctgcaccgggaaatcatcgacgagacctatcccaagctccatgagctgctgcacccgatctcggacgatgacattgaccgggctatccaggactggaatggcaagatcgagagcaaacatgccgttgtccgctacatgaaagaacatgggcgggagaatgacgccgccgcatggctggccaatgagtttgacggcgacgacggaagcaccccgtttgcgatccgaccggaaagcccggaaggaacaaatctgccctggcccgcggtgcagcgccggatcgcccagcttatcacggaggagcgcttcttcacccaggtcgaacaagacaacttcgacgatgtggactccgccgccatccgcgaggcgctggaaagacgcggcatcgtgggcggacaggtggcggacccggagagggcggaaagcgacccgtttattcagcaggtcatggctgatgcggagcaggcatccgcttccccggaggaggctccggatgggaccggtgaaaccccgttcccgtatgccgtgggcgatacggtccgtctggaggacggaaagccctttgtgatcgaggaggtcggaacctttaccatcaggctccgcgatccgtctctggcctatcccatcatccgcgccgaaagcagggagggctttgcgcggctcatggagcgatatccccagaccgccctttcttccgcgcagaatttccgcatcacggatgacgatttgggcgtgggcggggcaaagacgcggtatggctggaatgtcgcggccatccgtacccttcgggcgctggaggcggaaggccgtcccgccacgctccaggagcaggagaccctctcccgctatgttggttggggtggcatcccgcaggcgtttgacgcgcagaacgaggactggcgcagggagtacgcggagctcaaggagctgctgtccgagacggagtacatgtctgcccgcgcctccaccctcaacgcccactataccagccccacggtgatccgcgccatttatgacgctgtggaacagatgggctttcgcaccggcaacattctggagccggccatgggcgtgggcaatttcttcggcctgctgccggagagcatggcgggcagccgcctgtacggcgtggagctggacagcctcaccggccgcatcgcccggcagctctacccggaagcggacatcaccgtggcagggtttgaaaccaccgaccggcgcgacttcttcgacctggccgtgggcaacgtacccttcgggaattaccaggtcaatgacaaagcctacaacaagctgggcttttccatccataactatttcttcgccaaggcgctggaccaagtgcgtcccggcggcgtggtggcttttgtcaccagccgctacacgatggatgccaaggattccaccgtgcgccggtatctggcccagcgcgctgagctgctgggggctatccgtctgcccaacaatgcgttcaaggccaacgcggggaccgaggttgtgtcggacatcattttcctgcaaaagcgggatcgtccgctggacatcgtgccggagtggacgcagaccggccagaccggagacggcttcaccatgaaccaatatttcatagaccatccggagatggtgctgggacggcttgctgctgaaagtacccaatatggcagacaggattacacagtgattcccattgatggcctggagctggccgatcagctgcatgatgccgtgaagtacattcgcggcacctaccaggaggccgagctgccggagctgggcgagggcgaagccatccgctccgccattcccgccgacccgaatgtaaaaaactacacctataccgtagtggacgggcaggtgtattaccgggaaaacagcctcatggcgcggcccgacctcagcgccgccgccgaagcccgcgtcaagggcatggtgtccctgcgggactgtgtgcaggagctcatcgccctgcagatggaccccgccacgccggacagcgccattcgggaccagcaggccgagctgaaccgactctatgacgatttctccgccaagtacggccttatcaatgaccgggcgaaccggctggcctttgccgatgattccagctattatctgctctgcgcgctggagattgtagacgaggacggaaacctccggcgcaaggccgatatgttcacccggcgcaccatccgccccgcgcaggccgtggaccatgtggacagcgcaagcgaagcgctggccctgtccatcgcggaaaaggcgggtgtggacatggcgtatatggagcagcttaccggccaaacgcgggacgagctggcgtcccagcttcagggggcgatctaccgtctgccggaatccgcgggagacgagccatgctatgtcaccgcagacgaatacctctccggcaacatccgctccaagattgcctctgccagactggccgccgaaaaagacgaagccttccagatcaacgtatccgcgctggaaaaggccatgcccaaagacctggacgcctctgagatcgaggtccggctgggggcgacctggattccgccgcgctacatccagcagttcatgcttgaactgctccagccgcccatccaggcgcgctaccggctccgggtcgcctattcctccgcgaccgccgaatggcaaatcgagaacaagagcagcgtccccgcgcacaacgtggcggcctataccacctacggcaccggccgcgccagcgcatacaggattctggaggattcgctcaacctgcgcgacgtgcgcatctacgacaccgtgcaggatgcggacggcaaggaaaagcgcgtcctcaattcaaaggaaaccaccctcgcccagcagaagcagcaggctgtcaaggatgctttccgcgattggctctggcaggacccgacccggcggcaggagttgtgcgcccgctacaacgagctgttcaacgccacccgaccccgtgagtacgacgggtcccacatccgtttcagcggcatgaacccggagatcaccctgcgcaggcaccaacgggacgccatcgcccacatcctttacggcggcaactgcctgctggcccacgaggtgggggccgggaagacgttcgagatggtggccgcctgcatggaatccaaacggctgggcctttgcagcaaggccctgttcgccgtgcccaatcacctgaccgagcaatgggcctcggagttcctgcgcctctatccctcggccaacctgctggttgcctccaaaaaggactttgaaaccaaaaaccgcaagaagttctgtgcccgcatcgccaccggcgactatgacgccattattatcggccactcgcagtttgagaagatccccatcagccaggagcgccaggagcggctgcttcaggagcagatcgacgagatcgaagcgggcgttgagaagctcagagcctcccatgccgagcggttcaccatcaagcagctggagcgcatgaaaaagcagctggaaaccaagctgcaaaagctcacttccgccacgcgcaaggacgatgttgtcaccttcgagcagctcggcgtggaccggctgtatgtggacgaggcgcataactacaagaatctttttctgtacacgaagatgcgcaacgtggcgggtctctccaccacggacgcgcagaagtccagcgacatgtatctcaagtgccgctatatggacgagctgaccggcggccgcggcatcgtgtttgccacgggtactcccgtgtccaactccatgacggagctgtataccatgatgcgctatctccagcacgacctgctcgcctccagaggcttttcgcacttcgattgctgggcctccaccttcggggaaacggtcacggccattgagctggccccggaggggacgggctaccgcgcacgcacgcgctttgccaggttcttcaaccttccggagctgatggccatgttcagggaggcggcggacatcaagaccgccgaccagctgcatctgcccaccccggaggcggtctatcacaatgtagtcgcccaaccaacggaaatacaagagaacatggtgcaggagctatccgagcgggcggcggaagtgcatgccggggtggtcaaccccaaggaggacaacatgctcaagatcacctcggacggccggaagctggggctggaccagcgcatcctcaatccgctcctgccagacgacgagcgcagcaaggtcaaccagtgcgtggaaaacatcctgcgcatctggcgggagggcgaaagcggcaagctgacccagctcgtcttttcggacctttccacgccgggcggcgagggctttaccgtctatgaggacatccgccggaagctgatcgcggcaggcgttccagaaggggaaatcgccttcatccacgacgcgaacaccgaggtcaaaaagaaggagctgttcgccaaagtgcgcgccggtcaggtacgggtgctgatgggcagcacccagaagatgggggccggaaccaacgtgcaggaccggctggccgcgctccatgacctggactgcccctggcggcccggcgatctggagcagcgcaagggccgcatcgtgcgccagggcaaccgaaacgacacggtacacatctaccgctatgtgacggaaaacaccttcgacgcctacctgtggcagaccattgagaacaagcagaagtttatcagccagattatgaccagcaaaagtcctgtacgctcctgcgaggatgtggatgagacggcgctgtcctacgcggagatcaaggcgctgtgtgcgggcaatccgctgataaaagagaagatggacctggatatcgaggtggcccggctccggctgctcaaggccaaccaccagagccagcggtttcagatggaggaccggctgctgaaatacttccctgtcgaggttgaaaagtgccgggcacaggtcggagggtttgaagctgatctggaaacgcgaaacaatcatcccctgccctcggagggatttgtgggcatggaggtgctgggacacacgttttcagacaaggaagaagcgggcaaggcgattctggaagcggtcaagaccgtggtggatatgaaaagcgtgcggatcgggcattaccggggatttgaaatgagtctggaactaagctcctttggacgggagtacatcctgacgctccggggcagcatggcgcatttcacgacgctgggcagcgacccacgcgggaacatccagcgcatcgacaacacgctcggctccatggaaagccggctgaaaacggtccaggaccagatcgccacgctgcaaaaggagcaggaggcggccaaagaggagatcgcaaagccctttgcgcaggaggacgaactgcgggagaaaagcgcgcggctgatcgagctggacacgctgctggacattggcaagggcggaccggaggtcatgccggagggcggcgagccggaagcgatggaggcggcggtgccggacgcagcgcaaggcacacgggagccggagagaaaggagcgaagccgtgaggaggtccgatagtccaggaaacgcgggcgaagtgaggcgcatcaacctcatgttctgggtcacgccccatgaaaacgagctgatccggcgcagaatggcgcaggcgggtacggcgaatctgagcgcctacctgcgcaagatggccattgacggcctgattgtccatctggagctgccggagctgaaagagatgatctcgctgcttcgccgctgcgcgggcagccttaaccagatggcaaagcgcatgaacgaaaccgggcgcgtctatgaggtggacctgcgggaagcgatggaacagcaggaacggctgtggggcatggccaacgcgcttctgaccaggctggcggggattcggtagggggcggcctgcgggccgcctcttttttgcgtgagtgaaaaaaagggcgaaaaacgccccgaaaccctgcaaaaagagaaaaagcccatcggacgacccacccatccatccatctttcccaaggggcctgcaaacgaaaaaaatccgccaaaatcatcccgaaaccatacagaaaaaaggaggaacgcgatgccgagaatgagcaggaagcggcgggaggaatgggacttcttcctcaaccgccgaaaccggatcacctacaacgacctgtgccgcaactgccggcatgactgcaagcagagcttccgggcgcagatcgtggcctgccggaagtaccggagcaagaggagcgaaacatggcggtaacgcgcatcatggccatgcacctgaacaagggccgcacgattgcccaatgcctgaaagaccgaacggactatgccaaaaaccccggcaagacaatgggcggcgagctgatctccgcctttggctgcgatcccaggaccgccgacgcggagtttctctttgccaagcggcagtaccggcagtttacgggccgggagccgaaaaacgacgtgatcgcctaccagatccggcagtccttcaagcccggcgaagtgacgccggaggaagccaaccgcatcgggtacgagctggcgaagcgttttctcaaggaacgccacgcctttttcgtggccacccattgcgatacggctcatattcataacgtacgcccggatagggcaatgagaaaagcagtataaggtactgccccgtaagata

SEQ ID NO: 466 - DNA, 10640 bp, Unknown
  16S sequences of unknown bacteria
ggacaagccgtctttcaaaaccgcctcaaaactgtaagttagtacgaaaggtatgctcataaaaatgaatctgtatgtatataccgactcttccttcaggaagactctctggttcatgcacatcctgcgcggcatcgctgaagaggctgaaaagcggcattaccagctcgtgcttctcgacgagatccctcacagcgtggacgatatttacgacaacaatctgaatccggtgatcatcgtcgccggaaactccgcggcggcgctcggcgagccgctgaaaagaatgtgggacgccggaatccacacgatcctcgtcaatttcacgtctgatattccgtcgccgcactcgagcgtcataatcatggactacgccgacgcggtgatacagggcatccgcgccctgcgtgacggcggacggacaaaaaccgctcttttcggcgtctatcctgactccggaccggacaagataaaattgaaaagctacctatccgaaatgtcgcgcctgggcatcgtgtcaccagaaaatgatgttttcgcggtttcaaaagacctcggcgagtgcgtatccgactttctgaccgtgagcgacagatacgactcggtaatctgctgcaacgatcttgccgccgtcgcgcttaaccgcgctctcggagaacagagagggaagataacgctcgcagggttcgttgaccggatgatctcggatttcacggtgctcgttcccgggataatcacgctctcggcggagcaccgagagttcgggcggcaggcggtcaagctctgctcatggctgcaaaagaacgatattgaggtctccgcgacgatcagagttccgatgagcataaacgacccggacgacgacatgatcgacggggatgacgatgtcatgagcctcgagacactgtccgaagacccgctcgcgaatgagattctccgcgtcgagcgctgtctttcggtctgcgaccgtatcgacatattgattattcgcggactgcacaacaagctgacacgtgccgcggtagctgagtccgtcttcatctcggaacgcgcggtcggctatcggctgaaaaagctgtgttctgtcgcgggatgcgacgacgcgacggcactcgcagctctgctcggaccgtggatcgcggataaaggggatagcaaatgaacgcggataagctccttatcttcggaaagggatttcagtattcaagggacggcaccggaaaccggcttgtctttcatttgcagggctgcgacctgcgctgtccttggtgcgcgaatcccgagggaatgtcgcgagaaccggtgcttctgcaaaaggcaagcgtcattcccgaatgggtctgcaagaatttcgaccgctcaaaatgccgttcatgtgccgatcgcacctgtctgaagccgaacggcatcctcgtcctgtcttcacgtgaatacactgtcgatgagctctgccgtgaagccgtctcggcaaaaccgatgatgtacgacggcggcggagtgacacttacaggcggcgaggtctgtgtgcaggctgagccagccgcagcgcttctcgcagtacttcgtgagggcgggataaacacaatgattgagacgaatctttcgtcagtgaagctgccgctcctcctgccgcatcttaacgcggttatagctgattacaagcactatgacgcggatatactctcacgcgtcaccggcgggcggctcggtatcattgaagataacatacggttgatacttgagcgcaggattccgttatcgctcagaattccgttgatacacggtttcaacgattcgactgacgcatctgagaaatttgccgccgctctgacagaatttgcggagtacggaaaattcacggtcgagctcctgccataccacgagtacgggaaggacaaatggcgagagtgcgggctcgaatacaagattacggacggcttcgtcacggatgatttcgtccggaaaatggaaacggcgctcagaagctcgggaatagagctcaggaaaacataatgctttggaaaggaaattttatgcgaacaatcgaaaaactcggcggagcaaaaaacatttcagagagcgcgaaagcccttttcgccgctgaaagagcgcggaaacgccttgacggctggttcctctgccgtgagattgccatgctccacgcggatgaggcgaaggaacttccgctgtccgaaaaggcggcgttcacactcgcgagaatcgcggaagagcttccgctctcaatagaagaggacgcgatattcgccggaacccagcgcgacgccttcgcgcgaagctacgcgctgatcaacccgactttcagggtcgagagcttcggaggctactgcgacccggcggcggtatacaatgacattgaaccaagcgcggaattcacgaccgaacgcgtagaaaaggttcgtgagttcgacaaacggagcgattacgcaaagaaactgacggtggcgtatgacgcttcacacccgtataccgatgaggtcgcgtacttcatggagcaggtaacgggtcacgttatagccgattaccgcggcgtgcttaaatacggaatcaacgcaatgatcgcggaaatcgacagcaaaacaccggctgacgacgcgtcgcgctccgaatacaaggcgatgaggaccgcgctctcagccgtgctgactctcgcgggacgttactcagatctcgccggcgaaatggcggaaaaagccgatggaatccgccgcgaaagactgctcacgatctcaaaaaacctgaaaaaagtcccggcgaatccctctgagagcctttatgaggcgatacagtcgtacattctcgtctggcaggcggtatgccttgaacaggcgccgaatccgttcgcgctctcggtcggaaacgccgaccggatattcgagccgtaccgcgcgttgagcggcgagacccgtgaggaagccgccgcgctgttaaggcattttctggtattcttcaatgtcggcgaccggagctgggctatctcgcagaacatattgatcggcggcagggacgctgacgggaatgaccttacaaacgagacctcatacgcgcttctcgacgcctattatgacatgaatctgccgcagccgattctctcggtcaagctgcattccgatactcccgaccggctttacggtgaactcggaagattcttcttcaccccgggctgcctgacgccgtcgttcttcaacgacgatatgctgttcagaattctgtccgacgcgggagtcgaccgcgaagacctcgccgattactcggtcgccggctgtcaggagccgctcattatgggaaaggacaacggcaacacgacgaacacatggctgaacctcggaaagatactctagctgactataaacgacggcgcgtcgatgctcaccggaaagcgcattctgccgtccgatgggtgcgacgccctcacaaggctgaagacgctcagggaacgcttctacaaaaacacgcgattcatcgcagacagaatggctgagtccggaaacgcctgctcgtccgcgctgtcggagctacgagttccgctgctcagctcgctgatgggcggaatcgatagcgggtatgatatgcgcgacaccgtgaatcaagggacgaaatacaacggcagcggctgccttattcacgggctcacggtagtgtcggattcgctcgtcgcggtcgaccatcttctcgcggaacacccggaatgggcggaaaggcttatcaccgcgctgaagaatgacttccgggaggacgacgagataaaacattatctgatctcctgcccaaagttcgggaacaacgacgatgaagcggacaacgaggcggtcgacgtggcgatcaaggtctcggcgatcgtcagcggggaaaagaactacctcggcaacgccttccgcccggatttcagcacaccgtcgacgcatctgctttatggttatcacgtggcggctctgccgtgcgggcgcggcgcgcgggaaatgccgaactacggtgtcgacccgctctacggcgacgcgaactcggggctcgggttcagaacgctctcgtcgagaaagctgccgttcggactgatgcgcggcggctacgcgtcacatctcggcattgacccgggatatttcagggaagaaagcctttacgacaaagggctcgcgttcaggaagagagtccttgacccgctcttcgagcctgatgacaacagaaacgcgccgttctatctctacctcaatataaccacgccggagatactgagaaaggttctcgaaaacccgaagaaatacgcgccgtcaggcgtgtacatcatgcgtattcatggtacatttgtcaattttctcgatctctcgccggcgattcaacaggatattatcaagagacttgatccgtgctcgacacggatgggataaaaaaggagaatgaatatgaaaataaaagcaattgctacactatcgcttgttttttcgtttatcatggcgccgtcaggatgcggagtgcagagtgaaataaccgatactacaacatttgctggctcggaagagacctcgacagaaaatgctgtcacaacgaccgaagcccctgatcttcctgaaacaaatatgaacgggaagaccttcacgttctttaccgaaagatgggacaattatgcccctatagacatagatgacctgactgccgaagaaataaacggagagattctgaatgacagggcatatgaacgtcagaagaatattgaagaaagattcaactgcgtgattgagcagctgtcatacaacaattccgacttcaatcagcttctgaacgcgatatcggcaggtgaagacgcgtatcagatagcccttttccgcgcgactcacttcaacaaacttctcacgagcggctatctgtctgcgcttgacacgataccatatcttgatcttgaggcggattggtacgacaccaactcattcgaaacgctgcgcgttcttggcagaaatctcgggatcgtctcagatatcacgatgacgacaaataaaatggtcggctgtacgtacttcaatcagaacatggcggaagattacgggatcggtgatatatatgaccttgttgacacgggaaaatggacctgggacgctctttactctttcggtcagcttgccgcatccgatctcaacaatgacggtaaattcacaattgatgacagattcggattctcatacataaacgatattccggtctgcctgcttcaaagcggaggtgtaaccttcgcaacgcttgacaaagatggtattccgacgattacattcgcggaagagtccaacatctcaaagatggaaaagctctggaatattctcgcagatacggcaaccagttataatgtgcatcagagaagcgtcaactacaatcgcgatgaagttggcatttttatcgatggtcatgcactttttacgcttgcgggcatatattacgcaccgcagttccgcgacatgaaagatgatttcggaataattccgcttccaaaatatgatgaagaacaagatagttacagatctccggtattcacagcaacatttataataactggtgtgcctgttacaaataatgatcccgaaaacaccggaatgattatagaggagcttgcatatgaaggataccgcgatatacgtccggcattctatgacgttaccctccagggcaagataactcgcgacgacacatcaaaccgtatgcttgaccttatcttttcatctacatgctatgatcccggactcgcatatgattttggcaatattaactcgactatggcggagcacatttcgaaactgaccggcaattttgcttcgtcatttgcttcaataaaagataaagcacagacaaatatcgacaagatgatcgaagagattgaaagtactcaaaactgacgcttcgataaacgattatgaaagggaaatcttcatgccaaccaaaaccttcctcctgaccaccccgaccctacacctccccatcgaggacaccggccgtatgtggtacgttaaaataaccaacgaatcgaccagagagcagtttgccgagttttatctcgctctgaccgagcggaaaccggacttctactgcccgctgcatctcgacgcgcttgtcgggaagacggtcactctctcgtgtgaggacgacgatgtcccggacacgctgttcgacgggataattcccggcgggtggatagaggatcgtcctgatctctatccgggcatctacagagaacccgagcgtcagcagctgcacttctcttcccgccgcggctggctcaatgacccgaacgggctcgtctttgtgaacggcgagtttcatatgtgctaccagcacaatccttacgggccgaatcacggcggagtcaatgtcagctggggactcgctgtcagcccggacggcgtgcatttcagggaatatcccgacgcgatacgcccgtccgactcacagacccatatcgcctccggaagcgcgatcgtcgacaaagacaacatttccgggttcggcaaggggacgatactcgcgacctacacagctctccagtcgtcgatgttcaagggcagaaaacagacagccggaaaccgcggtcagatactcgagtacagtaccgacggcggattcaccttcaacaaattcccgaaagaaccgattataccggttccgatgggcgagggctggcgcgatccgaagctgctcttcaccgacgagggtaagctctgcatcgctgtctacgaaacctttgaagggaaaaactgtgtcagcttctattcgtctgagaactgcgtcgactggaagttcgagtcgcgctcgcctgatctctacgaatgccctgatctgttcccgcttcccgtgatcgaaaccggcgaacggctgtgggtgctttacggcggaaacgggaggtatcttgtgggcgagttcaagaactatcacttcacgccgatgggaaacgaaggattcctcgattacggcagcgcggtgtacgcaggacagacatggaactctcatccggaaaataccgcgcggtatcacatcgcgtggatggttgaccatggctacgcgtggaaatacgacaaggaaaagaaccacggcgtgccgttcgccgagtcgatgtcgctcgtctgccgtctggagcttcacaaggtcggggaggatttcaggctgttcagaacgccgacagaaaatatcgacaaactgcgctgcggtgcggagagcttcgcggcggacacagagctttttgtccccggcgactgcgaattcacgctaccgaccgacaatgatattacggtgaaagtcggcgaaaacggcttcacttacgaaagggcaagcgggaaaatctgcttcaccagcgggaaaagctatactccgaagcacgcggacaagattaagatgcgcgtaatcactgacgtccgctctgtcgagttcttcatcacggacgaggtgtcggcaacgtttaccgacgcggcggacaaaaaaacgctccatatcgatggagcggaggtttcggggacaaagtggaagatgcgcggaatttgggcgtgaaaatcaggtgaattcacttctcgatgtcgtgctccggtcgttcacgccttatcgcttttgacagcgaatcaagattacggaagccggtaagtttcagcagctcttctccgcctatcccctgatccttgagagcaatggcgcggctcagccgcaagcgcatgagatactgatacggcgtcacatccatattcgccttaaacagccttgtgaaatggtcaggacagagatgcgccatgttcgaaagctcagagacgtggatatcatctgtaaaattctcgtttatgtattcaactgacttgcgtatcaccgggtcaagccggtaatttatttcgaatctctcggaaaggtgtgtgagaagggcgtcaaacagcatacataacaccctgcatctgggattcgatgacatttgcgggaaatagagacactttacggaaatatcatcaaagatctgacgcatagccctcagaattccgagcgtgatattatcgtcctctgccatcataccgaatatcacgtctgaaattatcggcgggacagtgctgaaatcaaaataaagcagcttcattttttcagatgtgtactgcttcatgatgaactcgagatttgatgggaaaatatatactcctccggtcctgaccggatattcgattccgttgcgaaaaaagtaagcctcgccttcaagcacataatacagccgctgacggttgtatttgtacttgcagatccagaagcggtcggcatcgttgtactgcacgccgcaatcaaatatattaaatgaaaagtagctcattgcgtcctccggtaaaagtcggttttgtccgggtaatactcggtttatactcttgcaaagagcgccccggatgttgtataatatacacagatattatagtacatatcctggggtttgtcaatataattcagaatattttttgtatttcgataagatttgtctgtccggacgtcaggacagacgaacgcatcaaatcgtattttgcaatataatcgaggagaatgttaccatgtcagaaacgaaaaatctcaagaacctcacaagaaccgtgtcgttgcttctgtgccttttatctgcggcatccgccttttcctgcggagagacccctcagacggacgacacgcagagcagcaccgcgacatcggatgaaagcagcgcggaggaaacaaacagccttccggcgtcgatcgccactctgccgaaatgcgatgagacgaccgaaataaccatgctgacgaccgtccacgctgagtacgagttcgggaacgaggagctgtccggagacgtcgtgaacgacgccgccgaggagcgcaaccgtgtggtggaggaccttctgaacgtaaagctgaactatgtcgtgaagcccggtcactgggcggacaaagattcgttctgcaacctgatatcgacgagcgtcatgtcaggcgacggcgcgtatgacattgtgaacggcgttatggtctgcgtcatgccgactataaccgacggactttatatgaacatctacgacgtgccgaacatcaacatagaaaatgactggtgggtcgacggtcttgacactcaggcgtcgattgccggaaagctcttcgctgtaaccggtgacgctcagctgtcattgtacaaggatcaggcgtgtatgtatttcaaccgccggatactgaatgagaacaatctcgacgatccatattcgcttgttcgttcaggtgactggacgcttgacaacatgacttcaatggcgctcgcggcggtgaaggatctgaacggagacgggagcctgactccggaggacgatctgctcggatatatagcccagctgaccgtgaacaggagcttacaggaaggcttcggactgtcacttttcacggatgacaaaaacgggaacatttcattcacaggcgtgaccgaaaaatacgcggacgcgtacgcaaaaatgtggtcattcttcgtcggaaaccccgcgacctacatatacaacgaacatgagccgataaacgctatgttcatgtccggcagggctctgttcaacacgaacttcctgagcgcgaccgacaatttccgcgatatggcggatgatttcggtatagttccgatgccgaaatacgacaaggcgcaggatagctatcacacccgcatcggcacatcgacatcgatgttcttcattccgaagacggtgtccgacgccggaacggtgggcgcggtctgtgaggcgctcggctattacggcatgactgacgtcgttcccacatggtatgaaatagcgctgaaggagaaatacacgcgcgacgaggatacgaaagatatggttgacctgatacgcgcgagcgcgtcgatagccttcgactgtgttttcgcgcagaatatgtccgaggcaacatgcacgtatttcgcgttcaacgacgacaataagaccatcggtgagaatatcacgagctacgtcgagaagaaatcgacaaaaataaagaccgagcttgaaaagctgaatgaaacggtcgcaaatctggactgaatcggagaaaaacgatgcacactcctatgatacttcttcccgaccgcgtttatatcctgcgcgaccgaaaaaaacagacgataaagacaaaccgcgaggaatacaatatctactttgagaacgtaatctttccgtatctgccgggctatgacgttcaggtggactgtaaatacggaagaaatctcggtaatttctggcggatagatgactttccggacgagagcgggtttccgctcgcgataaggatcttcgataatttcaccggagagcttctctgtgaaaaggagacgaccgtatttctcgcggcgtcaaggcagcacgaacgccgattcacgcttctcgcgataggcgacagcatgacgcagtccgagatatatctcgaacacgtcgcgatgaagctaaaaaatctcgatttcgttggcacgaggagcttcaacggcatcgtcaggcacgaggggcgcggtggctggtcgtcgtcaacatttatggagaagaccggggacagatacggtatgtcgccgtttctgttcccggacggcgtcgcgccggaggaatattatggtgagatatccttcatggagaacgccggagcgg

SEQ ID NO: 467 - DNA, 32759 bp, Unknown
  16S sequences of unknown bacteria
tatttctattttataccgtctcggaggtttacacaatatctaaagaagtctcatttttcactcaaacgaacaacgctgatgttaccgataggtgtcccttcgtattccataacccaattatatgcgcttggattttcgtaggcagcacaccaaagttccaagagttgccttgttgcttcaggtgactcgtgaggacaccaagttaggtaacgtgtaactctttcatcgcttgcccaattctcaaacattgcttgagcatcgtcaacggtaaattttcgtagtataagtctgtctgtatgtatagtttgcgttcctttatgtgtaatcattttttagtcctccaatctgtattccattctgcggatacggtctgtcattccgcaattctcgtaaaatgcaatcgcatccttgttaaatccccaaacaccaagctcaatcattttgcatttcttctcttgagctttttgcttgcagcactcgaaaagtctttttcctatcccgtttctttgatgagatttcaagacacaaatatcatcaatgtagaaacagtcaaagtcaatgtatgtagagtgatttctgtaagaaacaatccaggcaaaagcatatcctactacctcgccgttatcagtttcggcaatgtagatagtatgtttcgaatcgcttaatctttctgcaaatgcttcctttgtaaagtagcgagcttcggttttgaataagtcaggtctgccattatgatgcaagtctgcaatttctttctgaagcgggcggatacgctcgcaatcatctatgacagcagttcgtatatttatgttcattctctctattcctttctgaatatatcaagtgtgtgatgagagtatccaatcatatcttgcctttcgcaaattgcaagatgatactttagatacagttcgtacattcggtcatccatttggtctactgtttctctcatatgatttgtatagccatccgaagcaacaaagtgaagctgagtaacattgaactctgaacggagtttatcaatatcttcctttctgtgcagttcgaatatgtcccacggatttgaaaaagtatcaaatgtttctgtgttgagcatacatttttcaataatgttgtagatttcgccacgaatgaaaccgtatgacaaaacacttgcatcacccatacaataagcggcaaaaatgataccgcctttcttggtaactcggatagcttctgataaggcttttaacttatcttctcttgtaaataaatgatacatcgggccgagcaacagagtaatgtcataagtgtcgctctcaaaagcagacagatccatagcattaccttgtgtgattgtgacgggttcaccttcaatggtgttttgcttgaagatttcgatattatgctcaactaattcgactgcatccactcgatagcctttctgtgctaaggcgtgactatatcgacctgttgctgcgccgatctccaagactcgcatatttggcttgagatacttttccacatatttcatagtggtaagatattccaccataccgtgtttagagataagacgaccattttcatcatatctctcataatagtttgttaagtagtcttttgtttccatctcgaaacctcctataaaaagtataaaaaaacagtgcaggctaagattcactcatagcttgcactgcgtttagcttaatcaaattagaaaaacactctaattacttgaaaaagggtatagcaatgtaagcccgttgttctgccaataataagcagggactgcggactgcataaagactacattattaaaacggtcgatacgattcaacattgccttacctcctaaagaattttatatattatactcctcagtttttcttatgtcaagtacattggtgaattttataacttaaagtaaattctcaaagtaaatgcaacagtagaatttacgattgcatttagtgagagaaagattttgtggtagcattaagtctgagaaaaggaggtctcagacaatgagcaaaaacaaacatttaacccttgatgacagaatagaaattcaagagtgcttagccaaaggaatgacattcaaagcgatattgaggcgcatttaaccgaaactattgactacgaatcagttgcggcacaaagcttttcgtcaagctatcattttcagcgtgtgttcggtattctttgcggatttaccgtcggcgaatatatcagaaaccgcagattatcgcttgccggcacggagcttgccgcaggtggcgcaaaagtaatcgatgttgcgctgaaatacggctatgaaagtccggacagctttgctaaagccttcaagaaattccacggaatattgccgtccgaagtgaaaaagggcagcagcaatttaaaattgttttcccgtcttgtcttaaaaatttctttggagggtggaacacttatggattacaaaattatcgaaaagcccgaaatgatattaacgggctataaggagcattttacgggagtgccatacggtgaggaacggaaaatccaagagggcgaattattcaaaacaacaagggcaaagcaatggcttttgcgtggtgcaaagggcgcgtccggcgatacggggactgatatgtgccttattacgaatatttcggataacgggtacgacttttattatgccgccgagcttgaaaaatacgagcgtgaaaatatgtataacacggcagttacaggctttgaatatatgagggaattcggcttcgaaaacataacggttccaaaacagacctacgccgtatttacaaccgaaaatcagtcgtatcccgttgaggactattttgatataagaaaacgaattgtatccgagtggttgcccgcaaatagttttgaaattgcaaacgcgcccgagatttctgtttatcactggtttccgaaaaatgaaaaagaaaaacggtttattgaaatttggctgccgataattcaaaaatagcattttgtcgcccatattcgtgagcggcattttagaactcatctgctcaaccaatggttgcatagcggtaaacggatatgcagggaaagatagtatttctcattgacgcagacccgcagggcgacttaacgacctgtctcggttggcaggatacggacagcttgggttcacgcttgcaacgaaactcacagatgtaataaatgagacgatgaatgactcgatggacggtgttttgcaccacgaggaaggaatagcacgcggcaggcgtgctttttctcctgcctccgtcggaaaaatccgaaataatgcacttttgcttttgtcgcttttttgcaatgtcttcgccggttcgggggtattgctgccgcctgcgttttttattcatatacggtataaaatcagaatagggataaataatagttacgaattgaacaacgctttggtaaatgccgcatatgcggcaagtgaggggcaaaatgaaaaaaagaaacagaatagaaaacgtttttgcacacgagataatagactcacgcggaaatccgacggtggaggcttttgtcggcacattttcaggagagtgcgcttctgcttccgcgccttcgggggcatcgacaggctcttacgaggcgcatgagctgcgcgacggtgatcgtgagcgctacggcggcaagggcgtgctctgcgccgtcgaaaacgtaaacggtgcgattgcatcctcgcttcgcggaagaagcctgaatcaggctgcgatagaccgtaccctgataagacttgacggaaccgaaaataaaacttcgctcggcgcgaatgccactcttgcggtgtcgcttgcggcggccaaagccgccgctctgtgtcagtctcagccgctttacaggtatctcggcgggacggaggcggtccgactgccgatccccatgatgaatattctcaacggcggcgcgcacgcatcaaacaaccttgatatacaggagtttatgataatgccgacggggtttgactcgttttcggcggcgcttcgggcgggatgcgagatatatcatacgctggcgcagcttctccgcgccgacggaaaaagcacgggcgtcggcgacgagggcggctttgcgccggacctgcgggatgagcgagaggcgctgaggtatatcaccgatgcagttgaaaaggcgggatattccggacgggtcgagattgcacttgacgtagcagcgtcggaatggcagaagggcaacggatacgtcctgccaaaatccggagaaagcctcacgtcggatgaggcgatcgggcggatagagaaactctgcggagaatttccgataacctcggttgaggacgcgctcggcgaggacgacagcgaaggctggattcgcctgaccgagcggctcggcaaaaagatcgcgcttgtgggagacgatctctttgtcacaaatccgaagcgccttctgcaggggatacggaacggtatcgccaacgcagtgctcgtgaagcccaatcagataggaacgttgacggagacgatgcaggttatacgcatagcgcatgaaaactcataccgcaccgtgatctcccaccgcagcggagaaactgcggatacgacgatcgccgatattgccgtggcggtgaattccggatatatcaaaaccggagcgccgtgccgcggcgaacgcaccgcaaaatacaaccgcctgcttatgattgaaaaggagctcggaaaaagtgcggtgtacggatacgcctactgaaatccgaagaaaaatttttcggcgcggtgtgcctgacggcgcgccgcgccgttcttatgcgggatatacaaaaaaatagccatatgctattgcaaaacggcggcagatgtggtatactgaatataattaagcaagccgcaaagtaaggccataccagccggggaggcagcggaaccctgtacctgaaatccgctatagcaggggtggtatcccgaaacgagggctgttgacttgcaatacggttttctttacgttgcgttgaagaatgggtcttgcgcgatcggcggctgtgaaccatgtcagatggggaaccaagcagcattaagcagtgcggctgatgtgccgcggggtcgcctgttctgagtaccgttcggaaaaagcgtgcatgtcagcagttcgaatttcgggtgtatggtcttactttgcggcttgcttgttcattgccgatcccgcagccgatgacaccgttctttcttcggctttttcggaaaagcgggggatggaggtcaaaatgcatcaggctctgtaccgtaaataccgaccgcagacgtttgacgatgtgtgcggtcaggagcatatcacatcggttcttaaatatgaggcggcaaacggacgtgtgtctcatgcatatctgttctgcggatcgcgcggaacgggaaagacaagctgcgccaagatacttgccaaagcggtgaactgtgaaaatccgcatggcggagacccgtgcggcgagtgcgctgcctgccgcgccattgattccggggcggcgaccgacgttattgaaatggacgccgcgtccaataacggagttgataatatacgcgaactgagggacgatatcgcatataccccgtcaatgctgaaaaagcgcgtttatataatcgacgaggtgcatatgctttcggtcagcgcgtttaacgcgcttctgaaaacgcttgaggaaccgcccgagtacgttgtttttatcctcgccacaacggagcttcataagcttcccgcaaccataatttcaagatgccagcgcttcgatttcagacgcatttcgaatgatgcgatagtttcgcgcctttcatacatagcggactgcgaaggcatacgctttgagccggatgcactgtcgcgtatcgcaaaagccgccgccggaggtatgcgcgatgcggtaagcttgcttgagctttgcgcaggaggcgcggcggatgtaaacgaagaccgcgttgcggatgttctcggactttcgggatacgatatgatgaagcgcttcgccgatgccgtggcggggaagagcgtgtccggacttatcgatatgatcgaggaagtacagtcatcgtcaaaggatattacggtgttctggcaggaggtcatttccttctggcgcgatatgatgataatgaaggtgtcgtcggatccgcagaagtatctcgacctcaccgattccgaaagcaccgttctgaaagcgtgcgccgacagattcagcgtaaacacgctcacaaatcaatcatcggtgcttgattccgcgatgaaggatatgcttcgctcaccgcagacaaaaacggtgatcgcggagtttgcctctctaagacttaccgctcccgagcttgactcaacaacggatgcgatgctcgcacgcatatccgagcttgaggacagagtcgcacttctcgagagcggcgcggttcgggtaggcacagcgggtgccgaggcatcgcatactttgaaaaaaacgtcggcaggcgataccgcggcacggggagacgtcgaaaatacgccgtcaaacggtgcgtattctgcaaaaagagaaatcgcggctcagtcggataacggcggaagcaccgccgcgcatcccgaatccgcaaagccggaatctgctctggaaaagaacgaagcccgtgcggacggcggatttgagccggtacgcgatattcaggctgtgatagataagctcggcgcgggagccgatatgtacagaagctttctcaacgaggcggaggtatccgtaaacgccgattcgggaatactgcgcatatcgtcgcataatgcctttgccgcgaatatactcggcaccgagcagtcgaaaaccctgatctccaaggcagcgcttctcgcaaaggtcacggacactctcccgaccgtcgaaataaatataatccgcgaaaacacgaaaaaatcgtccgatgacgatatattcgggtaataaccgtataataacagaaatgaggtaaaagaaatgaaggcaagacttcctaagggaatgggcggcggtcccaccgacatgaacggaatgataaagcaggctcagaaaatgcaggaggagatggcgtctcttcaggaggatctcgacgcgcgtgagtatgaggtcaacgcaggcggcggagttatcaccgtaaaaatcacgggtaagcttgaagtcaagtcgatcgatataaagcccgagatcgtcgatcccgatgacatcgaaacgctttccgacgttctctgcgcggcggtgaatgaggctatcaagaaggtcaacgagacgaattcctccgaaatgtccaaggtgacaggctcgctttcgcttcccggtctgttctgatgaatgaatttgtagaaccgatagagcatctttcggaaatgttccggctcctgcccggcatcggacgcaaaacggcggtgcggcttgcattttccgttcttgaattctccgatgaaacggcaaaggaattcgcggatgcgataatcagcgccaagaccgatgtgcgcgagtgttcgcggtgctttaatatgtcggatcatgagctttgcaggatatgcgccgatccggagcgggatcagtccacgctgtgcgtggttgaggattcgcgcgcggtgattgcgatcgaaagagcgcatacatacagagggctgtatcatgtcctccacggcgccatatcgccgatgaagcatatcggtcccgataagctccgcatagcggagcttgccgagagactgcgcagtgaggagatatccgaggtcatacttgcgacgaatccgaccgttgagggcgaaacgactgcgatgtatctttcgaaaatgatatctccgatggggataaaggtcagcagaattgcgaacggagttcccgtcggcggtgatctcgaatatacggacgagatcacgctgaaacgtgcgatggacggaagatacgaggtctgacctcatacgcgaaatataccggaagagcatatcgccgaaagagcgaaacttcataagaaaaggcagagctttttgctctgccttttataaagctcacaccgagaaacaaccgaagcacacttcactcggaagtgtgccccaggcgtttttatacgcgctccggaatcttctctgcggaagaggcagcgctctttttctttttgcggcgctcgagccgtccgattatgtaatcggcaccgacttcaccgctgtgaccgagattgtagaaatgcttgtgctttagctcgtctatgcgatcacggtattcgtcctgatgctcgagaagctcggcggtcacggaagcaatttcgggaacctcgctcttctcgatcgcgcgtccgatcttgtttcttgcggttatgtcaaacggcttcagtttgatctttcggaaatccttgtttacgaccttcatctcggtgttgatgaagagcgtgggcttgttcgtcgtgaagctgaattcaaacgatatcgcggaccagtcggtgatgagaagatccgcggtgtacacggtaacgttcgacgagaagtccgtctcaatcatgaaatcgtcgctgaaacggtccttgtacttctcgattatctccttcatcttcagcgggaagcggcgtacatactgcggatgcggacgtatcacgatcttgtatccgcgtccgtagagtccctctacgagatcgtcgagacacgaatccattatgttgtcatactgccacgacggagcgatgaggatggttttcttttcgtttacgggcttgcccgatgcttcgtaatcctttatcattgtgtcgataagcccgtagccgtattcgacgatcttctttttcttggttccgcggagcttttcgatctcgcgcacctcgatcgcctgctcgcggctgaccgcgaagatcgtgttgaaatagtcgagcgctccggtgcggtacgtcagattcaggctggagcatccgtgatcgaggtagatgtattcgatgttgcgctttaccttggagcgctttatgtgatatttctcaaggtcgggcgtggtcattaccacaatgttgcattcaagcttcatcatgagcgatatcagcctgttttcatcgacatagtagggaatgatctgcttttcgtttttcttgaatatcgcgtcgttgggatcgctcgtgacgtaatggatcgttatgtcggatttttcgatgatcgcttcaatgaggttcttgaagtacttgtaatatccgctgccctcggaatagaagacaagcttcatgttgtcggcattctcggaagagaagaactgcttgtagtacttctttgcgagagccttgttctttttcgcggtcgccttttcctccgccgcctgcttcttcatgtcctcgagtgcatcgtaattgatgtacttcttcggactgtatatgatgttgacgaggtacattactccgatcgcaaagaggttgccccacgcccaatagagacctactcctgcgggaacgataaaagcgaagaacgtggaaaacgcgatcatgaatattgtcatgccccactgcgagagcttgttctgctcaatctgcaggacgttgatcctgttctgaatccagcacatgagaagcgcggaaagccctgcaatgatcggaacaaagaatatcagatttatatgggagatgctcggtgtctgtgtgagatcgatcccgaggaagttcgtgttcagccccttgatcgcttcgatcgccgcatccgctccgggaatgtccgcgaatttcgctgcattttcttttacgagatttacggcggtgagctgcgccgtcgatccgagatcggcgacggtcatgcccgaaatctcggcggcacgcgcgacgaaagcgctcgcggtgtctgctgaaatgtgaagaagatgcttgagcggcttgtacactacgtcgagaagtccgaagattatcggaagctggagaagaagcggccagacgcccgccatcgggctgtatttttctttcttgtaaagcgcggactgagcgtcaacatatgcgtccttgtcgtccacatactgatatctcagcgcgtcgagctccggcttcatcttgaccatcttgatcgagtttttctgaacgagaagcgatatggggaacataatgatcttggttatcagcgtaaacaggattatcgcaagaccgtaattgttcaggaggcgatagcagaaacgcataacatacccgagcggcgttcccacgatcgtatttataatttccattgttaagaccgactttctttgagatttttgcgaattgccgaaaaaacggtatcgctgcggcagtgcatctccgccgtgatttttatccgagtgaagagaaacggggaagatatacaaagagagctttcgcttttatgtcgccgcgccgcacgaacggatcgtcccacgcgcgcgaatcggaggaattcagcctgtcgtcgccgagaatgatgtacgcgtcgtcgggcagcgtgatcggggcaatgtcctcgcttgagaattcggaaacgtaatcctcgcgcagctcttcgccgtttatgaacacgcgcccgccgcgcatttcgaaggtttcgccgggcagcgcgactatccgctttatcagaagagcggagcttatgtcgcttcgcttaaagaatacgatatcaccgcgttcgggcggcgaaaatgcgtatgacgtccgcagaccgagaaccgccgaattctccggaacgaccgggcgcatcgagcccgacggaacacgcgcattcactataatgaagaaatttataagaaacgcggcgaccagagcggaaagcgggatcaaaagccattttcgcgcggcacctccgtccggcttctttttcttcttcatggaattacttcttcgtgggctgagtgcagatgtgaagcgactttttcaggatctcgaccttctcgcgctcttcggcaagcagacggcgaagctctcggttctctctgagaagagcgctttcgcctccgacttcatcgtacttgtccgagggagcttccggaattttgatatcgtcgtaaatgtcggcgatgggacgtgggctttcggtatatgcgcttgcagaaggtgcggcaaatcccgcatccggggtcggtgcggcggctctgtacgccgcctgtgcagccgcggcgggagcgtcgttgctctcatattctccgccgtcgtctatctcgtaatcgtcatatccgtcgtcgtcatcgtcgtcaaggtcatagtctgccgaatatgcgtcctcgccctttctcttggaaaaggcgcgcttgatctttctccaatagaatccgaacgcggcacccgcggcgatcacgaccccggcgattatctgtatgatgtacgtcatcgccgagggatcgatgtatgcaaatgcggtaaccgagaagagaatcatcgagaatacaaagaaaaacagaaatgacagaagatgctttaatttgttcattttaattatccgcgccgcgtgtccgggcgccctttcttgttttcgcattgtttgagaccgttcgcctgagcgttatttcgcgtcgtagaacgggtattcgatcggcgttttgtctatgatctcccaattttcaaaattccgtccgtcgccgttgattttgtaggtgacaaggttcacgtcgcgtcttgacttggtcgagttcgaaccgctcatccaaaaataacgtgtgacggtttcgtcttcgccgatgtcctcgagcgtgcgtccgtaaggcgttgaatcaagaccgaggtacgatatgatcgatgcgcggaggttgtcctggcatacctgcttcgacgatctcttgagcggctcgtcgggatcggcgcccgcaggctttacgaatgttgcgagaagcctctcgtgatcaagcttctccatggttcccgtccagccgtgatccgcggtgatgattatcgtcgtgctgtcgtataagccgagagccttgagctgccttatgtattcaaagatcatgttgaggtttccgcgcgtctgacctttgagccccgcactccaatcccatgacgaaacgtctacgcggttgccgtttgcgtccattacgaacggatcgtgcgagccctgaaggtgatagaaaatgaactcgccggtcagagaatcgttgacggagattcctttttcgcgcacccctttgtaaaattccacatcgtcggtcttgtgtatgctcgattcgggatttgatacggttgcgatgtttgcaagatcgccggtgtagaaccagaaatacggcttcagcgcttcgggcgcgtaacggtacgccgagagagtgagcatatagcgcaccatttccctgtaatttacggtttgcgtggattcgccgatgttgtcaaccgagccgcggagattgtctatatcaaaatatacataattcgcttcggtatatatctttgacgcgtatccggcgttctttatgtccttgaaaaatgtcgtttcctcccacgctttctttacatattcgtcggtgggaacggaatagtcggttttgattccggtgagaagatagtttacggaaggatatgtgcgcgaatagcttccggtgaaatcctcataataggtgaatccggaaagatttttctcaacctcggggtcctcaagctgctttttggcatatgcggtgtcaaaacgatccatcagaaatacaacgacgttgttcttcggtgcaagctcgtatatcccatcgtcggaaagatacccgttcccacttattatcgtgaagttcgtggtcgtgagaagagatatcagcgcgacggtctgcgcaccgatgagcattacggagacgataccgatgccgagagtccacgccttgcggctgaaatacatgaccgcaagcacgaaagcgagaatgccgagccatatgagagcattgagcacagccgggatcgtatatgcagtccaatccacggaggagccgtcgagcgtaccgtgctttatgtttatgaagttgccctgaacataacccgcaatcgtgagagctgcgataaacgacagcgcataattgaacagcttgcccctgagcataagaagtatgaatgagagtactataaaaacacacagcccgcagatcaccatcggcatcacaaggtacctgaatgagaaggttatgtatttcatgttggaaatatataactcatacggaccgaaaacgaaaaatgtgaatgcaaatgcaaacgacatgagcagcgcgggaatgagccgcattctgaattttctcttgtcggtcaaaagcgcacggaacttatccgcaaacgaaggaccgcgcactgtcgcgcaggcttcggttccactctttccgatacgggaatttttttgttttttcttcatatcgatttcgctttcctcgggattttacattatttgccgccgataggcacaaagacgcacggcggcatacgatactctcaattatatcataatgtaaattccatgtaaacaccaaacgggcaaaaaaacgtataaattttctttttttcttgacttctgttcgtgatggtgatataataaaactcatattgaacaaataaactgtggctatccgtgctttcggcggcaaaacgtttctgttttggaatacccgcgctgaaaaatgaacggaacggaatccgctttggattaaaatcgcggcttttgcatcgaaaaaacggatttttccgtaattttttcggaacgtcgatacgggcggtgtgaaatacccacgccgaagcatgatataaaaacggatgtgatttctcgcttaaaaagaatgcagccgaaacgataaaaactataaataaaaacagaacggagataaagaatgctgacaaaaaaacagtttgacattcttgtcagaatggccgaaaagggagagcccgagacccagcgaagcattgccgaaggcacgggaatgtcgctcggagttgtaaataaaacgcttgcacagctcacggaagcgggattcgtaaaatcgggaacggtaactcccgaaggacttgatgcgcttgagccgtaccgcgtcaagcgcgcggtgatctttgccgcaggcttcggatcgagaatggtcccgatcacgctcaatacgccgaagcctctcgttcgggttcacgggaagagaataatcgacagccttctcgacgcggtctacgccgccgggatcgaagaggtgtacataatacgcggatatctttccgagcagttcgatcagcttctctataaataccccaacatcaaattcatcgagaatcccgtatataatgaagcaaacaatatctcctcggcaatgtgcgcgagatatctccttcagaacgcatatctctgcgaggcggacctgcttctgtacaatcccgcactcatatgcaaatatcagtattgctctaattatctcggagttccggttgacgttacggatgactggtgcttcaaaacgaaaaacgggattatcacaaagctctgcgtcggaggaacaaactgccatcatatgttcggaatttcgtattggaacgcgcaggacggagcgcgccttgcgggacatatcgagcaggtctacaattcccccggaggaaaagagcgttattgggatcaggtcgcgcttgaatatcatctcgacgaatacaagatcgccgtgcgcgagtgctcctttgacgacatcgcggagatcgacacttaccgcgagctgaagcagatcgacgatacatacgtctgatatgcaggcgtgataaaataaaagggctgcggccggacggaagaaatgctttcgtccggcttgcggtcttttgttgctttttcgcatcttttgtggtagaatcaatagcgaaagagagccgtgtgcggagcgaaaggaagaatgaaatgtacagaatacttatatgtgaggacgatcccgttatactgtctgcaatgtcgtcctatctttcttcgtggggttacgaggttcgatgtgtgaaaaacttcaaggacgttatgacggaattcggtgagttcgcacccgagcttgtgcttctcgatatttcgctcccgttctttaacggataccattggtgcacggaaatacgcaaggtctcaaatgtgcccgttgtattcatatcgagcgtatcggataacatgaatatcgtaatggctatgaatatgggcggcgacgacttccttgcaaagccgttcgatctcgatgtgatcaatgcaaaggtgagcgccgtgctgcgccgcgcatataatatgccgctccggagcgacggaccggaatgccgcggggcggtactgaatatgggggatgcaactctctcctgcggcggagagcggatcgagcttacaaaaaacgaataccgtattctcgaggtgcttatgggaaacgcgggaaagatagttactcgcgctgagcttatggataagctgtgggaaacagacagcttcgttgacgacaacactttgacggtaaatataacacggcttcgcaatacccttgccgatcacggtctgaccgatttcatcaagacaaagaagggcatcggatatataatcgaaaacgacggagacgcaaaatgagaattctgcccgaatatctgaaataccgaataaaaattctgcttcttttcctgacggcgtttgcatttcctgcgctcacgctttcgctttacgaccttccgaccgagcccgtgctgtacgcctttgcgctttcgggtacggtacttggggtgtccgccgttttcgatttcgtactgtttgtgcgccgtcaccgccgcctgtcgagagtccttttgtccgtcgatgcggacatatcggtgcttccgccgccgcggaatttgccggaggaggatctttaccgcatcatatccgcgatctttgagaagaagtgcgccgctgaatccgaaaaggagcgcacggtcagcgagactgcggattattacaccatgtgggtgcatcagatcaaaacgccgatatcggcgatgagactgcttctgcagtcgggaaacgctgacagagcggagcttgaagaacagcttttccacatcgaggaatatgtcggaatggtgcttacctacatgagatgcgagggccatatgtcggatttcgtgatgaagcgctttccgcttgaccgcccgatacgcgaagcggtcagaaaataccgccgcctgtttatcaaaaagggaattgcgcttgagtacggcggcacggaggcttttgcggtcggcgacgaaaaatgggtcgcgtttgtcatcgaacagatagtgtcgaattcgctgaaatatacggaaaaagggaaaatatcggtctgctccgatcccgccttacccggcgccatatgcatagaggatacggggatcggaatttctcccgaagatcttccccgcatatcggaaaaagggtatacggggtataacggtcatgaggataaaaaatccaccgggatcgggctgtatttgtgccggcagataatggacaggctcggtttctcgatgcgcatagaatccgaagtcggggtcgggactcgcgtttatcttgacttcacggatgcgaaccttacggaaatgtaagaaatacggtgaaaatgtaagcccgaacgatggcttgcatttttactttgcggtataattgtcagcgaaaacggacgaaagtccggaattatgcttgtaacgaaaggcagatacctaatatgtcaatgcttcaggtcaataatttgaaaaaagtatacacaggccgattcggagggacgcgggtccaggcactgacgaacgtaagctttgcggtcgaagagggggagtacgtcgccataatgggcgaatccggctcgggaaaaaccacgcttcttaatatcctcgccgctctcgataagccgacctcgggagaggtcatgctcgacggaaagaacataagcgagataaaggaaaaggatatctcggctttcagacgggataacctcggattcgtctttcaggatttcaaccttctcgatacgttctcacttgaggataacatataccttccgctcgtgcttgcggggaagaagtacgccgagatgagctcgcgccttgccccgatcgcaaagaagctcgggatatccgacatactgaagaagtatccgtatgaggtctcaggcggacagaaacagcgcgcggcgatagcgcgtgcgctgatcaccggaccgaagctggtgctcgccgacgagccgaccggagcgcttgattcaaaggcgaccgacgcgctcttgaagcttttcgcatcgataaacgaggatgggcagacgatcgtcatggtcacccactcgacaaaggcggcatcgcacgcgaagcgcgtgctgttcctccgcgacggagaggtgttccatcagatataccgtgcgcagatgagcaccgaggatatgtacgcaaagatatcggacgcgcttacggcggttatgagagggaacggcgatgaataagcttttctatttccgattagccgctcagaatctcagaaaaaacggcaaattctatattccgtaccttcttgcgggcatcggaaacgtcatgatgttttacatcatggtgtacctcagaacgaatccggcaatggaaaaccacgaatctctcggaattgttctcggactcggaacggtcgttatagcgatattttcatcggtgttcattttttacacaaacagctttctcatgaagcgccgtaaaaaggagatcggacttttcaatattctcggaatggagaaaaagcatatcgcgtgcgtcctttccgccgaaactctgtataccgcgcttataagtatcggaggcggcatcggactcggaatactcttttcgaagctgtttttgctcctgatgacgaaaataatgggctacggcgtcgagttcggcttttctgtttcggcgatcggggtagcatcgaccgctgcggttttctgcgcgatattctttctcacacttctctataacctcggcagaatacatttgtcgaagcccgtcgagcttctttcctcgtcgtccgtcggcgaaaaggagccgagggtcaaatggccgatcgcatttctcggagttgtcactcttgcggcgggctatattctcgctttgaagatcgaaactcccactacggcttttctcatgttctttgccgccgtgatattggttataatcggaacatactgcctcttctgcgcctgctcgatagccgtgctcaaaatgctccgtaaaaataagggcttttactataagctgaagaatttcacgacggtttcgggaatgatgtaccgcatgaagcagaacgctgtggggcttgccaacatatgcatactgtctacgatgcttctcgtcaccgtgtcaacaaccgtgtcgctctatatcggcgccgaggattcgctcagaaatgaatttccccgcgacataatagtccactgctcggcgatcgaggaagaggatttcgacggaatatgcgaagaaatgagacagtccgttgtctcctgcggaggtgaaatgctcgatacgatcgcctacagatttgacgtgtatacggtcggacgttccggcggagtgtttgatatgtatggcggcgatgaaatgcgggtgtgcaggctcgtgctcgtcccgctttcggagtacatccggaacggcggcgagaatatcggacttgacggagacgaagttctttactattcgcctaacgtgccgcggacttacaatgaatgtgagttcaggggctacagcggcgaaggcgtaaagcttacggtgaagaaaacgcttgacgatctggtgttcgccgatgagtattactacgacgatcccgacatctgctattttatcgtaaaggacgacagcgtccttcgctcacttgccgaagtcttgttctgtgatgaagaccgcgatatcgaaaggtactacatcgctcccgacgcacttctggagttcgacgttgacggtccggacggcatgcagaatcggatattgtccgcattcattgacagactcggcgaaacctcggattacgaatataactatatccttccgagatgcgtcgatgacagccgtcaggatttcatgtcgatattcggaggactgttcttcatcggaatcttcctcggttcgctttttgcggcggcagccgtgctgatcatctactataagcagatatccgaaggctatgaggataaaaagcgctttgaaattatgcagaaggtcggaatgagccgcagggaagtaaagcgctcgataagagcacaggttcttatggtgttcttccttccgcttgtgacatcgttcgtacatcttgcgttttccttcaatatgatatcgcgcatgatctccatagtcggctttacaaacgtgccgctgttcgtctgctgcaccgcggcaacggctctcgcattcgcaatactttatgccgtcgtgtatgcgcggaccgcaaggatctactataaaatagttgaaagtcccgcatgaaaaagggagatataaaaaacaggctcaccgttcttcggtgagcctgtttttataagtgttatagctaaaattccggctgagcggacggaaaccttgactgaaaaacgcatcagttgatgccgagcacgctttcaatgtattccgcctggcggataacctcgtcggggcatgtcccgcccgcgctgtttctcttcatgacgcaggactcgagacttatctcgccgtacagatcggaatcgaacacgtccgaatattcacggtatgcctcgagcggcagcgtttcgagcacttcgccctccgcaatgcattttgcgacgagctgaccgacgatcttgtaagccgtgcggaacgcaactccgcgcttcgtgagatagtcggcgagatctgtcgcgtttatgaatccgcgcgcggcggcgttcttcatgttgtcgggcagcaccctcatggtctcaagcatcggcgtcatgaccgagagacacatctttaccgtgtccgccgcatcgaagatcgcctccttgtcctcctgcatgtccttgttgtacgcaagcggaatacccttgagcatgacgaggatggtcgtcagatctccgtatacgcgacctgtctttccacgaataagctccgccatgtcggggttcttcttctgaggcattatgcttgatccggtggaatagctgtcgtcgagctcgatgaacttgaactcccatgacgaccacattacgatctcctcggaaatacgggacagatgcatcatgagtatggagagcgctgcggcaatttccgcgcagaaatcgcggtcggaaactccgtcgaggctgtttcttgttatcccgtcgaaattcagagcttcggcgaccgcaaaacggtcggtcggatacgtcgttcccgcaagagcgcagcatccgagaggggaataattcatccttttcgcgctgtcagcaagccttccgagatcgcgctcgaacatcattgcataagccatcatgtgatgaccgaaggttacgggctgagcgcgctgaaggtgagtgtaccccggcattatcacggatgcattggcacgcgcgattctgcagagcagggacatgagcgagcggagaagctcggatatttcgccgacctcgcggcgaaggtaaagacggatgtcaagcgcgacctgatcgtttcggctgcgcgcggtgtgcagccgctttcccgcgtcgccgatacgctttgtcagctcggcttcgacgaacatgtgtatatcctcgccgccgcccgagaaatcaagctttcccgaatcaagatcgtcgagaatgtccccgagggcggaaatgattgcgtctgcgtcctcctttgatataatgtcctgcgcgccgagcatagcggcgtgagccatcgagccttcgatatcttccctgtacatgcggcagtcaacgcgaagggaggagttgaaatcgtcggcagtgctgtcaagagctttcgagaatctgcctgcccacattttttccatgttttataaccgtgcctttcctttttatgagcggctttgaaaccgccttaataccgatatgcgggggaaccccgaaatggattcccccgtaatggtgtacggattatttgtctttgttcatgcgagccttcgcagcgaccttgatcggaagtccgaacagattgatgaatcccgcactgtccttctgatcgtaaacgtgatcttcatcgaaggttgcgatctcttcgctgtagagcgaatagggcgaaaccacacccgcatttatcatgttgcccttgtagagcttgagcgtgacatctccggttacgttttcctgcgttttgtcaacgaatgcggagagcgcctcgcgcaggggagtgaaccactgaccaaagtatacgagctcggcaaactttgaagctacaagctccttgtaatgctgagtgtcacggtcaagcgtgatcgtttcgagcacctgatgcgcacggtagaggatcgttccgccgggcgtctcgtaaacgccgcgggatttcattcccacaaggcggttttccacaagatcggcgatgccgatcccgttctcgccgccgagcttgttcagcgtctttacaatgtcaaccgcgcccatcttcttgccgtcgattgcaacgggaacgcccttctcgaacgagatcttgacatacgtcggcttgtcgggcgccatctcgggggatacgcccatctcaaggaatccgggcttgttgtactgaggctcgtttgcgggatcctcgagatcaagtccctcgtgagagagatgccacagattcttatccttcgagtagttggtctcgcggtttattttcagaggaatgttgtgtgcttccgcgtattcgatttcttcctcacgggatttgatgttccactcacgccacggagcgatgatcggcatatcgggcgcaaatgccttgatcgtaagctcgaaacgaacctgatcgtttcctttgcccgtgcagccgtggcagattgcgtcggcaccttcggcaagagcaatctcaacgatacgctttgcaatgaccggacgcgcaaacgacgtgccgagaaggtaatcgccttcgtataccgcacccgccttgacggtggggaatatgtagtcctcgacgaattccttgttgaggtcctctacgtagagctttgaagctccggttttctttgccttttcctcaagtccgtcaagctccgtgccctgaccgacatcgccggaaaccgcgatgacttcgcagttgttgtagttctccttgagccacggaattattatggaagtgtcgagaccgcctgaatacgcgagcacgacttttttgatttttgacttgtccatttgttcaccctcccgagcatattcgatttatgtgtataattatacacttggcttgcaaatttgtcaacccccgaaaattaaataatttgcgatttgtcactgttgaacacaagtctcggtgaagggcacgtcaaaatatgcacaatgatgaatcacatacataaatcatgcatatttataatattccttcgaggctgagtgtttcagaacgcgaaacctcgtcaagacgttgcttcagctttccgacagccgcgcgatacccggaaacatcgccggaacgcgccctctgtgctatttcgtcgagtgcgtcgtcgatttcaccggcttccgtatgactgaccgtgatgcacatgatcggtctgagctcatgccatttgctattcaactctgtgtatattctttcataatcgttcggcgaatccggaagcttgtccgcacgctcggacagctcgactgcttttgacgtgatgtatgcggaattaaaaaaaacgagcgcgccgcacagaataaaaatacatactgcgaatataaatgttttcattccaaacctacgcctttctttttccggaattctttttcttttgtatccgtacctttcccgtgtcgtcaaccgtcatcagaagtatttcctcaggtgtcgcacggtgctctgcgagctctctttcgagccattcggaattcttttccgcctgagagagagagcggcggcttatccttgaattaattataacgctgtgttcgattcctttttcctttacctttacgctgatgtcctcagcgttcggcggggaggctgacgctttcggaatgacggacagctttccgttggcttcgattatcgcgtacttgaccccgtcgggacccgcacatccgttctgccgcagctccgacatgagctcatcgaccccgatcctcgcgcggcgaagggctttttcgtcgattttaccgtcgcgtatgaggattgccggagtgccgcagaagatccgcttggctgcgggcgaaacggtgattatctgcgataatatgacctccacggaaagaagcacaagaatcggcacaataccgtacagcacggggatgcgcttgtccgaaatcggaagtacggcaagctccgataccataagcgtggtgatgagctccgacagttcaagctctccgagctgccgctttcccattatgcgcaccgatatgagaagtacggcatatatgactatcgttcggaaaaataccgttatcatttgtctgctcctttcgtatttaccgtccgcgctgacataatgtcggtttgcctcggcgcattcccgctttgacaaagagaggttcgtacaacgtaaaaccgcgccgcctgaccgatcggatgaaatcacggaaaagcatactttgcgaattccgtctcacccgaccgcgtgctttcgcacgcgcaaagtatcactgcctcaaatattttgtccgcagcggcgctcaatatacctcatctcaattgacacggcgcaaattatgcggtataatataatgtataatgcatttctgcagcaaaaagccggaatcgaacggagagcttatgaaacttaaaccgtctgcaaaacacctgacagcggctgatatcgtgctttgcgttatcgtcgccgcgatatctgtttcggtgccgattttcagaaatgcttacctcacgcatggagagagcgtaagcgtttcctgcggaggggaacgcacggtatatccgatttcggaaaaccgcgtgataaacgtagagtcaaacggcgagaagctgaagatcgttatagattcccgcgccgtgtatgtggaagagtcgacctgccgcgacggcatctgcatgaaggcgggcagaatatcgcgccccggcgacagcttgatctgcgtgcctgccggagtttcgattaccgtgaacggcgaaacggaggcggattatgcattcggataaggcgaggcgcatcgcgtttgatgcgctgtttgcagcccttgcgctgatgttcacctttgttgagataaagcttcctgtttccgccgcgatcccgatacccggattcaggctcggacttgccaacatagcggttatggcggcggcgtattcgttttcatttgccgatgccgcatttacggcgattttgaagatcatgctttcgtcgctgcttttttcaaatccggtgtcgtttctgttttcggctgcggggacgcttttgtctcttgccgtgcttgcgcttttctgtatgggcatcggaaagcatttcagccttgtcggaatatcggcggtctgcgcagtttttcacaccgcgggacagcttgccgtttcctttgcatttttcggcagagcgtcgcttctctgcgccgtatatctgattcccgtttcacttataagcggaattgccacgggtgccgtaatggagcttatgacgccgatctttgatcggctgcatatagaaaaaaacgaacggacgtgattgttttatgaaaacgaaacgcacggctgcgcttgtttgcgcggcgctgatatcgctttccgctctcacatcgtgccgagccggcaaaaccgaatacagcgacagcgaatattttgtcatgaacgcgaacatgaagctgcggcttgcaagctccggtgcttccgatgatgtgctgaacagcgcatcggcggcagcgcagaagatcgcttcggatatcgagaaggagctttcggtgaatatcgcaggaacaccggcggagctttttaactcctccgacggcggaacggaggatccggacggcgtattttccgcagtgctgaaaaccgcgctcgatcttgccgccgcgaccgacggagcatacgatccgacgatcggcgcactttcctctctctggaacataaacggcggcggtcccgtcccgtccgaggacagcatcggcgacgcgctttcgcatgtcggttatggcaaggtcagccttgaaaacggaaaggtctataaggacgatcacgcgcttcgcgtcgatctcggcggaataggaaagggatatgcggttcaaaaggttatcgaatatcttccgacttccggtgtgaagtacggactttgctcgttcggaagcacggtcggcgtattcggaaacaagcccgacggaaagaaattcagaataaccgtgtgcgatcccgacgacacctcgaaaaacgtgatatccctcgaaatcgaaagcgggtttgtctcaagctccggagattatgagagatatttcgaagagaacgggaagcggtatcaccatatctttgatccgtccacgggatatccggcggattccggcgtgcgcagcgtcacggtatgcgccgcggacggagcgctttcggacgcgcttgcaaccgcgcttttcgttatgggagtcgagcgctctcttgaattttataaaagctcgggcatatccttcgaagcggtcttcataaccgacgaaggcgtgtacacgaccgacggtctcaaatcgggagatacattttcgcttctctcggaaaaatataaattacttaattgatggagttaaaattggcagaatccaaaagatcaagaaccgtatcggaagcggagatggcatatgagctttcggtatgcgacgaggtaaaaaagctgaacggcggggaaaagtactgctacatccgcaccttcggatgccagcagaatgaggcggacagcgaacgcatggcgggactgtgccgcaaaatgggatataccgtttgcgacgagcccgaaaaggcaaagctgatcctcgtgaatacctgcgcagtgcgcgagcacgcagagaaaaaggcactctccataatcggacagtacaagcatataaaggatgccgatcccgatgtcgtgataggcgtcggcggatgcatggtaacgcagggacacagagcggacaagctgaaatacagctatccgtatgtcggctttgttttcgataccggatcgcttcataagcttccggagcttgtgtattccgcggtcagcggcggcagccgcagatttgaatcctgcgacgacgatttcaggattcccgagggaatcgactccgagcggagcgtgaagcacagcgcatggctcagcataatgtacggctgtaataatttctgttcgtactgcattgttccttatacgagagggcgcgagagaagccgtactcccgatgcggtgatagatgaggcgaaacgcctcgtcgccgacggcgcaaaggagataaccctgctcgggcagaacgtcaattcctacggcaacgacaccgacttttcgtgctcgttcgccgagcttgtcagccgcatatgcgcaatagacggagatttccgcctccgctttatgacgagccatccgaaagacgtgaccgatgagctgatcgacgttttttccgccgaggataaggtcgtgaagcattttcacctgccgcttcagtccggatccgaccgaatcctgaaaagcatgaaccgccattacgatcttgcgcattatatggatacggtcgcaaagctgaaggcgaaatgccccgacgtcagcctgacgagcgatataatcgtttcgttccccggcgagaccgaggaagactttgaatgtacgctgaaagcgcttgaagcggtacgttacgacatgatcttttcgttcatttattcgccgcgcaccgggacaaaggcggctgaaatgcccggtcagataccgcatgaggtatcaacggagcgttttgcgcgcatgatagagctgcagaatgagatctcacgcgagagaaacgaacgcttcgtcggcagaacaatgaagcttcttgccacggagataagcaaaaccgacagcggaaatcttacgggccgcggagattccccgagaccgatccatttcccgggcacgccggagcttataggctcgtttgtcaacgtccgtgtcgattccgccgatacgttctcgataaacggaacgcttgtatgaaaaatcaaaagaaaaacaggagaagataaaatgaaaaatacggttatgaatgatgaaacggcagacgccgtccgtgagctcggacgccttatccgcaccgacgcgagatacatcgcgctgaacgaagcggaggaaaagtataataacgatcccgagatgacgaagcttatcaccgagtacaacgtgcagcagagcgcgcttgcgtcacagtatgccgaaaaagagcgcgataacgatatgataaaggcgatagagaagcgtataggcgagatatacgacgccgtgaccaagaacgatctctatgaggagtatctccgcgcaaaggcggattacgatgagctttacggagagatcagcgcgcttctccaaacagagataaccggaaaggcaccgtgtacacacgactgctccacctgcggcggctgccactgagattacagatgatattattttgaagcggggataatgtatgactccgatgatggaacagtacttcgaggtcaaggataaatataaggattatatccttttttaccgcctcggggacttttatgaaatgtttttcgaggatgcacaggtcgcatcgcgcgagcttgagcttactttgacgggacgcgactgcggcgaagagcagcgcgcgccgatgtgcggcgttccgtatcattccgccgaaggatatatcggaaagcttatctcggcggggtataaggtcgcaatatgcgagcagacggaggatcccgcacttgcaaaagggcttgtcaatcgcgaggtcatccgcgttgtgacccccggcacgcttatcgaatcgacgctccttcccgaaacgagaaacaattatcttgccgctctctacagcgatgacggttccttcggaatctgcttttgcgatatttcaaccgcatatatgacctcgaccgtgataaccggtgcggatgccgaaacgcttcttgcaaacgagctctcgacgtatatgccgagggagataatctcgaatgtaccgttctcggatatcgaagccgtttcaaaatggcttgccgagaaggacggccgggtgctttattctcagcttccggacaaattcacccgggaaaactcggataaagcgcacgagcgcttcggcgaatgcgacgaacgggttctttttgccgcgggcggcgcgcttgcgtacatcgaagagacacagaaaacggacgcatcgtatatccgttcgatgtctgtttattcgcggtcgcagtttctcgagatggattcatcgacaaggcgtaatctcgagctttgcgagacgattgtcggcaaggacaaacgcggatcgctcctttgggttctcgatcgcacgaataccgcggcgggagcgagaatgctccgtgagcggatagagcatcccgtgacctcgatccccgaaatactccgccgtcagagcgcggtaggtgcgcttgccgaaaacctcatgctccgcgaggagctttcggagaagctttcgtccgtgctcgacctcgagcggcttataaccagagtcatatacaagactgcgagcgcacgcgagcttcgagcgatatgtcagacggtttccgtgatcccggatataaagagacttctctgctcgtcggatcatgacgaactcatatccctcggcgcaaatgcggatgagctttcggacgtacgcgagcttatcgacgatacgatagtcgatacacctccttttcaggtgcgcgagggcggaatgataaagcccggatacagtcccgagcttgatgagcttcgctcgatagtcgatgacagcaaaacgtatctgaccgagatcgagaacgccgaaaaagagaagaccggaatccaaaagctgaaaataggctataaccgcgtgttcggttattatattgagataccgcgttcgtcctccgagaatgtccccgaggggtacataagaaagcagactctctcgaattcggagcgctttatcacagaagagctcaaagagcttgaatcgagaatactcggagctggagacaaaataaaatccatcgaatacgactacttctgcgcgatccgcgataaggtggcggagagcgccgacaggatccgcgagggagcggcgctccttgccgaggttgatttttactgcagccttgccgccgcggcatattccggcggatacatctgcccggagatttcggcaggggatgagcttattataaaggacggacggcatcccgtcgtcgaacagtttgtctcggactcatactttgtgccgaatgatacggagcttgattgccgtgacaaccgcctcgcgcttatcacgggtcccaatatggcgggaaaaagcacatatatgcggcaggtcgcactgatcgtgctgatggcgcagatcggctcgttcgttcccgcaaaatatgcgaaggtcggcatagtcgataagctctttacccgcgtcggcgcgtctgacgatctttcacgcggacagtccacgttcatgctcgaaatgagcgaggtgtcctacatactgaagaacgctacgaagaaaagcctcatcctttacgatgaaataggacgcggtacaagcacgtacgacggaatgtcgatcgcgcgtgcggtggcggagtatacggcgtctaaaaagctcggcgcaaagacgcttttcgccacgcattatcatgagcttaccgctctcgaggacgagcttcccggaatcgtgaattacaatatcgcggcgaaaaagcgcggcgaaaacataacattcctgagaaagatcgtgcgcggaccgacggacgacagctacggaatcgacgtcgcgcgccttgcgggtgtgcccgattccgttatcagacgcgcacgggagatactcgcctctcttgaatcgggagatgctccgcgcgcggcgaagggcggatatgcgtcaaacatctcacagaaagaacgcggagacaacattccgctttccttcgaggatatggcgaaggacgatatcgtgaacgcaattgaaaataccgatataaatactctcacgccgatcgaggcgatgaatttgatatttgattggaaaaagaagcttatgaaatgaggggagggacacgatgggaaagataaacgtactcggctttgatatagcgaaccttatcgccgccggggaggtcgtggaccgtcccgcctccgtcgtaaaggagcttctcgaaaatgcgatcgacgcgggagcgaaaaatataacggtggaaatacgctccggtggggtctcgcgcatccgcgtgacggacgacggaagcggaatcgagtacgacgaccttccgctcacgatactgcgtcacgcgacgagtaaaatctccgccgcgtcagaccttgcgcagatattcacgctcggcttccgaggagaggcgcttgcggcgacggcggcggtttcaaagctgacgatcgtgtcaaagacgaaggacgctcccctcggagcaagactcgtgtccgaagcgggagagatactcagcctcgaggagaccggatgcgcggacggaacgacggtaatcgtcgatgagcttttcgcaaatgtacccgcacggcgtaaattcctgaaaaaggattcaaccgagaccgctgcggtcacgggagtcgtcgaaaagatcgcactgagcgcaccgcacatctccatacgctatgttgcggacggggagtgtaaattccagacaccgggaaacggcgatctcaaaggcgttatatatgtgctgttcgggcgggatatcgccgggcgcgtcagatatatcgagcgtgaggacggcggcatccgcgtgagcgggtacatctccgagccggacttcttccgcccgaataggaacatgcagaacttttttatcaatcaccgctatgtcaaaagccgcacgatggcggcggctgtagaacaggcgtacaatacccgcataccgcccgataagtttcctttttgcgtgctgaatcttaagctcacgcccgaggcggttgacgtgaacgttcatcccgcaaagcttgaagtcaaattcacaaacgaaagaattatcttcgaggcggtgtattacgcggtgctttccgaacttgaaaaatcggggagcatgcctcagcttgaggttggctcgcgcgccgctcggaaattggcaaatgacgacgggagtgccgcgaaaacggggaaccggtcgttctgggtgccgggagccgacgcgcggaatctgacgggcgctttcgctccggacaagaaatcgacgaagggcgagcagctccgcgtcaccgaaaatacggtcagactttcggcggagatcgcggcttcgatattccctgaaaacgtcccggcgcaaaattcggggcgggctacggatgccggtaccgaacgtgaagccttgtcggtcgcggagaatgcaggataccggacggagaagctttccgggcagacggtatccgacggaacaaaaatcggagacgctgttttctcgcaggggacgggtgaaagcgtgcagcacacggattttgccgccgatcatacaggaacgcttcatcattcatccccggctgacagcgccgctttcggcacttccgatacatccgaaagcctgtcggattcaccgatcgcggactttgcatcgcacggcgaagaagcctccgaacgcactgaaactgcggcaagcgatatcccgtcatcctcggacgctcagcccgcttccgcggaaaagcctgccgatgaatcggattcggcggaagaacgctccgataccgccgagaatgagcgcattcccgactaccttattctcggggaagcgtataactgctacataattgttcagctttacgatcggcttgtttttatcgacaagcacgcggctcacgaaagaattatcttcgacagcctctgcgataagatgaaaaagaagaataagcattcgcaggtactcatgtttccgataaaggttgagctgaccgaaaacgagcttgacgccgtcggagagtacggagacaggatacgctccgtcgggtttgagtttagcacggtgcgaaacggggtagagcttacggcgatccctgaagaaatatcgcgtgaagcctccacggatatgatagtgtcgcttgcatcgtccctcgcagatggaatcggcacggtggacagcgtaggagccgaatatttcgacgcaaggctttatcaggcatcgtgcaaggcggcaatcaagggcgggagagtgtattcaaaggaaaacctccgctggatatgtgaccgcgtgctcaaagttccggcggaaggcgaaagcgcgataaagacgtgcccgcacggacgtccggtcgcgtttgaactgaaaagaaattcgatagaaaggcaatttcagagactgttataatgttcacacttataaaaaaagacggacgcgcaagacgcggacggtttgagacaccgcacggcacgatcgaaacgcccgtgttcatgaacgtggcgacctgcggagcgataaaaggcggactcggcgcggaggatctgcgcgaggtcaactgccaggtcatgctttccaatacataccaccttcatgtacgtccgggcgatacgcttattcacgatctcggcgggcttcgcaagcttacgggctggagcggacccgtcctcacggacagcggcggatttcaggtgttctcgctgtcgcagctcagacgcataaaggaagagggcgtttatttctcgtcgcatgtggacgggcgccatatctttatgggtcccgaagagagcatgcgca

SEQ ID NO: 468 - DNA, 6854 bp, Unknown
  16S sequences of unknown bacteria
cgtcgccaagaccgtcatccgcctgctgcacacggtctacatgctcaagaccgagttgacggtgcgccgcagcgtgctgcacaagacgcacaactacctcatcacggtgccggcgcaaaagcgcatgacgctcgcgctgcacgacctgggcatcctcggcatgcacggcttcgagcccggcatcagccccgagctcgtcgagcgcggctgctgcgcgggcgcgtacctgcgcggcgcgtttcttgcgggcggttacatagccgacccgcgcggcgacttccacttcgagctcacgatgagctccgagccgctcgccaacgacttcgtggagctcatgggagcgcacggcatcaaggcgcgcgtcacgcggcgccacaacacgtacgcggtctacatgaagggcgtcgacaacatcatcgcgtttctcgccttcgtgggcgcgcacaactccgcgctcgacatggagaccgcgcgcgtcatcaagtccgtccgaaacgacacgaaccgccgcgtcaacgcagagatcgccaaccagcaaaagaccgcgcacgcctctatgcagcagatcgccaagatcaggcaggtcgtggaaaagcacggcatcgagtccatcccgcagtcgttgcgcgaggtcgccctgctgcggctcaagtaccccgatgcgagcatcaaggaactcggcgagctggcagacccgccgctttcgaaaaacgccgtctaccaccgtctgcgccgcatcaacgcgatgctcgacgagtagcgatatagtggagcaataccgacccccacacgaaagcaggtatcccatgggcgaagcactcgaaaaggcaagcttggccaaggcagcgtcgtatcagctcgcggtgctgggctccgacgtgcgcaacaaggctctcgcgaacatggccgcgcgcctggtcgagcacacggcagacatcatggccgcaaacggcgcggacatggagcaggcgcgcgccaagaacacgccgcagggcctgctcgaccgcctgctgctcacgccggagcgcatcgagggcatcgcgcagggcatacgccaggtagccgcccagcccgaggtgctgggcgaggtcgtcgaggggcgcgagctctacaacggcctgcagctccggaaggtgcgcgtgccgctcggtgtcgtggccatgatctacgaggcacgccccaacgtcacggcagatgccgcggcgctgtgcctcaagacgggcaacgcctgcgtcctgcgcggcggcagcctcgcgcagcgctcgtgcctggccctatcggacgtgctcgccaaggcggcggtcgaggcggggcttcccgagaactgcatccagagcatcgagagcacctcgcacgacgcaaccgacgagctcatgtcgctcacgggtctcgtcgacgtgctcatcccgcgcggcggcgccggcctcatcaggcactgcgtcgaaaacgcgaaggtcccggtcatcgagacgggcacgggcaactgccacatctacgtgcacgaggcggcaaaccgcgacttcatcgtgccgatactcgtcaatgccaagacgcagcgcgtcggcgtgtgcaatgcggcggaaagcctgctcgtggacgagagcatcgccgacgaggtgctgccggcggcgctttgcgctctggccgagcacggcgtcgtgctgcacgtcgacgagcatgccgggcaggttgccgagcgctgcggcatcgagacgattcgcgcgacgcgagacgattggggcacggagtacctcgcgctcgagatgagcgtcaagtgcacaagcgggctcgacgaggcgatttcccacatcaacacgtacggcacgggccactccgaatgcatcatctccaacgacgccgcggcaatcgacgccttcacgcgcggcgtggacgcggcggtcgtgtactccaacgcgtcgacgcgcttttcggatggcggcgagttcgggctcggggcagagatcggcatcagcacgcagaagctgcacgcgcgcggccccatgggcgcccaggcgctcacctccacgaagtacatcgtcaacggcgcggggcaggtgcgcggctagcgtgtcggacagactcggcatcatgggcgggaccttcgaccccgtccacaacgcgcacctcgaggtggcgcgcgccgtggccgacgcgctcggcctcgcgcgggtgctgttcatcccgacgggaaacccgcacttcaagctcgaccagcacgtgacgccggcactgcagcgcgcgcgcatggtcgagctcgccatcgcggacgacccgcgcttcgagctcgacctgcgcgaggtcgagcgcccgggcgtgacctacacggtcgacaccctgcgcgagctcagatgcgagtaccccgataccgagctctgctttatcgtgggcgcggattctgcggagacgctcgtccactggcgtggggcggccgaggtcgcgcggctgtgcacggtcgtcgtggcggcgcgtccgggctgcgacgtcgcgcacgtgagggcggtccacgagcaaagcggcctcggcttcaggctcgagtttgtcgacgtgccgcagatcgacatctcgtcgacggagctgcgcaagcgtatttcatgtggtcaatcggtaacggaattcatccccggccccgtaatcgcatatattgatgaaactggtctgtaccggggctgacggcggacgcggtgccatgggggcgccctcgccgatacggccctcttgaatcgaggaagttcgtttgcaggaagatactgagttctatcggcgcgtgagcgacgcggtcgacgcgcgcctgtcgggcaagcgcctggcgcattcccattcggtctccgactacgcggtcgagctcgcgcgaatctacggcgtcaaccagttcgacgccgccatcgcgggcctgctccacgactgggacaagctcatcgtcgacgacgactttcccgcgcgtctcgacgagctcggcatcccccggcccgaccacatcgagcttctgtacccggtgctccactcgtttaccggggcaaaagccgtgcgccgcgagtttcccgagctcaccgacgagatagagagcgccatctggcaccacacgctcggcgggcttcacatgagcgacctcgacaaggtcatcttcatcgcggacatgatcgagccgctccgaaagaccaaagggcgcccgctcatcaagaagctgcgcgagatggtgggcacgatgagcctcgacgacctgtacttcgaggcgtacgtggtgaccatggactcgcttgtcatccgcaagcgcttcattcacccggccgccttcgacatctggaacggcctcgtgcagcagcacaccagaaaagacaagtcacgccagggcgaccccaacgtcatcctgtagagaaaggaacaactttgaccgagaacatctcccccaaggagcaggcgctcatcgccgcacgcgcgatcgacgacaagaagggctccgacatcgtcatccaggaagtcggcaagcttctgaacgtgacggactacttcgtcatctgcaccgcggccaacaaccgccgcgccgattcgatctacgaggaggtcgaggaacgcctgcgcaaggaggcgggcgtcaagcccatcagcgtcgagggcgtcgaagacggcaagtggatcttgctcgactacggccagatcgtcgttcacatcttcctgcccgagcagcgcgagtactaccgcctcgagcagctgtgggacgaggctcccaccgtcgacgtggccgctgccggcatcgaggacccggtctacagcgagcgcatcgccgcgctgatcggccgcaatgcccaggcggaatccgacggggaagaagcgtaaggggccatgggttttcgcaccgtctgcgcgtcgatcgtctgcaagtcaacgtaccgcctgctgcgcctcatgaagcgcggcggcacctcgttgccgggcaagctcgccttgaaggtcgaccccaactacctcaacacgctcgccaagggcgtgcgcacgctcgtgctcacgggcaccaacggcaagaccacgtcgacgcacatcgtcgcgcaggccctcgagaacatgggcgagcaggccttctacaaccgcagcggagcgaacctgattcagggcatcaccaccgagttcgccatccgctcgagcatcggcggcaagccccgctacaagctggccgtcatcgagtgcgacgagggcgcgctgcgccgcgtctgcgcggcggtcgaccccgaggtgctcgtcgtcacgaacgtctttcgcgaccagctcgaccgctacggcgaggtcacgcatacgctcgagaacatcatggcgggcgtcaagaactccccgcatgcgacgctgtgcctgaacgccgacgactccatggtggcctccatcgccgaccgggtcgacaacgacgtcgtgttctacggcgtcgactgcgagatctaccccgaacgcgtcgaggacctctcggatgcgacgcactgcatcaaatgcggcgccgagtaccagtacgactacgtcacctacgcgcacctgggcggcttcaagtgcccgtcgtgcggctaccaccgtcccgctcccaaagtcgcagtcgagcgcatcgtcgagcgcaggagcgacggttgcacggtcgagctgcgcgtcgacgacgaccgctccatcgtcgacctcgacgttcccgcgagctacgacatctacaactgtgcatgcgtggtggcgggtctcgaggcgttcaagttcccgcgcgagcaggcgtatctggcggtgagcaagttcaagcacggctttggccgctccgaggtgttcgacatcgacggcacgcgggttcgcctcatgctcatgaagaatcccgcgggctgcaaccagatcatcaacctcctgctcaacgagcccgaccagaacatgggcatcgtctgcatcctcaacgaccaggagtgcgatggcaccgacgtctcgtggatctacgacgcggcgtgggaggccatctgcgcgcacaagcacgaggcgatctgcagcggcgggcgcgccgaggacatggcgctgcgcctcaagtacgccggcatgccgagcggcggcatccgcatcatgaaagactacgacgagctcatcggcgagctggggcgcatggaccacaacgtcacggtcgtcgccaactactcggcgatgcttgagttccgcgcgaaggtcgcgagcgcgctcggcctcgcggggttctgggaggggtagaggcgatggcagacaacatgcagctcacgatcgggcacctgtatcccgacctgctcaacttgtacggcgaccgcggcaacaccatcacgctgcagaagcgctgcgcatggcgcggcatcacggccagggtcgtgagcctcggtgcgggcgaagacgccgatttcgacgacatcgacctgttcttcatgggcggtggccaggacttcgaccagtacaccctcatggaggacctcggcatcgggcgtgcgggctcgaaggcatcccgcctgaccgcggcaatcgagtcggacgtcccggtgctcgccatctgcggcggctaccagatcttgggcgagtactacgtgggccatgatggccagcgcgcggacttcatcggcgcgattcccgtgtacaccgaggcgggcgaggaccgcatgatcggcaacatggtctacgaggcgaccgccctcgagggctcgcccaccgtggtcggcttcgagaaccatgccggccgcacgcgcctgcgcgagggcgccgtgccgcttggcagggtggtgaagggcttcggcaacaacggcgaggacggcacggagggcatccgctaccgcaacgtgctcgccacctacagccatggcccgctgctgcccaagaaccccgccgtggcagacgagctcatcaggctcgcgctgcagcgcaggtacccgggtgccgagctgcccgcgctcgacgatgcgctcgagtggcgcgcgcacgacgccatgctcaagcgcctcgtctagctggatacggccgggggcacccgcccgctcggcggcggtgcgcgccaacgttgcgcaggtgtaagtttggcgtcgcggcgagctgttagaatgtaggcaccttcagatgttgaccaccgcgaggaagggttctcccatggccacgtatcccagtatgaacggcaggtacttcagcactgcctggaacgatatcaagaactccgaggggtggatcggcaagatcttcctgctcgggctcatcaactttatccccgtcttcgggcagatgacggtctacggctacgcgttcgagtggggccacaaggcggcgtggggcatgcacacgccgctgcccaagaagatctacgggcgcaagaacagcaagatgctgcgctggggttggtttgccctggtcatcctgtttgtgtgcacggtcatcccggccattgtcaccggcatcggcaacgcgatcagcgacagcagcaccgcggcccagacggccgccatgtacgcgcatcactaccatgcgtccatggcgtcgggcaacgtcttgctgggagcgctcggcggcgtcatcgcgtttgtcgggttcgtgctctcgattgcggcggtcttcttcttctgggtgggcaccatgcgcatgatgatgtacgaccgactgggcacgggcctgcagtttggcaaggtctggtcgatgatcaagcacgacttcggcggccttttgcgcatcttcggcatgtccatcgtgtgcttcgtcgtctacttcatcgtgttcgccatcgtggccgccatcgtcggggcgggagtcatcggcaccctgttcgtcggcgccgcggcaggctcgggcatgtacggaatggacaacgaggctgccctcggcttcattctcatggcgctcgtctccgcgctgcc

SEQ ID NO: 469 - DNA, 8476 bp, Unknown
  16S sequences of unknown bacteria
ccccgcagcaggcaccagcagacgcggcgtaaagtctcccgcgccgcagatccagcaggctctttcttccacaggacttctcctccgctcctcttaaaattttaatttacattattataatgcaaaaatgcgcagctgcatagatggaaaaagtctcctgcgccgccgcaggcagcgcagacaaaacttgctttttgtattttgccgcgctgcagcagatactaatgcacgaagcgcttcaatttttttgatctgcacaagagggagaggaaacgaatgaaagctaccacaaaactcagcgccggcgttctggcgggccttatggccctgtccatgaccgcctgcggcgcagcgtccacacacaccgcgcccaaaaacgccgccggcacctacacctatgaaaatggtcagttgtaccgctacagccctgccgccgacaacaagggcaatgtgcgccagaacgtgacaaacaacgccggacgcgatctgcgcaatgccggaaaggatctgggcaatgctgcccgggataccacccgcgccatcggcgatgccgccaaagacaccgccaacgccgcaggccgcgttctgaccggcaaccccaacacccggacagacagcgcggcaaagcggaacacgcaccccaacgcaaacaccaacactgcagcggcccagatgccgaacaatgcaggcgtcagcctgaccaccggcctgcgctgactgcgcgcttaaaagcctcctgccatcaagggcggcgaaacgcattccgtttcgccgcccttgtcgcgcgcgtcaatataccgcttccacagttcggaacaaaatgccgaaacgctcgctcaagcattccaccgcttcctgccccaccgcttcctccggatcccgaacggtaaaacacaggctggcaaaaccacagggcgcttcatagcgcagatcgttcagactgaccgttttgctacagcagggcatgtcttcttccaaaacaaaaaaatggtcgcttttataatgctcatccattttctgctgccaccagtccagtggaaccgctgcgccgcagcgggggcaggaaatatggtccagcgcgctgccgcagtcaaaaaatttcacctggccgctctggaagaacgagatctcttccgctttcacacatttctgcagcgccaacaccgccgcccgggcggatgcttcattggtgcgataggtatgcagccgcggaatcagccgcacaagatgctccgacacgttcgtttcctccttcaaacaagattcagttccaaaagatccagatgcaccggggcagtgctgtccgttccgattttacgaaaaccgatgcgccggtaaaaattctgggcgatttcattttccgctgcacagcgcaggcgcagcttcttgcgccccaagcggcggtagcggctcacggcttcgccgatcagctgtacgccggcaccctgcttacggtaatccggcgccatgtacacaaagggcacgcgccccacgccctcggctttgtcctgctctgtgtccagctgcaggagccccgcaaaagtatcttcacagtacgccgccatcaccgcttcagaatatgcagcctggtttgccctggcctgtgcataaaacgccgcgccgtcatagcggtccatagcaccgtgactgctgagccacccttccgcccggcagagctggtagagcgccgcgccggcgttgctctcgatatccagcgggacaaagcgcaagccgatgtcccgccagtctttgcctttccaccagctttggtgggcaaaagtggaaaggtcgtcgttcaagtgggcagtgtcgttggcaaagaccacacggaagttcccctgatcgtattcaatcagggaaacggccgtattatcgccatggggaaagcgttcgctgatttccttcaggctcatgccccgcagagtacccagcagaatacgggaggccatgccgtggcttacagccgccacggttttgccctcctgctcacacacaatggtgcgcagcgcccccagcatccgctcgcgtacgtctttagcgctctcggccccgttcacatgccagcggtcaaaatgatagttgaaattttccagctgctccgggtcagtatagcggatatcgccccaggtgcggtcttcccaggggccgcagttcacctcgtgcagatcgttcagaacgcgcagcgggatatgcttcggttcataaatggccgccgccgtgatccgggtgcgcagcagcggactggaatacacggcatccaccgggatgtcggcaaagcggcgccgcagcgccgcaatctgcgcgtacccctgcggggtaacgcagctgtcatacatgccgtgggcacggcggtagaggttcccctcggcctgggcgtgacgcaccagataaattttggtcataaatcgcttatccttcttctgttttcttcaattcatattcctgcagcactttgcgaatctgcgtcccaaaagaatccgcagcgccccagtcaaaatgcaccagggccgaatcactcccgccgccgcaggcccagtgcacgcgggtggcgtcctccagatcgtcgatggtcaccgtggctgtcaaaacattacccgcgcggaaataatagcgctcatacacgctgacgatgatctgtttctcccctgcctgcaggcggtggcagtccagcagcttcccatcataggtcagctcatggtgaatccgggcgcggcactcttctgcgccgagggagacccgaagcgtcggctccggctcttttgggtaaattagtttcacctgcttcatacgttcaccaaggctgtactgtattggtcagcgcccgggcgctcaggccttcctgttccagatagtcccgcaggccatcgcgcacacgcaacggcgcaaagacatcggcaaaacaggcggtgcccacggccactgcatcggcgccggccatcatcaactcggccgcatcactgcccttggccacgccgcccatgcccaggatgggcagtttcgtggcctggcgcacctgatagaccatgcgcactgccacagggaacaccgcagggccggacagcccgcccatattgttctttaatatggggcggcggctgtggatgtcgatacgcatgcccagcagcgtattgatcaacgacagggcatccgcgcccgcgtcctccaccgctttggcaatttgaacgatatccgtcacattgggcgaaagcttgaccataacaggaactgtggaatgctttttggcaatctccgtcacttccgccgccagttccggccgggtgccataggccagaccgccggctttcacattggggcaggaaatattcacttcgatcatgtccacccccgcagcggacagcttttcgcacatcactccgtattcttccggcgtatttccggagatattggcaatgatctttacatcatactgccgcagaaagggcatttcttcagcgataaaagcatccacaccgggattctgcaaacccacgctgttgaggatgcccgcaggcgtctcagcaatgcgcggaggcggattcccgtcccgccgcaccggcgtcaatcctttgacgcagatggcgcccagctcggacagatcataaaattcgccgtattcatggccgaacccatatgtaccggaagccaccacaatagggtttttcagctccaccccagccagagacacacgcagatcaggcatcaaaaaccacctcctcagcagaaaagaccggcccgtttttgcagacatggcccatataaatttccccatgggcatcccgcagtttcacagcgcataccaggcatgcgcccacaccgcagcccatgcgttcttccatggacacctggcaggggatccccgcctcttcagcagcctgtgccgcgtatttcagcagcacttccggcccgcaggcacagatcaggtcgtattcattcttttccagcagctcacgggctgcatccagcgccgttcccttacggcccaggctcccatcgtcggtagccagggcggcctcgccgcacactttggcaaaatccaccatcaaaatggcccggttttccgcagcaaagcccagcgctgcatcggcgcttccagcgcgcttggccgcccacaacaggggcggtaccccgatgccgccgccgataaagagaacccgtttccccgctacatcgaatccgtgccccaggggaccaagcacgctgacgcgctcccctttcgtgcgccggctgagccactccgtcccctcgccgcgcacctcaaacaccagccgaagctgcatgccgctggcctcacagatgctgatggggcggcgcagaaggtgcccctcaccgcagctcacatgcacaaactgtcctggctgcgctgccgcaacaatgtccggcgcttccaaaatcagttcatatgctttttcattcaatgcccgcagggacaacacactacaatcctgctgatacggcatatccacttcactcccaaacttttgttttcttgcggaggatcccagggggagtcccccttttccgagttttgaaaagatctgttattgttacacaaccgtgatatacttcttcaaatcttcccgcatggcaattgccgcatcccgggctgcttcgccaaaatcctttccctcttttccggttttctgccaggcgcagatgatgcctctggaagaattgacgatggctccgtgaccatattcatcgaaagcatactgcacatcttccgctttgccgccctgcgcgccatagccgggcaccaggaaaaacgtcttttccagacggcggcgcagatcgcggatatccatggggtacgtggcgccggtgaccgcgcctacacaagtgtagccgtatttgtccaccgtatctttgctcaagcgctccagcagatcgcccaccacattgtaaaccttgcggtccccggccacaatattctgcagctcgccggaggaggggttggaggtcttgaccagagcaaacaccgcccgatcccgggccacacagtctttaatgaaaggattgatgccatcgctgccaaggtaggcattgatggtcaggcaatcacagccaaacggctccacttccgtttcgccgattgttacgctgccgaggtatgcctcgctgtagccctcggcggtggaaccgatgtcgccgcgtttggcgtccatgatgacataaagccctttgcttttggcataatccacggtgcgcttcagcacttccacgccttcaaagccaaagcgctcataaaaggcgctctggggcttcactgcgggtactacatcgcacagcgcgtcgatcagccccacattgtactcgtaaatggcttcggctgcgcagcgcagcgtctggccgtattgcttcattttttcctctacgatgaaagacggcacatactccagcttcggatccagtccagccaccgtggggttcttcatttcgcggattttatcctgcaagcgttcaaaagacatcgtgcggcaactcctttatcattctcttttttattttgaaactcatttgtcttgttcgtatcgcatatattgcggccaccggatcagcgtgccgcttcggcatcgtagaccgtttcgccgccgacgacggtgcagcgcacgcgccctttcagttcccagccggcaaagggcgtgttgcggcctttggaagcaaacgcctcaggacgcaccgtccacgtttcctccgggtcaaacagcacaatatccgccggtgcgccgacgcgcagcgaccccgcgtccaactgcagaatgcccgccggcgccgtgctcatggcccgcaacactttcatcagcggccagcccaactggtggtgcagcaccgtcatcgacagagccagcgacgtttccaggcccaccatgccgctgggcgctttaggcagctccctcgccttctcctccacagtgtgaggcgcatggtcggtgataatacagtccagcgtgccgtcctccaacccttcaaggatcgcttccacgtccgcccgggtgcgcagcggcgggttcactttcgccatcgccccctgcttttcaatctcttcttctgtcagggtgaaatactgtgggcaggtctctgcagtgacatggatgcccgcagctttcatccggcggatataatccaccgagcctttggtactcacatggcagacatgcacatagccctccacatcagctgccagcattccgtcgcgcaccagcaacaactcctcggctaccgccgggcgtcctttatagcccagctttcgggacagagcgccttcattcatcacgcccgcgcgcaccaggtcgccatcttcactatgggacaggatcggcagccccgacggcttcatgcggatcagcgcttcacgcatgatttccgcgttcatcaacggcacgccgtcatcgctcagcgctgctgccccagcagagagcagatcctccacatcagtaatctccttgccctgcatgcccagcgacaccgcacccaccgtgtaggcccgcaccttggcgctgcgcatggcgcgattgtaaaaatccgccacgcgctccggtctgtcaataacagggcaggtgttggccatggccagaatgctggtcacgccgccgcgtgccgccgccgctgtaccggtagcgatggtttctttgtcctcaaagcccggctcgcgcatatgggtatgcatgtccacaagacccggcgcagccacaaggcctacagcgtcgatgatctgcgcgccttccgccggcaaatcatgccccaccgcagcaatcaggcccccttcgagcaacagctcgcacggctcgtcccgcccacaggcggggtcgattacccgcgcgccgcggatcagttttttgcccatccgattccctccgattcttttctgccgccacgttctttgcacgcgcggtccaacggatcgttacaaatataaatattatactatttctacctgtttttagcaacaaaaaagcttcttccgccccgtctttttttctttctaccggtcatactatagccagaccgaaaaaggagtgatgaaaaacatgcataccgattttctgcgcggtatctgtgtcggcgcactggccggcgcagcagtggaggcactgatgctcgttggcgactcttccgcgaaaacgcgcgccggcaacaccatgcgcgccatgggtaacgccgtggatgacgtcgtagacaacatttcgcacaaattccactgagcaagcacaaaaggcagaaggcggggcggaaattccgggcaaaaactgcacggcgtttccgccccctgcctcattttctccgaaattgcatttttctaaactttctttgaaaaagtcccttgacaaaccaaaaaaatctggtaaaataaatcgtgctgttacgagcacgaagcctggagagatggctgagctggtcgaaggcgcacgattggaaatcgtgtataccctataaaggtatcaagggttcgaatccctttctctccgccaaatccgctttcctttttaggaaagcggattttttcttgtagtacatcaataactccagcgcaaaggagaacaccgccatggaaaccagcgtcccagtcaaactcaaaaccaatctgaataccaactttatcaaaatcatcgccattgcggctatgacgatcgaccacgtcggaaccgtctttttcccggaataccccgcctttcgatggatcggacgaatcgcctttccactcttttgctattgcctgaccgtcgggatgctctatacccacgacatccgaaaatacgccctgcgtctaggcgcttttgccttgatctcccaaccattctggatcctggcttttcacgccgataacatccccgggaatctatttaatctaaacatcttctttaccttgctggttagcctcctggcgacctggggctttaaggaacggaaatggtggctgtttctcgttgggctcatcctgctgtgcgcagtcaattttgattacgcacaaaccggactgatcctgatgctgattttctatctatgccggaataaaccctggctgggctttcttctgtacacgctcagctacctgcccgcgctcaacggctccatggccgatccgctctcttggaaactcggaaattatgcggtgggttttgagattttttctttgcttgcgctgccgttcatttttctccccatcggcacagatatccgcctttccaagtggtttttttatctatactaccccgcgcatctgctggctatctttttgctgcagctttttctgtaaacgcaccgcagcagcccactgtgcaggattccgcagaaaaggggcggcaccgcagaaccgtgctgtcccttttttcggggacacaagagctctggggcttgcatttccgcagcaaatacgttacactaaatacaatatatattgggaataagttgttttttaatccataggttctgacagacaaaatatgggccaagcgctgtctcttatacacatctgacgctg

SEQ ID NO: 470 - DNA, 6086 bp, Unknown
  16S sequences of unknown bacteria
cgggaatttccgaaatatgtccgccgaaaatcttttttattcccgaaaaaccgattgcaatgccggtggcaaaaagcagagcgctcagcaaaattgccgaaacacattcaagccgctcgtgaccgtactcgtggtcctcgtcggcctgttttgaggaagccttgacgccgattatgacgaccaccgtactgaaaacatccgacgccgaatgaaccgcgtcggaaatcatggcgcccgaacgggcaaatattcccgcaaaaagcttgaaaaaggaaagtgccgcatttgcgataacggtgacggccgaaacccgcacggcctgtttttctcttgagttttccattgctaaccctccgtatataacaactcacctgtgcaacggcttgcacaggtgagactcatttttattataatattatttcttttctcggcaaattatgaagggcgtgagctcgtccgactgaccggcgggattgtcggcaatcataccgatcagggtcttgtcgggaatcgaattgagcttttcgcattttgcaaaaatttcgatgctcaaatcgtttgcgtcgacgatcattgcggtcactccgcacttgtcataaatctccttgaccagtttttccggctccttgggatttaaaatggcaaggtcgtgataaatgtcaaaggatgaacccatgtaaaagccgtctattccgtctattccgtgacccgcgaccttgtaaaaaacgccttttttaccgaaaagcttggtgacggccgagcagacggtggcaagaagaattctcggaagtccggcgatatttatggcgagctggagcttatatggctcgtccatgccgatgccgtgggataccaatagaaattaccgtgggatgagtgcatggcaaatttggaaagaaattttgcccaaaagcccagcttgacgtcctttttttccaccgtgttgttctggcacatggacatgattttttcgccgatggacaacacgtcgccctcctcataaagaggcagaacatatttttttataagctctatataatcctcgccccgctcgacaaaatgagtctgaaccgcaaggcgctcataggtctttccgtcggcctcgatgtcggggcggacaaaataaactatgccgtccttttcgcggcgggattctttactgtttctgaacatttcaatccacaactttcttctgtattcatgttattatataacctttgcaggggttagtcaagatttttatgaagggcaagctttaaaatgccgatttgggtcttggcgtcggttatttcgttgttttccaccatttcgagtgccttttcaaagggcagggtcaccacgtcgagaaactcgtcatcgtcaagatgctgacccttgaaccgaagtccgtcggcaaggtaaatatagtgcttttcctcaaggcagccgggagaaggatacatcacaccgaaaagggtgaaattctcggcctcgtaccccgtttcctcgacaagctcccttttggcgcatgagagagggttctctcccctttcaagcttgccggcgggcagctcgagcagcgactcacccacggcataacggtactgtctgacaagaaaaagctcgtttttatcgttaaaggcgattatgctcaccccgccagggtgctcgacgatttctctcgtgcaggggcggccgtcgcaggtcagcgcacggtcacagcggacatttataatattccccttgaacttataaatcttttccaccgttttttcttctttaatcataaaaaacaaccttcccgaatagaaattaacaagtccgacaaccgcataaaacgccgcttatgtgcgaaccgaggagaaccgaaaaatggacaacttatattttgattatgcgaaatttcaaaaggagctgctttcccttaaggtaaaataccccggcataaaacttattcccgcggccaaaagccgcatgggacgggacatttttgccttaacggcggggaaccctctccacgcaaactttatcatcggcggttttgagggcgacggcatactttcggtaaaaaccgtcatctcatttgcccgccgatatttcgacgctcttttttccgaaaaggtgctttgcgaaatcaacataaaaaaggcggccgaggagcgcacggcggttttcatcccctgtctcaatcccgacggagccgaaatattttcggcgggaaccgcggcgggactgccgtggcttcaaaaaagcgcggcctttttcggcaggcagacggaaagctatcgggcaaacgcgggcggcgttgagcttgagggaaattttgaccacgattttgcggacagaacacaaaaagagaggctttcgggaaaattcacaaaaagcccattcggtttttcgggtcaaaaagccttttccgagcctgagaccgcaggacttcggaattttttgacatcatttgagcctaatttgatttgccgcctgtcgggcggaaagggagaaattctttggcgcagcgacagcccccacaaaaattcgaaacgcattgcgaaggtgctttcctccctctcgggatatgccatggaggccgaaatatccgactcgtcggcaggtactttcagaaaatgggcttcggcagcccttaaagctccctgcatcgacataaagctgccgcagatttcttcggtgcacaccgccgacaaaatttttgccgagcttttggaaacccttgccgttgcggccgttatttaatcgttgaaaataaattttcccgccttgcacatgacggtcgactggaaaatgtcatcggcggtgaatatgaaccaaagctgatttccgtccttttcataggcaagacagcttgcctccgaggtgccgtaaatcaaactttccgagcaaacgtcggcaacgctgccgtcatatttcggctcgcccatcaccttgcgaatctgctccttggtggtgatggtgggagaaaactgaaaaacgtcgccgtattgggaaattgccacggcaccctcctcgggagcgtcgagagaaacgaaaatctgacttcccaccgggagatattcggcataacccttgcgctcgagatactgcatttcgccctcggggaaaagcggggtgaatttctcggccgttgtccccagctttatggtaacaaaagggccgtcctcggaggtctgaacctccatttcaccggaagtgagcgccgccacggccgcctcgtcgctgaccttgacggtggttgtgccgttgaaataggtcgggtcggaatagaccgactcggcagcattttctccgtcgccctttttgcaggcgcaaaggcttaaaagggccgaggacaaaagcaaaagagcaattatttttttcctcataaataactcctattttgaaaacttggtgagcagctgctggcgcagatcccaaagcttttgagacatatccacataataatggtggggattctcaaagcgggtgacctcctcccaaagagaggaaatctgcgaacggcagtagctctgaatttcgggaagagtggggcttgaatagatgcactgacccttcacgaatatgggctgaagcagacggcgggcgacaaagttgtccaccgtttttcttttccatgtgtgaatggggtcgaaaagctcatagggcgcggtctggtcgatttcctcgccgtcgagagttacgacgtcggcaacggccttgcctgcctctcggtcgaaaagacgccaaaccgtcttaaatccgggagtggtgattttgccggtattgtcgcttatcttaattctcgggacaagctctccgtccttttcgattgcagaaagcttgtaaacgccgtttaaggaaggttcggaggcggcggttataagctgctctcccacggcgaatgagtcgacgggggctccctgaataagcatatcgcggacaatgtcctcgtttatggaattggagacggttatctggcagtcggcataaccggcctcgtcgagcatacggcgggcctttttggaaagataggttatatcgcccgaatcgattcttataccctttggacgaacgcccatgggctttaacacctcgtcaaacacctttatggcattgggcacgccggacttgaccgtgctgtatgtgtccacaagcaaaacgcagttgttggggaactgctcggcataatatttaaaggcctcgtattcggtgtcaaaggcctgaacaagactgtgggtcatggtggaaaaggcgggaattccgaattcctttgaggcaagtacattggaggtcgcggtgcagccgccgatatacgcggctctggcaccgtagacggccgaacccgctccgtgggcacgctttgttccgaattcataaacctctctgccgtcggccgcgcggacaatgcgggaggccttggtggcgacaagcgactgatgattgattatcataagcagcgccgcctcgataaactgagcctcggcaagaggacccctaaccgttatgaccggctcgaagggaaacaccggcgttccctcgggaaccgcccaaacgtcgcaggtgaatttgaaatttttgaggtaatcgagaaaatcctccccgaacccttgggttgagcggagatattcaatatcctcatcggtaaatttaagatttctcaaataatcaataagctgggaaagaccggccgaaacaataaatccgccgccgtcgggaatgtcgcggtatacaaggtcaaagcaggcggtgcttgaggcaatgtcgcctcccatggcgccgtatgccataccgaactggcaaaaatccgtcagcagggcgggattatcctttaaatttaaggagaaactcataacaaagacttcctttacgttttttaccctttcattttaccacataccgaaaaaaatacaagaaaaattattgaaaaataatgcgaaatagaataaaaatgtgcatcaattgtaaaattttattgcctttgacaatgtatatttttgcgttttttacgaaaaaacaaataaaagtatatttgtttccgttttagaatattagccttttgttaatgtaatataattctaaaagagatatgagattgagattgattgcttattaaggaaaaggaggctttctaatgagagtcagaaaaaaagaaatcggcgacagcaacattgtcggaaagaaaatcgagcagcgccgtaaatccatcggcatgaagcagaaggatttgcttgctcagattcaaatcagaggcatcgagatgaatgcttccggtctttccaaaatcgaaggtcagatcagacatgtgaacgactatgagcttgttgcctttgcagacattctcggcgtttccgtcgattggctcctcggacttgaataaacggtcaagctcccaaggctccgcattttaagtgcggagctttaattttttcttgaaaatgcaaaacctttatcttataatattaaaaaaacgagaaggattttttcatgatttttgatacccatgctcattatgacgacgagcgtttcgacgacgacagagattttctttttaacgaatattttcccaaaaacggcgtttgcggagtgataacctgcggaaccaacgaacaaagctgcgccgcggcggtggaaatggccgaaaaatacgataatgtttacgctgccgtgggaatataccccgagcacaccgacgaaaaaggcgttgaccttgaaaagctccgcgccctttgttctcacaaaaagacggtggcaatcggagaaatcggccttgaatatcactatgaaggggtttcccacgacatacaaaaaagggagtttgagcggcaggtgctgcttgcaaacgagcttgaccttccggtcatcgttcacaatcgcgaggcccacaacgacacccttgaaatcctcaaaaggacaaagcccaagggggtcatccattgcttttcgggcagcgttgaggtggaaaaggagattttaaagctcgggatgtatatcggactcggcggagcggtcacctttaaaaacgcgcgggttccggtcgaggcggcgagctttgtaccgctggacaggcttgtgcttgaaaccgacgcgccctatatgtcccccgtcccccaaagagg

SEQ ID NO: 471 - DNA, 9421 bp, Unknown
  16S sequences of unknown bacteria
aatgtggcgggagtgtgtgaaaagggcgtgcaggtgacgctggtgtcggacggcaacgagtatacagcggtcaaaaatggcagtattactgtgaaaaagcgcgccggctggaagctttcggtgttttcgcttacggaaaaatgcgagggcgtgtcattaagcggcgtttattatccgcttgagggggcggtgatgaccaatacttttcctctcggcacgagcaatgaattcgtagatgacgaggcggtaataagcgtgaaaaacggaatgctgctcgtggtcgtttcgcgcgattaaatcattattaaaaaatacagcgtgcagaattgatgtgcgcttagaatgctggcgagcgcgcagcgaacgcttataattctctgcctgctgattatgcgaagatatgcaattattttgtgaaaaatttagcaaacctcttgattatacaagtctaaaatggtatgctgttattaggtaatatgttttataccgtcagctaaagcggcggaaagaaaggaaacggatatgtacgaaaatattaaatttgaagttaaagaaggtattgcttatatcactatcaacagacctcaggctatgaatgcgctcaactgcgatgttctcgacgagctcacttgcgctttcggcaaggtagaaaaggatgaagagatcaaggctgtgatacttacaggtgaaggcaaagcttttgtagcgggagcagatatcgctcagatgaatcagatggatgcggttgaaggaagagctatgatgattaaaggccataaccttatgaactatatggaatcaatcgaaaagccgattattgcggctgtaaacggatttgctcttggcggcggatgcgagctcgctatggcctgcgatttccgcattgcctccgaaaaggctaagtttggtcagccggaagtaaatctcggaattatccctggcttcggcggtacgcagagacttccgagactcgtaggcaaggcaatgggcaagtacctcattatgactgctgaaatgatcggtgctgacgaggcgttcagaatcggtcttgttgaaaaaattgcagctccggaagagctcattttggaggcagaaaagctcgctaagactattatgtcaaaggctccgcttgctatcgctgctgccaagacagctatcaatacaggatacggtcttgatatgaagactgcaagtgcgctcgaaatcgaggctttcacagcgccgttctcatcacaggacaagacagagggaatgactgcattccttgaaaagagagctgcggagtttaagaacaaataacgagataccggaatttatattgcgaatactgcaatttgaatatgcgatgataaggaatacaagttattatagaacggcatagcgtcaatagctgtgccgtttttatcttttttcgcagattgagtaaaaaaagatattatcttgacaacaggcggacaagcaatatatcgtatttaaggggtagaaaaacaggtgaaaaggtggtataataactatcgtgcgaccgcgcggcaatgctgcgagaggggtcaagattattttgaaaagagggaaaagagatggattactacacacaaaacaacattacggtaactgtttcgagcagagatataagagcgatagcacgagaatcacttgcaggaaaatggaaaatagcggctgtcggtacgcttatttatatgtcggtagcgacaattccgcagataattctgagcacacttcttggaagccagacagcggcaactctctacctttatcttgtttcaggtgcattcaatttgggatatgcagtgtttatcctcaatatttttagaaacagggatgctgactatgcccagcttttctgcggatttgagcgcatacttaagacaatcggcctctatctttatacaagccttttcatagctttgtggacgatgctgttcattgttccgggcatcatagcagccataagatatagtcaggtttactatatttttgctgacaatcctgaaatgccggtaaccgaaattgtcaatgaaagtaagcggatgatgcgcacgaataagatgaaatatttctgtcttggattttcgttcataggctggatttttcttgcggtgcttccaggcagcatatatgaaactgttatatcggcagaaacaacggcgagcattattgcagcggcaaatatgggaatggatatgtcaagtatcattgccgcggcacaaaacagtgtagcaaatatgggatttgtttcacaaatggtgatttttgtgcttgaagcagggtatttttgggtaacaccttatatggagtgtgctaacgctgcgctttatgaaatgataaaaggaaatctgagacctggcatcatagatacgacggcaactgttataaataatgcaggtgcgattaccggttccgcacgggctgcggaaacagaagatagttttgcagatgcacagccatcttctgatgacggcggaagtgataaaagtgaggaaacggaaagtacagtttttaagagcgcggatgaaaacggtgcagacgacagaaatcaataaataaaacaattaagaaagattaaaagataggagataagagccttggctaccagaatcaattacaaaagagaagaaattacttcaggaaacagagggttttcgcaatcgagaacgacgattgaaacagcgttttacggcaacaatgtagagataatgaacgatctcaaaaaagcatacaaaatggcggaagcggcgccgggaacgattgttaccgatatgcctgtatacaagcctgagagcataggtattcccgatggagcaaaaattttactttttaacgatggggcaactgtgggcagatttgcgggcgccagagttattctcggagaaaagggtgttgacgaaggcgagattgcaaaagtgctgcgcgacgcggtatttaatacaagatataagaagatgtatcatacatcggcgtatattgggcttgacgaagattttatggtaaaggcgcatcttttaatacctgaaacatatgagaatacgctttataactggcttcttaacttccaatatataaatccgttctatgaggagatgtatgccaaatcgagagttataggcgatgagcctgatatattcattatgtcggatcctgattttacgcatcctaaatttcctgacgggcttgcgtatttcgatcctgagcataactgcgcatgcctgctcggaatgaagtattttggtgaacacaaaaaaggtacgcttactctcgcgtggggcatagctaacagaaacggctacgcttcgtgccacggaggactcaagcgctgtgtcagaaaggacggcaaaaaacatgtgctcggagttttcggactttcgggatcaggcaagtcgacgcttacgcatgctaaacacaacggcaagtacgatgtaacggtgcttcacgatgatgcatatataatttcactcgaaaacggatctacggtagcgcttgagccttcttatttcgataaaacacaggattatcctctgacatcgccggataacaaatatctgataacgacgcagaactgcggtgcaaccatcgacagcgaaggcaagctcgtgcttgtaaccgaagatataagaaacggaaatggcagagctataaagagcaagctttgggcggctaacagagtggataagatggaagagcctataaatacggtaatctggctgatgaaagactcgacgcttcctcctgttctcaaagtagaagaccctgtacttgcatccgtgatgggcgcttgccttgcgaccaagagaacgtcggcagagaaacttgcggaaggtgtagatgcaaatgcgctcgtatttgagccgtatgcaaatcctttcagaacgtatgcgctttcgcaggattacggcaagtttaaggctctttttgaagaaagaggagtgcagaactatataataaacaccggtcattttatggataagaaaattcccaaagaagtcactatcggaattctcgaatcaataatagacgagactgcggatttcaagccttttggcagtgtaagcagtatgaaaacgctcgaaattgaaggctttgaagtgaacttcagcgataagagctatgtggatgcgctgaagcgcggaatggagagcagagtaagctatattgagtcgcttaaagaggcaaagggcggcaaagacgagcttcctgcggaagctgtcatctctataaaaaagataattgacgaacttaaatagatacaggcactaaaattaaaatcctccatataatagtatctgaaactaatataagggggattttttatggctattgaaagacacatataccccggaggaaacacgccgaaggggttcttttcttattacagttacatcctcggacagcgtgaagcaaataagattgtgtgcataaaaggagggccgggagtcggaaagtcatcttttataagaaagataggaaacgattttcttgcagaaggcgaaaatgtcgattttatgcactgttcatcggatgccgattcactcgacggcatagtacttaaagaccgcaaaatagcgtttatagacgctacaagcccgcatatcgtagatccgataagtccgggagccgtggacgatataattcatctcggcgaatactgggatgaaaagggaataagaaagaataggcttgctgtaatagaaaaaggcgagactataagtaaatggtatgcgcgcgcttacaattatctcagtgcggcggagaagctttatgacaatgctgcggctgtatacagcgaagcagtagaaagtgcggagatttataaaattgccgcagaaatagtgggtaaggagctttctcataaagagatctgtctgagaccgggaaatataaaaaaatattttgcgagtgcgataactccttcaggatttgtgaactatcttccgagcatcgcggaaggctgcaaaaaaatatatctcatatctgcgccttttggagcatcggcgcacagtattcttgatatatttgcagaaggtgcagtgtatagaggctttgccgttgaggaatatttctgtccgctcaagcctgactcgaaaatggaacatctcgtagtgccggagctttcactggcatttattacggctaacgaatatcacgatgtagaaccgtggcagcttccggagggcactgagtctatagagcttcttgatatggatgatatggcaaatgcttctgtgatcgagcgcagaaaaaagctgcttgacgaaagtcagaatctctgcgatatgatgatgaaaaaggcaatagaatgcatagaagaggcaaaaaaggagcacgatgtactcgaaagctattatataccgaatatggatttcaaaaaaatagacgaattgagagatgaaattattgctaaaataaggtcgcaagaggtataataaaaagtaaatcaaagcagcaggcaaaagatttaatacgcaggggaataaaatacaatggagaaaaaatttgtgccgcttttatttgcgggagacataaatgtttacagtgtggcaagagcgtttaacgaagcgtacgggattaagccgtatgcatacggaaaatttgccgctatgccgtgcatagaaagcaaaatactgaattatacggcaaatccgagggcagacgagcaggacaccttcctcggcctcgtcctcgattttgccgaggctcataaagacgaaacggtgctgctcataggctgcggcgacagctatgtacagctcataagcgcaaacaaggacaagtaccccgaaaatgtcatagcgccttacatttcggtggatatgatgaacgagctcacgcataaagagaaattctacgatatgtgcgagaaaacaggcgtcgactatcctgatacattcgttcacagaaagcagctgggctatgactttgagcttccgtttgccggtccttttataataaagcctgcaaatggcgttgaatactggagacatccttttgcgacacaaaaaaaagtgtacaaggtagatacgagagctgagctcgaagcggtgctcgctgacatatacggagcgggctacgacgattctgtgataatacagaatttcataccgggagacgacacatatatgcgtgtactcacaaattattcggacaagcatggcaaagtgaagatgatgtgtcttggacacgtgcttcttgaagagcatacgccgcacggtataggaaatcacgctgtaatcataaccgagcataacgaagaggtggagcagcagtttaaaaagctgctcgagaagatgggctatatcggtttttccaattttgatataaaatacgatcagcgcgacggaaaatataaggtatttgagataaatacacgtcagggacgctcaaattattatgtaaccggagcgggagcgaatgtagcaaagctttttgtcgatgattatatcgaagataaggatatgcctcttcacatcgtcgataatgaaagtctttggatggtagtgcctaagggcgttgctttcaaatatataaaacctcacgagtatagagaaaagatgaaaaggctcataaaagagggaaaaatgaagaatccgctcttttatgataaggacaaaggctttaagcgcaggttgaggctcgctaaatctatgctcgggcattattacaaatacaataaatatttaggaaagtaacaaaggggagaaaaaatatggaaaagagacatactatttcagaatttacagacttgctcgcggaaaacggacttataagcgatatgagcataggaagctcaggtgaaaagacgatagaatacatttcgtttagctctgcggatatgagaaacaatacgctttttgtatgtaagggtaagcactttgaggaaaaatatcttgcggatgcgctcgcaagaggcgcggtcatatatgtgagcgagaagaagtatgaggcaggcgatggtgctccgtacatcatcgtgaacgatatgaggcgggcaatggcgctgatagccaatcttttttacaatgatgtgtggaagaagctcaatatcataggaattacgggcactaagggcaagtcgacgacgacatattttatgagatatatactcgatgactttatgaaagctgagaaaaagccgaggtctgctgttatttcgagcatagatacttatgacggtgttataaatgaagaatcacacctcacaacaccggaggcgtttatgattcataagcactatcacaatgcggttgaaagcggaatcgagtatcttactatggaggtttcgagccaggcgcttaaataccatagagtaatgggtataacatttgatgtcgcctgcttcctcaatatcggccaggaccacataagcgatgtggagcatacggattttgacgattattttaattctaagctcaagatattctcacagtgtaaaacggccgtagtaaacttaaatgcggatcgagccgagacaattcttgccgaggcaaaaaaaggtgcagaaaaagtgattaccttcggtcttatgccggaagctgatgtttttggctacgatatcattacagacagcgacggcatagcttttaaagcgcgtacgccaaagtttgacgaggaatttaagatcggaataagaggtcttttcaatgttcagaatgcacttgcagccattgcaatgtgtacagctcttgatgtaccggtggagtatataaagtcagggcttttaaaagcgagagctgatggcaggatggagatatacacggcgcgcaagaaagatttgagcgttatagtggattacgcgcacaataaaatgagcatggaggcgctgttcgagtcgacccagaaggaatttccggggaaaagaatttcgatagtatttggctgtccgggaaataaagcttatggcagaagaagagagcttggagaaatagcaggacgctattccgacgcgatttatctgaccgaggaagatccaggtgaagaatcggttgttgatatctgcaatgaaatagcaaaatatgtggaaaaggaacacgcaaactataagataatacctgacaggcgagaggcgataagagaagcgataaagaatgccggcgacaatgcggtggtgctcgttacagccaagggcagagaaacgcgccagaaacgcggcacggaatatatagaggtcgcctcagatgtggatatggtgcaggagtttttgaaagacgaataaaaaaataagccctctatgtgtcaagcgcattttaagacgcttgcagaggcttggggctgaaaatgtacgcgatttctggcagcgcaagctgctaatgacgggaaagcagataagcatatgagtaataaggcagtatatattcatacaaatggtacggaattgtcggataagacaaaagagcttttaagaagtaagctcgaacgcagcggatttacagtgctaagcgaatttaaaaccgatgcggagcttgctatatgcgtcggcggcgacggggcgtttctcgacgccgtacataaatttggatttccgcctgtaccgtttatcggtataaatacgggacatctcggcttctttcaagagatattgcccgaacagcttgacgagtttatatttaattacaagcaagggaaatacagtttgcagccgctttcaaccgtaaaagctgaggttgtggatgggcgtataagcggtaatgacagcagctttagcggcccgcgcacagtcttgagtagcggcgaaagaaagatgagcttcgtgcctgagactttggagacggcggaatttcgcgcgttgaacgaggttttgataaagagtgcgcattcgcgcagtattcacctcaacatttccatcggcggcagttttatagagcgcttttcgggtgacggtatactggtagcgacctctgcgggctcaaccggttataattattcgcttggaggctcgatcgtagatccgaggctgaaactccttcaagtaacgcctattgcaccgatgaatacgacagcctatcgttcatttacttcgagcatacttctgccttccgatatgacgataggaataattccggagagcgaaaatgcggagctctgcgtggcggtagacggtatagaatacaaatacgataacataaaggaaataaacatcagtatggcggagacttttgtaaatcttctgcgttttgagggatatgatttctggaacaaggtaaaaaccaagtttctgtaaagacgattgatgcgtcagcatatacagcgcggcgctgaattaaggcataaaacggattaagaatggataaatttacttatgtggtgaaaaaggaggatgagcagtatcagataaaggatatactgcgccataacttcactttttcatcgcggctgagaaaaaagcttaaacaaaacaattcaatatttttga

SEQ ID NO: 472 - DNA, 15369 bp, Unknown
  16S sequences of unknown bacteria
cttggcggcaacgccgccgagggagaagcggtttttttccgttttgggaaaacgggggactattgttgacacaaagatgttaaataataaaattctccaaaaagttacaaaaaaattattgacaatataaaattaatatgatataatgcaatcagtaaaaatcgaatttggtaaaaaatttcaaaatcgacgacacttgttaaaagggcaaaactgcggcaacgcagtgacgcaaaactataggggctttgaaagagaaaagccagccagttgcacagtattctgattccgtaggaagagagaatgttggtgcagcttttttttgcgccaaatcggacaagacggataaagaagcaccgattattttattcaggcatatcctatccgttcgctccggatagttatgtgacaatcggaaagattccgtgtttaacaaaaaatgtcttgctccaatccgattattttttatacgttatttttccgattgttttattttttgcgataagaaaattatcagacttttgaggatttggaaaaaggaaattcccgtatggagaaaaagaacgaaaagcttatgcaagcgcgaataaaggaatatctcgccgcaggggtggctcccctcgaatggcggctttatcctgttcttaaaatttccgacggctcttccttaggctatttctctaaactattcgtcaattctttaaagctgggcgcgatcgctcccgaaacatatgagccgtgcaccgtttccacgcttcgcggcgcaaagcttgccatgtggcagctggaagaaacggatcgcttgttttccgcattgctcgcaaaggggcggacgctgcccatgatcacgatatccatgcctttgaaaatgtttctcggcaaaaccgcgaaacgggcgttttccgattttctcaaaacgctctctccgcaaaaggcgaacaagatctgcctcgctttcacgcccgagattttattcatgaagcccgaggaggtcaatccgaaactggaagaaaccgcggaaacggggataaaaacggctttgacggggtacggggaagaatattgccctccgctccgcttaaagggactgaaattcgactacgtatactttgcgcccgaattttctttggctctcgaaaggggagaaacagacgtgaaagcgctcgcgggcatggcgaaggaactcggctttacctgcataggacagcttttccacagcgaaaagtaccttccgcccgaaaaaatgccctctttggaggaaaattacctcgcggattatgcgacgggcggcgcgggaaatacggtgaaggaacttttcggaaatattttcggggaggaaaaagcatgagccatttccgcaaccgccgtttggtgacggatgccgtagccgctaaaaaatacatattgaaaatgcggcttttgcgggggcttgtcggtacgattctggtgtttctgctatcgggatatatcgcggtttcgctatacagcaaattcggctccctcacgatcagcatcaataaattcgagagtacgcagtacagcttgactttgagcgaaacgcgggattttaaagaactttccgcgacgatagcggcaaaggaagtccccgatatcaccaatatttcgggcgccgacctgcccgcggatttagacagcatcgacggtcagcacaacggcaaaaattatttcgcttatacgttttaccttttgaacaacggagagaacacactctcttacgagtatcagatggtgctttccaatgttactaacgacgtggataaagccatacgcatccgtttgtacgtggacggaacgcctactacttacgcccggacccgcagcgacggcacgggaccggaacccgatacgacggagtttcggaccacttcggtggtgatgaacgattttaaagccgattttaagccaggaaattttactaagtttaccgtcgtcatctggatagagggggacgaccccgattgtacggacgaactcatcggcggcgacctgaaatgcgaaatgaaattttccgtcatcgaggacgtccgctcctcacaagagtgacttttaaggcgctctgatatatcaaatcgttaaaatttttacccggtacataccaaaaaaaacaaaaacttgccggggaaaaggagaaattctatgaataaaaacgcacgtaaattaatccctgcggttgcgatgcttctcgtttccgcgtccatgctttccacggcatcctatgcttggttctcgatgaacaataaggttactgcaagcggaatggaagtcaatgtagccgctcctgctaatttaatgatctctaccgatgcaactgattggaaaacttcggtttctggtactttggctacaacaagcaaattacttgggcatgcatcttctgccgacggaagtgaattatttaccgtggatcctaaaaaagcaaatgaggacggtaccttgcaagatgatgcggatattgttaaagtagataatagtacttatgcaaatgtctatggaattacaggtactgctggttatgcggattatacattttatctggcaactacgagcacgtcaataatgaaggttacattggataccgaaactacaatgtttacttctaccaaagatacgggaaaggtattaatgcctgctatgcgttttgctgttttaacgggagaaacacccacaaaaccgaccagcggcaaaaatgtttggtgtggagaaacaaataactcgacggaaaccgaagcttttaacgctgagggaaaagcaaatgttgccactaaattgatgactgaaaaatttgtagcgaatacacaactcatagaacttgccgcaggaacggcgggtaattatggctctgccaccaaagtaaccattcgtatttgggttgaaggaaccgatgcggctgctaaaaatgcaaatattacggctttaaaagattatactttaaccgttggctttatggtagtttcttaaacaaaaattaataaagaaatttttaataaagagaggcagacggattgacggagaaaacggcttcctctgcctctcttaatttttattttttaaatgtacgcttctttacacaaaaaaacgggggcacagtgttgctattatatgaatcggagaattttgcttagaggagaggggcagccttaaaatctttaatcaaaacattccttttctttgctcttccttactcaaaatttctttcgttcagtacacggcagcgtggtgccttaaaaatcctgtctttcccaagcttgtgcccgagaaggcggaagctcggtttatggcgaaaaaaagaaaaaaacgtattcgaatttatgacaatttcttcggaatatgttataatagtaataattacaggagaaacgaggaaaaagacgtcttacgccttttgtaaaaatcgtatatcggagaaactcatcgatgaaaaaagcacttaaaattgcagtaaacgttattttatgggtatttgtcgcgttttccgcaatgaccatggtactctctctttcctccgccgcttccgacggcgtgcccagcattttcggaaagagtctgatatccattcagtcggattccatgaaaccgacttttaaagagggggatctcctcttcgtcaagcctttgaagggcgtggacaggatgactttgaaaaaagacgacgtcatcaccttctgggcggatctcgacggggacggaaaccaggagttaaatacccaccgtatcgtcgaagtcatcaacggcgacaactacgaaaatgaaaacgtttcttaccgcacgcagggcgacaaccccgaaacgaatgcgacgcccgataaagatttggtgctccattcttccgtcgtcggtgtttggacggggaaaaaagcggggggattgggcagcgcgctcgactttttacagtcctccacgggctttttggtcgtaatcgtccttcctttggctctattcttcatctatgagttatacaacgtaatctctaccgtcgtttccatgaagcacaaaaaggcggcaattacgcccgaagacgaagaggagatcaagcgcaaggccgtagaggagtatctccgtcagcaggcggcgctcggcgcttcttccgaaaaagcggaagataagcaaccctccgaggaagaaaaagaggattcggacgggaaataaatcggcaaatatacagatttgtctttatcgggaaagaaacggaatcggtttcgaaaaagaccgattccgtgtaatataggagttttttgccctcaaagcgaaaaattttcgcgtatcggcgtatttcggaacacaaaccgccgcgcattatgtgccgcattgcgttcgttccccgatcggcaaagggcggacgaggacgcagacctgacattgggaggagcattttggataatttcatcaaatggttttttgattttatgcaccagctattcggcggaatctgggcgatgataaaaggcttctttttggggctgttccagacggtcaacgtgaagcaatattgggatacgtttgaaaaatacgcggcgtctttcgggccttttcaatggatcctcgccatcgtggtggtgctcttgatgatcgccgtctttgccgctatcgtctacatgatcgttcttctcatcaaaaagtgggtgcgttatcgcaagactttgataggcaacgaggatctcttacgcgagctttccgacttgcaccgcgacgtcgccaggctcaccgccgagaaagaaaagatcatggagcttaaaatcgccaatggcacgctgacggtggacgccgtgaacgaaatcgtcgattccgtccgcaaggagtacaacgacgcggaagcggatgaaaacgtccgcgccttgcagccggctttgcccgaaggagaaaagaaagaggacgaaaagacggaggacacggtagccgcgggcgcgggacatcgctttttcaggctcaccgccgtggacgaaaagtacgtgttctatgaaaagccgctctatcgccatgacttcgacttaaagacgctctgcgacgatttcaggaatttcgcctgttcgaatatgggactgttctacgaagtcaagactattcgcctgatgtttgcgggacttgcgtccacgaaaatgattcttttacagggtatttcgggtaccggtaaaacttcccttccctatgcgatgggaaaatatttcctcaacgacgcgaccatcgcttccgtccagccttcctggcgggaccgcacggaacttttcggctacttcaacgaatttacaaagcgattcaacgaaacggacgttttgaagcgcatttacgaagcttcctataacgacgacatcaatatcatcgtgctcgacgaaatgaatatcgcgcgcgtcgaatattacttcgcggaaatgctctccgtgctggaaatgcccaatccgaaggagtggaatatttcgctcgtacccgccgcgtggccggacgatcctagacacctcgaagacggcaagctgctgatccctcaaaacgtctggtacgtgggcaccgcaaacaacgacgactccaccttctccgtttcggataaagtgtacgaccgtgcgtttaccatcaatctcgattccaaaggcgtgccgtttgacgcgccgcctacgccgccgagcaggatcagctattcctacgtcgacgagctttatcagatcgccgtcagaaatcatcccgtatctcaggatattctcgacaagatcactcaactggacgattacgtcatcgcgcattttcgcgtcgcgttcggcaaccgtatcatgaaacagctgaatatttttgtccccgtctacgtcgcttgcggcggtacggagagcgaaggcgtggattatatgctcgccaccaaggttatccgaaaattcgaggggcttaatctgtcgcttatccgcgacgagatcaatccgttgatcgaatatctcgacaggctgttcggcaaggacgccatgcgcgagtgcatcgcttatctgaaacggatcagaaagatgtattgacgccgtttctttaaaaaaaggcgggcagggacgagcggaaggcgttgtttcttcccgcccgattcgtttgccgccgtcggggagtatccgaatctgcaatcggataaaaaatccggagcgtggtgaagacgcctgctgccgggaaagagaaaatgaaaaaggagggctttatgccgacttccgacgaatgtaaaaatacttccgacgaactttacggatatatcgcaaagcttttggccgatcagcccttttttaaaaatctcgtcggagggctgaaagcgggcaatatcgaagtttcgatgttccgtaagctcgtcaataaaaaaatcgaggaggaatggatagacgccatcgaagcgtgtatccttcctctcgacaacgtcatccgccgtccgtcgcgctatatcgaggaacttgacgaagtaaagcccatcgagctttcccgcaacatcacaagccgttccattcagcatctcgcgcagcacaccgattatatcagcgaagtcaagggcgacgagatcacgccgtccaaaatcctcaacgtctttcatgaggaaacgatgctcacttatgagaatcggtttgtcaatacgctcattcgtcagctgtatctctttgtcaacaagcgttataacgagatggtgaaaaacggcgctgaaaacagcacctctttcgatatttccgcgcagtttaaggacgggacgctcgtcagcagcgtgcgcttcggtctgaccgtgtccgaatccgccgagggagccgcggaagcggatccccttttaaagcgcgtgatgcggctgaattccgtcgtcaccatgtattacaattcgccgttcgcaaagtcgatgaacggcgcttatgtgcgcccgcccatcatgcgcaccaatgccttgatgaaaaaccgcgatttgcggcagtgcctcgaactttggcagtttatcgaagggtatgaaaaggtgggatacagcatctccgtcgaacagatggcggagaagcccgatcgcgctttgatcgagcgcctgtacgcggatctggctctgcaatataccgtttttcggcgcgaaatcgccaaggcggcggatacccttgcggaagagccaggcgtgccttttcagccgctttttgtggcggcgatccagcccgtcgaacagaaaaaatttaatttgaacgactgcgtttaccgcaaggtgacgcccgtatcctacgtcaatccgccccgcaagctctcccgcgacgagctgaaaatccgcgccgccgtggacgaggcgttgggactggacgctttgatgaaaaagcacgacctcatcgaggaggcgaagcggcgcgccatggaagaagggcggcgcctggccgccgaaaaagcgcgcgaagaggcgcggctcaaagcggaagaggacgctcgggcggttgcggaatattacgcttccctcggctatcgcgtgcgcatgaaatcccgctttgccgattcgggggagatcgagttcgagcctacgaacgccgcgcagtccctttcggaggcggtggaaaccttggagggcgctttgacgggtggcgcggaagcggtcgccgacgcgaaggcggacggcggactcttattgagcgacgaggaaattgccgcccgcacttcggacggggatatgcccgctttggaggaattgttcggaagccggtatctcaaagccgaccgcgcgaatctcgcgggagaaaaagtagctctgcgccgtaaagcggcaaaagggcgcggtttcgtgatcgctcgtatgatacccgcgggaaatacggtcggggagttgcccgcgagagaaagcgcaaaagcggaagaaatcgccgctgcggactctttcgggaacgcttcgggcggacgggaaccggaaaacgcgcttttcgacgtggggcaggaaatgctctccgccgcggaaacggacggcgcagcgatgcaaaaaacgcctgcccttgaagaaatgcaggagaattgcggagatgcgccgcaaaccggtgtgaattttcaagaggaagcttccccggcggagataaaacaggacgaagatttcgcggaaacgtcggaaaaagtggaagcgatacgggaagaaagggacgattttggaaatgggcaggaaagcgctttccccgtttcgaaagactccaaggagatacgggaggaagaaacagaggctttaaaaagagagagggaaactctggtcggcgttgtgcaagaaaacggggcgagagaggaagaatcgcgcccttgcgaagatccgcgggaattttttgacgcttcctcggacggcagcgaggcggaacagcgggaggaaggacccgttttggtaggagcggaggggaccgccgtttcggaagaaaacggacaagaaaaagagccgtgctctccgatggatgcgtcggaaaacgctgaaaaaagcgaaaggcagtcggaaggagcggagatttttgccgccgatagcgacgggaaaaaatcgcaagccgcgatagtggaggcaacggagccttttgcggaagaagcggaatccgaaagtcctttgaaccaaacggcagaggtcggatattctgttgaaaacgccgccctcctttctggcgtaaacgacggggaaaatagtgccggagatacgattgccgaagaggtgcccgatgttttcgcggaagaagcggaagagccgtggtcggagttctttgaagaagcggcgcctgcgggcgaaaggcaaacaggagaagaagcggcgccttttacggtacgggaaggcgaagcggagcgcgccgccgcgtccgaaagcagtttccaagcagggcaagaaacagagggactcgaagggacggacgaagccgcgcaagaggacggcgagaaggaggagtcgcagatccgcgaagaattcgaagagcgggaagcgtttgtcgactcaaaggaaacgtcgatgtccgagcgaacagaggacgccgaggcgcggagggaagaactcgcgcttgccgtgacggcgggcatgaacgaggaagagaaaaagattttcgaagacgaaacgctgggattgacgttagaggaaaaacttgcctatcgcaaaatgagccgcgggaaacgcagagtccttaaaaagatagccgaaacgcggcggcggaaggcggaactgcggctggaaaacgaaagaagggcggtcgcggcgatggaaaaactggaaaagctgcgcgaatccgcccgcagtcatgaaaactacaaaaacgaaaacggcgcccgtccgaacgggagtcccgcctccgaaaatcgaagcggacggaagaaaaagtgaataagataaagaaaatcttttcgaaaatcgcgtcgtgggcgtgtacgctgctattgatcttttccatgatcgccgcgctcggcgcgctatttttgcgcaaccccgccaaaataaattttatcggcaagtacgccgtcgtgaggattctcacgcagagcatggagcctactatacggacgggcgattatatcctcgtggaaaaggtggacgcgaaggcgctgcaaacgggcgagatcattattttttattcgagagatccttccatttttggacaattgaacacgcaccgcatcctttcgttctcggaaaacggcaatatcgtcaccaaaggggacaacaatccccgtcaggacgattacgaggtcgcccgggaggacgtggcgggcaggtatgtgacgaatcttgattttttgacgggcgtatttaagattttctctaaacccgtcggatacgtggctctcatcggactgccgctcatgttcatcacccttttgagtcttaaagaggtggtggccgcttgtaaaaaagatgacgacggagcggaaggagcgaaggaggaggcggaaaaagcgcgcgtggcggccgtgctcgaaaagatgaaggagagcggagaactcgacaggcgtttggaagggatgcagacaagagcgaaagaggacgaaaaagggaagaaggagaaagagggttccccgatagaggaaagagagaaaaaatgccctttaaaagacggggcgcagggggaaggggagagtccggatttggaaaactctttgaaaaaggaatcggaagaagagcgggaaaagcctctgtaaagacggaaatataaaattatcctaaggaaagaacggctgtcgggaagcaaaacagctttttaagaagagtgagcagggctgaaaaagagcgccgacaaataagtgaaagcgggattgccgaaaggaaagaagaaggacccggaaggtttttcgagtcggggcgggcggcgaaagtcgggacgaaaaaaagacggagtgaaaggatgaagaacaaaattttgcgttcgatgaaacaaagagttctcacggttctgtttatttccaccgtgattcttttcgtcgtgattttcggcatgactacggtgcagtgcgtcaaggctttttcttacgattcgctgcgtatcgcggaaacgaaaacgcgggaaagcgtcgaaatattcaacgaaaacgcggaggaatacgtcctcaaaactcaatttatcgcggcgcagttgcagggcaaagcctatgaaacggaagaggactatgccgatctcatgaaacttctcgcttccgatgcggagtcgaacggatttctgtccctctccgttttcgataagaggggagaacaccacacgatggcgactccctattacggcgacagttccgaggtcaattccctgcttgcgcagacgacggggacttccgtcacttccgtatacagaagcgaagcggcgggaaagttctgcgtggcgatttatgcgcccgtgaaaaagacggaaacgggcacggtcaattgcgtctgcgctgttttgggcgcggacacggtgtactcctccgaggacgccgacgcattttttgccgaatacggcgcggatgcgttcgtcgtcggttcgggcgattatttttatcgctatgcggggaacgccgatacgggaagggcggacaccttttccgaatatttaggcgtttttgcctcggaaaacgtcgccgcgcagacgaaggagcttttggaaaaacgcaatttcggaagcgtgggcttttcctcgggcggtacgagctacgtcttggctttcagccgtttggggaacggctccgcgtcctatctttccgtcgtttacgaacgcggcgtcctgttgaacaaggacggaagcctgttcacgaagttcctcgtttccatcgtcattctttccgttctgctcgtattggctctcgtgttcgatctcgtcgaaaaacagcgtgtgcgcaaggaacgtatgcaggcggaagacgtcgatccgctgctcaaatgcagcacttattccaagttcaagcgggatgcggagcgtttgattttagacaatcgggcgtcgcattacgcgctcatttgcctcgatattcataatttcaaatacgtgcaggaacatttcggcgaggacatcgcggaagacgcgaaaagatttgcgtccggcgtattttcttccgtcctgcaaaaatacgaaacgtacggacatttgacgggcgacagattcgtgctcctgcttcgttatgaggtcaagtcggaaatttcttcccggctcactctgataagcgaactcgtcaaccactatacggcgttcaagaaaaataatttcttctgcctgttcagcatcggcgtatattacgtcctgcctgcggaagagatagacgtcgatgcctttatcaaccgttctcatctcgcgcagctcgcccataaaaagacgcctaccgcggcatatattccctatgacgaaagtctgtacgagaactatcggatcgaggcggatattgaatccaagatggaaggcgctttgaaaaattgcgatttccacctcttctatcaacccaaatacaatattgccagggagtgtctggacggcgcggaaacgctggtgcgctggttcgataccgaacgcaacggctacgtcccgcctcagaaattcgttccgctgttcgaactgaacggatttatcaataagctggaccgctacgtgtttatccatgcgtgtgaattttttgccaacgcggtgcgcaacggtctgcgcgtgacgcccatttccgtcaacgtttcccgcgtgacggcgattcaaaaggatttcgtttccttctattcttccaataaagcgaagtacgggattcccgacgggtatctcaccatagaatttacggaaagcttttcttttacgaatatggaggtcctcagcaaaatcgttttggaactcaaaaaaaacggcttccgctgttccatagacgatttcggctcgggatattcctcgtgcggcgttttaaaagagctgcccgtggacgaacttaaattggatatgttcctgttaaagccgagcgacaacgttcaaaaagacgaagcgctgatcgaaatgatgataaagctcggaaaatctttcgatatgaaagtgacgcaggaaggcgtggaaacgatggagcagtttgaaatgctcaaaggtttgggctgcgacgtgattcaaggctatctctattcaaaaccccttttgacggacgattttcaatccttcgtaaacggggctacggatttgcagtttattatgaagcacaacgtggaagcgccctataaaaagcctaaatatatcgattttaccgtcgataaataaagcgctgaaagagggacaaaaacgaaaaaaacgcggaagacggtctgttttttcggtaagcggaagaggcttatggaaagaaagaccgtctttatgttcttttgaatagggaaaagagtactctctaaggcgggaggaagcgccgcgaatagggacgcggaaagaagagaaaggaaaaaggatacagaggaaagaaaatacgtggaaaaaggggggggaaatacataggaggagaagaaaggggcgaaggaaaaaaggcggaagagcgcttataaaaaataaggcgaaaacgaaaagaggaaacggggagaaacgaaaggagagatggaaaaatgagggagataaaggaagaacggcgcgcataagcgggtaaggaaagaaagagagaaaagattgggaaaagacaaacggaaataagggaaagacggggaaaattcaaaagaaaaaagtgacaaaaaaaatgcttttcgcgacaatttttttgcggtttccactttacaaaacggacggacaatgctataataaatcacataataaagccattgcgttcaaggggacgcggataaaaaacggaagggagaaaaactatgaaaaggaagtatacggcggcggatttttccgcggaggaaaagatcagactgctggcgggcaaagacagctggcacaccgaagatttcggcggcaggctgtatgaggtgacggtgtcggacggtcccttgggcttgcgcacgcccgtaaggaacgagaagggggaatggacggacaaacccgccgtcgcctatccttcgacgcagattctctcacagacctggcggacggagtatgcctatgaaacgggcaaaatgctggcggacgactgtatggagaacggcgtggacgtgctgctggcgcccggcgtcaacatcaagcgcaatcccctctgcggcagaaatttcgagtacgtttccgaagatccgtatctggcgggcgtctttggccgagaatatatccgcggtctgcaagacaaacacgtgggggcgacgctcaaacatttttgctgcaacaatctcgaattctcgcgtttttggctatccagcgaggtggacgagcgccctttgcgggaaatctatttaagacccttcgagatctcctgtgaagcgaagccctgggccgtgatgtgttcgtacaatctcgtcaacggcgtgagaatgtcggaacataaaaagctctacaccctccttcgcggcgaatttggcttcgacggcatgatcatgtccgattggggcgccgtaaaggatcatgcggcgtccgttaaagcggggctggatttggaaatgccctattcggaaacgggctatcaaacattgaaagccgcctatgaagcgggcgaagtgacggacgaagaactcgacgtctgcgcgcagcgcgtgctcgattttatttcgcgctgcgaagaggaatcgaaaaagcgcaagatcacctcgacccgcgaagaacggctggacgcggcgcaaaaggtggcggaggaaggaatcgttctgcttaaaaacgaaggcgcgctccccttgaaagacggctcccgcgtttccctgacgggcgatcccgtggcgcagtatctcgcgggcggcggctcctcccgcgtacaattgaaagaaacgcctccttccttagcggagtgcctgaaagccgtgatgcccgcaggcgaattttcctataaaggggtatgggacaacgaggggcagttttatcaggccatcaataacgcttacggaaaggacgccgcgatcgtctgcgtgggcaccgaagacggggagggctgggatcgttcgcagatgcgcctgcccgccgttcaggaagaatggatactcgaaacggcaaagcaaaacgcgaataccatcgtcatcgtgtttgcgggcgctcccgtggacatgagtttgtggatagacgaggtcgccgccgtcgtgtgggcggggtatccgggagagcgcggggggcgtgctctcgccaatatcctgacgggaaaagtcaatccttccggccggctgaccgagagttttccgttcagtcaggaagattgtcccgtcgtcggcggctatcgcgacgcgatgaaaactctatacagcgagggactgctcgtgggctatcgctggtacgacgcagaacgggagaaagaaaattacgggcagacgcttttccctttcggatacggactcagctattccaaattcgagtattcggctcttgccatagaaaaggcgggcgaaggcgtcgaggtatccttcgatatcgccaacgtttctcagcgggcgggggcggaaaccgcgcagatttacgtgcgcgaagtgcattccaaggtattccgtcccttcaaggaattgaagggatttgaaaaaatatatttggaagcgggtgaaaagaaacgactgcgcattaccctggataaaaacgcattcgcgttctattcctccgcgctggataaatggacggtaaatcggggcgtctttgaaatttttgtcgcggcgaatgcggaggatattcggttgaaggggagcgtcgaaatcgaataaaccggcaggaaaatttttaaataggatgaaaatacgcgcggaaggcatcccgcacgtatttttacaaaatatacccccgacctttataaaaaaattatcatagagaacattttagaaaaaacgacaaaaagcgacaagaaggggcagtatatttttaaaaaagacaaaaaaatcag

SEQ ID NO: 473 - DNA, 7424 bp, Unknown
  16S sequences of unknown bacteria
attattagataatcgcccaaaccaggaagcccaggcagacgatgataccaacaacgatcagcaaaggcaccagataacccatgatatcgcgggctttcagacctgcaatagccagggcaggcagtgcccagaagggctgaatcaggttcgtccagcagtcaccccaggcaatacccatgccgcaacgggctgcggaaacgcccatctctgctgcagcgggcatcatgacgggaccctgaacggcccactggccgccgccggaaggaacaaagaagttcacgataccggcgctcaggaaggtcagcatcgggaatgtcacatcgttggaaatggcaacgaacgcattggcaatgatcgaagccagggatacgccgttctcattggcacccaccatcatacccataataccggcatagaaggggaactgcaggataataccagcagcactggaagccgcatcgccgatcgcatcgatgtagcggcgcaggctgccatgagccaaaatacccaggaacatgaaaataaagttgacaatgttcagcgtcaagccggacagaacatcgccgccgttcatcacgatcttggcaaagtaataaacaacataaaccaagcctgcaatccaagtgattgcccacaggaccttggactgttcgatcgcgtcagcaggaactttcttttcataagtacggacttcttcttctttcaacaaggaaggatccacacagatggagtgctctttatcgggcagaacggaaaccatgaccagcgcacaggccgcgatcaccaggactaccagcaccaagttcaccgggaagaagatcgtttccgcggtggaaaccgtcatggtagcgtccgtggtatagcccactgttaccagcgcgccaggcgttgtcaactgcagaggaatggaaccggacagaccagcatgccacatgcagatgacggagtaagccgcggcaatcagaacacggtagtcgatcgtggggatctttctggccacttctttcgccagcagaacaccggcaatcaggccaaagccccagttcagccacatgcagataccggaaatgattactgtgaccaaaataccctgcttaggcgtatgagccagaccggcgcacgatttcagcagccggttcaccacaggcgcctgcgccagagcagaacccagcacaacaaccaggcacatttgcatcgagaagcccagcagcccccagaaaccgctgtcgctgccccaataagacaaaacttgcagcgggccaacacccgtgccgatcatcgccgcaataaagacgacaatcgtcaaaacaatcgcaaacaggaatgcatccggcaaccatctttcgatgatacgcacagacagattggtgattgctttcataaaattttacccccctaatttctttgaccttatacacaacgctataacatgtatcttatttaccagcttttttcgcgattgtcaaatcgcattttttcctcttttctttattattttatcaattttatccctaaaaaattaattattgaacaaattgtaaactttttaaccggctattgcatctttattctctttttataaaaaatatatatattttttataagtatgcaatatacggatatttgtacgcaatagtaaaactccgccccggcgcaatgcgccagggcggagttgaaccccttcggaatgagggcctgttttattcagatcaaaataccctgcttctttgcagcgaaggtcagttcatccctgaaattcggatgcgcaatggaaatcaaagcctttgcccgctccgacagcggcttaccccgcagttttgcaattccaaattccgtaacgatgtaatctacgtcgtttttgctggttgtcacaattgcaccaggcgtcagggtcggcatgattttgctgaccgtaccgcccttggccgtagacgggaaagcgataaagctcataccgccgggcgactgcgtcgcgccgcggacataatccacctggccgccgctgcccgaaacatgtttggtaccgatggattctgcacagacctgcccataaaaatccacttccagcgcggcattgatggaaacaaaattcggatgctgcgcaatcacggccggatcattgacataatccaccggcagcagttcaaacgccggattatcgtcgatcagatcataaatccgctgagagccaaaagcaaaggtggccaccgtttttccagtgtgaatgggctttttactgttgttcaccgcaccacactcgatcagctccaccatgctgtccgtaaacatctccgtatggatgcccagatcgtgcttgtgcttcagtgccagtcccacagcatccggtacagcgccaatccccagctgcagcgtcgcaccgtcgggaatgcgctcggcaatcaagccgccgattgtcttgctggtttcatcgatctctgctttaggcaggcagaccaagggcacatgattttcataaaggccatcgatctgcgaaatatgtaccatcggcgaattcaaggctctgggcaaattcttattgacttccacaataatatgctttgccttgtgtaacagcgcctgcgatgcagatcccactgtgctcatactgaagtagccgtgcttatccataggagacaccgccgctacaaaataatccacatccacatattgggtgaacagacttggaatgtcacggtaataacacggcatcacgtcggccaggccattgctgacagccttgcgggcgccgccgctggaaaaccaggaaacaccggtgtatttccccagcagctccgcatcctgatacatttcatagggataaacgtccagcagaatatgctgtttgacattggtcaagcccttctcttttacatgctttgccaccgcattcagcaacgctcccggctgcgccaaggtaatgtcgcagcagagtacgtcattggattcaatccggccggccagttcgtccgccgttgccagcagctgcttatacatttttttatactttcttactgcctccaaatgattcacaatcctctcctgtaaactacgcccaccagcgttttgtatggaatttattgtaccataccgaactccagcccgcaatccccgattccgttcttttcttaggaagcagcggcctgtttttgttgcggcactggcgcagcctcctctaaaattcccagttctcttttgtgttcccggcgtcaggcaagatgaagcccatacagatcgttccatcggggcgcatcataagaggctccacttcttctttggcggcgctctttgacacttaccggtcaaataatcaatccgcattccatctatctgcctatctgcttatcccttacccccatagtatttcgctcatgtgcattttttcaatgtcatgctatagagcactgaccatcattagttagttatcctgcgtgtatgcttgtcatagatcatggagaattttaatggacatacttctctttcgcttttgtattatgttatgccaaaccatttgtgtcacggatctctctgcttaaagtacctgatacttctatattttttatattcctgaaaaattggtcttccacttcatccatggtccccagatagtactgagaacactgagtcgaatgagtccaaaagaaaaagagaagcgcctgagcgcttctctttttttacgtgcatattctggtagagcagcaacaggcttgctggtcttataccatagcccagaccacaaagcccaggcagacgataatgccaaccacaaccgtcaaaaccaccagatagcccataatatcgcgggctttcaggcctgcaatggccagggcaggcagcgcccagaaaggctggatcaggttcgtccagcagtcaccccaggcaatacccatggcacagcgggaagcagaaacgcccatctccgctgcagcgggcatcatggcaggagcctgaacggcccactggccgccgccggaaggaacaaagaagttcacaataccggcgctcaggaaagtcagcatcgggaatgtcatgttagtggagatggccacaaatgcatcagcgatgatctgcgccaaagacacgccctgatcgtttgcgcccaccatcatgcccatgataccggcatagaaggggaactgcaggataacgcccgccgcgctggaggcggaatctccgatggcatcgatataacggcgcaggctgccatgagccaggatacccaggaacatgaagatcatgttgacgatattcagcgtcagagcagacaacacgctgttgccattggcgacggtgttatagaaatagtaaccgatgtacacaaaacccgcaatccaggtgatcgcccacaggatcttggactgttccatggcatcagcgggaactttcacttcataagtgcggacttcctcatccttcagcagagcaggatccacagtgatcgtatgctcagcatccggatgggatgcgaccatgacaacagcgcaggctgcaatgaccagaaccaccagcaccaggttcaccgggaagaagatcgtctccgcagtagaaaccgtcatgttcatgtctgtggtgtagcccaccgcagccaaggcgccgggcgtggtgatctgcagcggaatcgaaccagacagacccgcgtgccacatgcagatgacggaataagcagaagcgatcagaacacggtagtcgattgtgggaatctttctggccacttctttcgccagcagaacgccggcaatcaggccaaagccccagttcagccacatgcagataccggaaacgataaccgtaaccaggataccctgcttaggcgtgtgagccagaccggcacactttttcagcagccggttcactacaggcgcctgcgccagagcagaacccagcacaacgaccaggcacatctgcatggtaaatgccaacaggccccagaaaccgctgtcgctgccccaataagacagaacccgcagcgggccaacgcccgtgccgaccatcgccgcaataaagacaacgattgtcagaataattgcaaacaggaatgcatccggcagccatctttcaatgacacgcacagacagattggtgattgctttcataaaattttacccccctaaaaatacaatcctttctctaccagcgccggttttctccggcaaaatgtatgcactctgtaaacttacagcagtaaatatagcatctttttcttgacgttccaaggacttacaccctttttatatataatttttatagcatctttatgctttctatatacaaaaatccaccctgcaatcagcggtgaaaaacaccggtatcggtcaggcgaagacagcgcggccccaggcgcgtcacagtgccagcaaaggccgtaacaaccaccagataacccataattcccagcaccgggccgctcctccttctatgcacttttccaaaccatccctctccggtatacttttttaatacccacaactcatggttttacagcgttcttcctcccttttcccgccgcagctttcccttttctgcggcggctttatttcccgacgcgatctgcacgcaagcctttgtacaatgggcagaaaaaggaggacaagccatgaactttgtacaaacgctgaccgcggtggaaaaaagccgcgctttaagttgtgccatccggtttcttttggccgccatactctcaggcagtcagattttcggcgcatacgctccctttggcctgggctttgtggccgccgccggcgccggcatggagggcctttcggcactgctgggccttctggtgggcgcgcttttgatgatgcccttcaccgccgccataaaatatattgccgccgccatcctgatcttttcggtgtccgtcgccttttttgatacgaagctctaccggaaacatgcctttctccccttgattaccgccgcctgcaccgcagtagtaggttttgtgtatctgatgccgcagggcgtcttcaatacagacggagcctatttcctgctggagattttcctggccggcggctgcgccgtttgctaccgcatggcgctggcaattcagatcgacgcaccggagaccctggaacgacagcagctttttgctctttttgttctggcaatctctctactgattgccgtggccgccatccccctggcaggccggttttccctgggccgtattttttccatcgtgctggtactggctgccgggcggctgggcggcatgggtctgggctgcgccgccggactgtgcgctggcctgagcatggatgccgtgtccggcacgctgtatttctccatggcttacgctctttcggccatgacggcgggcctgcgccggtgcggccgggcgcgctacacgctgctgttccttttcggcaccgtgctctctctgttctggtgcagcgccgagacagcggtctataccctgttggaaaccgccattgccggcgtactgttcctcctgctgccggaaaaattgtttcagaaaggccgccggcacagagccgccgcactcggcgcaccgaacgctctggagaaacaactgcggggcgctgcctcagtcttccgcgacctttacgacagtttgagccgggccggaaccgcaccagtcaacgacgaaaatgtggccacagtatttgatcgggcagccgaccagatctgccgggcctgccccctgtgcgctacctgctgggacgcagattatgtgaccacttacaacgccctgaacgatgtgacagaacccctcaacagccgcggccacgtgctgccctccgattttccagcccatttctcctcccgctgcctgcgcttttccgattttaccgccgcagtgaacgccgaattcacagcgcttctgatgcggcggcagtacacgcgtcagctcagcagtacccgtgcgcaggcccgggaacagtacgcccggctgtccgaacttttgtccgaatctgctgaccaggtggaacgcagcgccgcagtccccgcctctgccgaagcccccgtgtgcgatatctgcaccgccggacgagccaaagcgggtgaaagcgtcagcggcgacacattatctacattccgcagcgaagacgggaaagtatttctgctcctatccgacggcatgggctgcggagaggatgcccgccgggaatcggctatgacagtgcggctgctggagcagttcctgaaagcgggtattgaaccgtccaccgccctgaaaacgctcaacagcgctctcacccttcatacagacgaaagcggcagcttcaccaccatcgacctgctggccatgacgccggaaagcggttccgtctccttttataaatttggcgccgccccctcctatatccgccatggcaaaagcgtccgccgtgtcaccggcagcgttctgcccgccgggctgagcagcagcgaccggatcccggacgccacctcagtgcatc

SEQ ID NO: 474 - DNA, 2808 bp, Unknown
  16S sequences of unknown bacteria
tttttcctcctttaccaaacaggcggcggcgggcatccgcgcggcgatcgggagcgcggacgcggtcacgggtatttttatcggcggaaacgaacagatctacaccaacgaagcggcgctcgcctttgaaaaatattgcgccgaatgcggcgcgaaagtggaaaagatcgtgcttgcgggcgaaagttgccctgcggcggaaaaactgcgcgagtcttttttcgatcccgaatgttataaaaaaccgcgccttgcctgtgacgccgtgaccgtgtacgaggctgcgaacgaggaggacgaactctccttcgtcgcctcgatgatcaagaaggaagtatacggccgctccctccgttaccgcgatatttccttgctgcttcccgacgtcgccgcctacgcggtcaaactggaaaagacgttttccgagtacaagatcccgtactttgccgacgtgaaaaagagcgttctgttccatccgctctgccgtttcgcgctcgattattgcaaactcatctacgacggtttttccgcagacgacgcggaaagtttcgtgggcaacgtgtttttcgaaaagaacgcgtccctgcgcgacaaatataaaaattatcttctgcaattcgcaaattacaggggcggtctgcgccgtcccttaaaggaaggcgccttatcgaaagaggatttcgccgcgctttccccgctgtacgagcgcgcttcgcgcatgctttcctttacggcggcgcgcgcggagggacaggcgtactgcgctgcgattcgttctcttctcgcccttgcggacgcggaaaaggtgcaggaagaaatatcgaaacaactcgcagaggcggggtatgcggaggattcggcatatttttccaagggggcggagagccttaaccgcgttctcgacgaggcggagatgcttacgcgcggcgtgcggctttccgccgaagagttttcttccctcttgtccgaaagcctgaaaagtttggaaatttccctcattccgcagtttacagacgcggtattcgtcggctcgctctccgaaagcaagaagagcgcggggaaagtgctgtttgccgccgcgctcacctcggacgtgcccgcgtcgggcgcggataccgccctcatttccgatcgggatatcgaccgcctgcgcacgctgaaagtggagatccagcccaagatacgcgaagtgaacgcacgcgcgcgggagagcgccgcgctcgctctgtgttcgtttaccgagcggctgtatcttacgtatcctttatcgcagggcggaaaggaatgcaaaaagagcgaaattttcgatacggttttcgcggcgctcgcaagaaagggcggcgcgcccgtcgctacgtttacgcgcggcagattcgagcgttgggaacgggaaaacggcgccgcctacgcgcgctatctctcgtttgccgccatcgagcgggtacccgcgctcaaagaacttttgctgcgcgccgatcaatacaggcggggcgcggcggagttctccgcgcacaacggactgtatttcgcgctgaaaaacaaaggcgaggacgtcgattctcttttgaacgcgcagacgaaaggggattttatccccaacgccgcggaagttatgttccgcgggcggcacgagatctcgcccacgctcatcgagggctatttttcctgtccttacaagaatttttccgagcgcggactgcgcctcatgccgcgcattgagggcgcggtgcggccactggatacgggcgatttcatgcacgccgtcttgcagcggacggcggagtctttccgcacgttcgacagcgaacaggcgtgcgttgcgttcgcccgcgggcaggcggaaaaattgctttccgaagcgccgttttgctatctgaaagacaccaacgcgggcaaattcaccgcgggtgcgctggaaaacgaggcgggcgtcgtggctgccgaattatatcggcagatcgcctgttccgcgtttaccgtctggggcgcggaaaagaagttcggcggccgcgatgcggattttgcgggcatcacgctcttgtccggcgaacgcgatctgcgcctttcgggaaagatcgaccgtatcgaccgtggcggcgactatgtgcgcgtcgtcgattataagacgggttcgctcatcgaggcggacgcggacagttattatacgggacgcagattgcagttgcaactgtacatgagcgcggtgagcgcctacgccaagcctgcaggcgcgtactatttccccgcgcgcatctccttcgcgcggcagggggaggactatcccttccgcatgcagggattttcgctcgccgacgaagaggctgtgaaaatgagcgacgtcgccctggaaaagggcggcaagagccgtttcgtcaacgccgcgctcggaagaaacagcgacaagcagatgaacggcgacgattttgaggcgtttatcgactattcccgcctagcggcgctcggctgcgcgcgggagatcgaaaagggctgcatcgcgccctcgccctacggcggggtgtgcgaatactgcccctacggcggtgtatgcggcgcggacgcgaaaaaggcgcgcaaagagagcgccgtcaagtgcgccgagatcgcgaagatcgtaaagaagaggaggggcgagttatgagcgcaaaaatactgacggccgaacagcgcgccgccgtggaggcagagggcgaaacgctcgtttcggcgtccgcgggcagcggaaaaactttcgtgatgatcgagaagatcatctctctcattctggaaggaaaggcgcagatctcgggcgtgctcgccgtcacttttacc

SEQ ID NO: 475 - DNA, 1694 bp, Unknown
  16S sequences of unknown bacteria
ccttaaagaatttttgcaaaccccgatttttggcttaaacactggaaaaatgacttttcgtaaaatgtcattttttgaggtaaaaacaccaaacctgtaaaggcttttttcttcaaggtaaatatttttcacatccccgcagcatgggcggcttcttcacgatctctatttgcctgcatttcacgcaggttgtcccccgaaacttccccgataaagcggtagaaaattcggatgctttgccggtatggggtgcgcggcccggcaatttttttgccctccggcaatatcttttcaccgatctctatgcggtcgatgaaagtgtgcaggatatttctatccagcgtttctacacaggtataccgcttgacaaggtcgaagaaatgtccataggtatcgcgtatctccttcgctgtggtttcgccttccaccagcttcttgcggcgtgcggccagctcgtcaatctcaatgccaaatttcctgaccatttcctcatggatatcgtcactgagcatccctgcgatgttgtcgcgataggaacgctcgatcatcttcttgagtcgggcggtctgcttgtcgatatgttcgatctgtgtggccggattttcaccgcctagggaagcattggcctgctggacggcgttctctgtgatggtgcgaattttgccctcatcaaaggccagcatcttattgaggtcacagcgaataatttccatcaggtcatcgtagcggatacgcgccccatgcgcacaccggtgctgcgcccgggaggtcagattgttgcacaccagataccagtatttttcccgctctccgttgtagacagagccgccggagcacatagctgcgccgcagcaggcgcagtaggcgatgccgccgaagatgctgtggcggaaggcagggttcgccccgttcgccttggtgttctctcccataaagtgggcggccagatcgaatttctcctgcgtcaccaggggttcatgggtgttttttgtgaatacccactcttcctccggcaccttgatcttcttcttggacttcacgctgaccttgcggctcttgcccagcagcgtgtgccccaaataaacccgattgcgaaggatgcgctttacggtggtgtagttccacaggtcagacatccgctgtgcgccgcgctcggtgaagttatcgcggcactccacgcgatacttcagcggcggcatgacacaagcctcattgagccgcagggcaatgctgcggcaggactggccggatgcagccatgtcaaagatcatcttcaccaccggtgcggtattctcatccggtacaagctggtcggtggtgcgctccgccttcctgtagccgtagggcgggcaggccacatacttgccgttgttgcgcttggtgttcagcgtctgcttgaccttgcgggaggtgtcccgcaggtagacatcgttcatggcaaactggaacggtgccatcaggttatcatcctcggaatcgaagttactgccgggtgccagatagcggatgccgtgttcaggaaaatagcgttctgcgtagtggctggattccgtcatgtcacgtcccaagcgggacaggtctttggtaatgaccgtgttgaccttaccggttttcagatgttccagcatggcacgaaaaccggggcgttcaaagttgccgccggagtagccgtcgtcggcaaattcctccactaa

SEQ ID NO: 476 - DNA, 11499 bp, Unknown
  16S sequences of unknown bacteria
aaagcgggaatcggggcagagaaaggaaatgctgccggaagtgtgtcccggcgtttcgatgacacggaaggcttcccctcccagcgtcaatatatctccttctttcaggaagatgtctgtcgtgcctctgtagcgttttgcgtcccggcggttcatgcagacccgggtgttcagtttttttctcagttcctcgcaggcgccggtgtggtcgtcgtggccgtgtgtggccagaattccctttacctgaaagcgtcttcgggtgacgatatctgcgatctttgcggcttcatagccgggatcgataatataagcttcgccgccgtcctgatcgtaaatgatataacagttgttttctaattctccgtatattttgcgaatgacttccatttttgctgctgttctcctgtatccaactttctgatgatctgattccgtgtctgcttcgttcggcgaagaactccgcctgtgcaggaggtccgcggcggattttgccgccggggctccttttggtatctcactgtctgtctgccgccggcgcgccggagaggaaaaacgccttttccgggagaagagttattttgtctccggtttggccgggtcggtgtagacggtattattatttgtgaagatgacgaagccgggctttgcgccgttgggttttttcacatattttactttaacgtagtccaccggaacattgccggacagctttgccttgctgtggtatgccgcgatggacgcggcttcgaaaatctctttttcttcgggctcctcaccttcggtgaagagaatcacatgggagccgggaatgtccttcgtgtgcatccagatatctctggaagacgcggttttgaaggtgaggatgtcgttttctctgttattgcgccctaccaggattctctttccggtagatgtgaaatattcgatcggctgaattttgtgtttcttttgtttctctttgagatttctgcggcgcaggacaccgttttctaccaattcttcccggatatcatcgagatcggtgactttttctgcgttatcgataaatgtgagcacagagtcaaggtaatcgatctctttttctgtttccttcagctggatctttttttccacgacagcggttttcgccttggagtattttttaaaatatctctgagcatttttcgctgcggaataccgggcgtccaacgggatggtcatcatctctccggtgtaatagttgaggacttccgcagaattgcggccgtcctgtacggtatgcagacttgcggtgagaagttctccgtaaagccggtaatcttcggaattttcggcctttaaaagatcttctgagaggcgctgttttttcagcaggagtttgtccaggccggcggatacggattttctcatatcctgcgctttttggcggatacggctgcttgcggcccttccttcgaaatatcgttcgcaggcttggctgactgtggggtagggcaccgattcataatgttctttcagcgctctcatctctaccgcatgaaattcagcgggcattccctcttcatcaaggtagattttcggccggagcctgcggccggccgcttcagatacgatgcgggtcagctcgcggtaggaggcggacagcgggtcttcccgggagccggcggcgcagaagagaatctccgcggccatgacggggctgatgccggaaatcgctctgaccagcgctttttccggattatctgcgaagccggcggcggtgaccgcctctctgtatttttccggcgtcagaccgaagtaggatatttttccctgggagggcggagcgacatagagaagaccggggagcgtctgacggtaacggttgacgtcgcctgaaattcttttgatgcagtccgcgatttttccgctctcgatatccaccagcagaatattgctgtgccgccccatgatctcgatgatgagacggtgcttgacgctgaagcccagctcgttggtggcatccgtacagatctcgatgatccgctccgagtccacctggcgtatttcgcggatccgcgcgctctgcagatgtttccgcagcagcatgcagaatcccggaggattctggggattggcgctcttttcttccgtgaggtagacaccggcgtgattcgtgtttgcggagagatagagccggtatttttcccttccgcagtgtatgtttatgaatagctcatccggcgaaggctgatagatcttgtctatttttccgccgatcagtttttctttcagttcctctgtgacggctgtcgtcacgattccatcaaatgccatagcggctgaacctccgatgtgtgattttaatatgattcaagtgttgaaaacgcctgttctgcgttatataatatacgggaatatctttaaagattatattttggacaggggacggcgtccggtctgacggacggttcccgtatgatttctgtatattttgcgcggttttcgctgtgagaacgagacagaacggagcaaagcaaaaccgcaagtgaatgatatcatatttcaggcgaaaagtaattggaattttgcaattatcggggcggtactccgcgatttgcagaggaaagggggcatcgttgcgctgaggcggcatccgatgcttttctaaatttatccgagcgccgcagagatctgcggtctctcctccgccgccggatgattccggttttgccgccgaggaagatgaatttttattcgcgcgcaggttttgtctttcttttggaatcggaagcgaaagaagaagcggaggaaggctgtcgatgcgcgtttttgtgccgggaggaaaacagatggtgagaagtatgaccggattcggacgaagtgagttttcggacgaaaagcggaatgtcacagcggagatcaaatcggtcaatcacagatacaatgatatcagtgtgaggatgccgcgccgttattcttttgcggaagagacgataaagagcgccgtaaaaacctttgcgcgcagagggaagatcgaggtttccgtcatggtggaaaatatcggtgacgaggaggtcaatatacgtctgaatccggcggtggcgaagcagtatctggaaaatatccgggaactgaaagaaattctcggaatcggaggagatgtgacactggaatatatcgcgtctttgccggatgttatgaaatccgttcccgatgtcgaaaatgaagaagagatcgctgcgattctcgtttctgtggtatcggatgcggcgaaaaagcacgcggagatgagggagatcgagggagaaaagcttgcggaagatattcttttgcgggcggaactcatcgaaaactgcgtccgaaagatcgaagcgcgttctccgggcatcgtaaaagattacgcggagaagctgcggacacggatcgcggagatgacagaaggtacttctgtggctaccgaggatcggattcttctggaggccgccgtatttgcggataagatcaatgtgacggaagaaatcgtccgtctgggaagtcatatcggtcagctgagggcgatcatcggaaacagcgcgcagtcagaaggcaagaaactggattttctcattcaggaaatgaacagggaagcaaataccataggctcaaaggcaaatgatctggaaatcacaaacaacgttttggaaatcaagagtgaaatcgaaaaaatcagagaacaggttcagaatatagagtaggagagatcagatgacagcggcgagattatttatcatttcaggtccttccgcagtgggaaaaggtacgattgtgaagcggattttgaagtcagacggcaaggtgcatctgtcggtgtcggcgacgacgcggaatccccgggagggcgaagaagaaggcgtcagctattatttcatgtcggatgaacagtttgtcaaagctgtcggtgaaggcggatttctcgaacacgccagcgttcacggacactattacgggacgccgaaggcaccggtcatgtcgcagctaaaagcgggacgggatgtcattttggaaatcgacgttcagggtgcgatgcaggtgaaggagagttatcccgacggagtatttatttttattctgccgccgtcagtggatgctctccgcagccggatcatgcaccggggcacggagtcggaagaagacattcaggtgcggctgggagccgcgcaaagagagatggaatatctcgaacactatgattattacgtggtcaatgacgacctggagaaagcggtggattccgtgaagaaaattatggcggcggagcattggaaggtaacggatgcggccggtattttgaaaagaattaagggggaagaataatgttatatccatctattaacgatctgagaacgaaagcggacagcaagtacacactggtatctctggcggcaaagagagcccgtgatctgatcgagggaatgcctgctctcacggatattgaaatcgacaaaccggtatctatcgctacggctgaaatcgcggaagacaagatcacctacagcagatccgaggaactggaagcgatgattctggaaggcgatcacgaacacgaagaggaataaaatgagcagaaacgtagtcgtaggcgtgaccggcggaatcgcctgttataaagccgctgacatggtcagccggctgaaaaaggaaaatatcgaagtcgatgtgatcatgacgaaaaacgcctgtgaatttgtcagcccgctgacgttccgtacgctgtcgaaaaatccggtggtcaccgatactttcgccgcacccgaggcgtggaaggtgggacatgtggcgcttgcagaaaaagcggatgtgatgctcatcgctcctgctacggcaaatgtcatcgggaaagtggccgggggaatcgccgacgatatgctgactaccacgattatggcttccagggcgaaagtggtatttgcgccggccatgaatgtcaatatgtatgaaaatcctattgttcagtcgaatatcgagaaactgaagtcatacggttatctcttcattgagccgggttcgggaatgctggcctgcggatacgagggaaaaggacgcatggcggagccgccggagatcgtagagtatgtcctggatctgctaaacgacgcggaatcagcagcttcggatgaggaagtgccgggggctggtatggatgcaaaggaggctccggccgccgtaggcgcacagctggaagcggaagtgccgggagctgatttatccgcagaatgggcgcagagaataccaaatgaccttgcgggaaaaaagatcctggttaccgcaggtcctactgtggaagcgatcgatccggtgcgttacatcagcaataaatcctccggcagaatgggttatgctgtggcggaagctgccaggagcagaggcgcggaggtgactctgatctccggtccagtggcgctggagtgcagtcctgagatccggcgtatcgatgtccggacgacaagagaaatgctcgccgcctgtgaggaagcctttgaggatgcggacgcggtggtaaaggcagcggctccggcggatttttatgtagtcaatgcctgtcagcacaagaggaagaaacaggacggcgagctggaactgaaactcgcggaaaatccggatattctcaagacgctggggcagaagaaaggcagacgtgttttggtggggtttgctgcggaaacccgaaatctggaggaatacgcgaaagagaagatcgcgaagaagaatctggatctgatcgtcgtcaacgatgtctccgcaccgggagcaggattcgatgtggatacgaatattattacgatttttacaccggagggcgagaaaaccgcttatcgcatgatgtcaaagcgcgaggcggcggatatcattctcgatcgcatgctggagatcctgaaaagcagagaaagagaaataacagaatagatacgagaaagacgggaatatcccggagcttgtgagataaaaaagcacaggctccgggatattcccgtttttgctgcgccgcggaagcggccggaatgatggaaaacgcttgcgcagatgaaatttccgctgaaattcttgatcttcagcgaaatgataccgaaagcggcagggaatttgcggatccagccgaacagcaaaaatatgtatggaaaatatttacaatttttaatgcgagcggtataataactgtaaaaatattacaaaaaatgacgacggcaaatctgcggcacaacaggctaactctgccgcagtggtgaaaggagatgacagggaatgaaggataccggggaaatgagaaatctggaagagaaagaacggatcgcggagtcggcgggatcgtctgtaccggcaggttctgaaaaaaaggcggatacagacgcgggggaagaggttttgatcgaggagagcggagatgaggcgtacggaaatcaggatgaggggagagtggaacgaaacgcggcggagactttgcagcgggagacgcggattgaaaccacggtatggagacagattctggggatcgcaggggaaaaccgggcggcggcatatctggagaaaagaggatttcaggtctgctgcagaaattacagatgcaggtttggtgagatcgacatcatagcgcgagagccgcagagagatatcctgtgtttcgtagaggtgaagacgcgttccagcctgcgaaagggcagaccctgggaagcggttactccggcgaaaatacgtcatctgcatcgaacggcgcagcattacctgtcgagataccggccggcatgcagcggcatccggatcgatgcggcggaaattttgtacatagatcacagattttatatccgctatatggaaaatattacaggataagtgatgaagaagggggcattcattgtattcgaagttgatctgcggcacattatcaggactatccgcagaaaaggtatttgtggaatcggacgtcgcttgcggtttcccttccttttatatcgtagggctggccgatgcggcgatcaaagagtcaaaggaacgggtgagagcggctgtcagcaattccggttttccgtttccgcaggaacgggtaaccgtaaatctgtcgccggcggatcggaaaaaggaagggacgcattttgatctgcccgtagctctgagcattttgagcgccgggggaaagctccgttttaaaaaagaatggatgtgcgagaactgggcctgtctgggggaattgacgctggacggccgtctcgtgaggatccgcggactgcttcccatgctcatcgatctgaaagcggaaggaatagaaaaatttattctcccggaagaaaatctggaggaagccctggcggtatccggaataattctgtatccggcgaaaaatctgagagaggcggcggatcatctctgcggcagtagaaccattgccgaaagaagaggggacggagaggcgtatctgcgcagacgcagagcagccggaaaagaggataagacagaaaaggatttttctgaggttctgggacaggagacagcgaaacgggcgatgcagatctcggcttccgccatgcacaatattttgatgatcggctctccgggaacggggaaatccatgctggcccaaagactgcccggaattttaccgccgctttcttacgatgagatgatagaactcacgaagatctacagcatcagcggacttttggatgtacgtcagccgctgatgacctcacgtcctttccgctgtccggatacgaaggtgacgccggcggcgctggcgggcggagggaaaaaaccgatgccgggagaagtttctttggcccatctgggcgtgctctttctggatgagacgcctgaattttccagagagagtctggagacgctgcggggacctatggaggcggagactgttacgatttcgagaacgggcggcagatatatttttccggcgaaattcctcaccgcagccgcgatgaatccctgcccctgtggttacgctttcgatccttcccgggagtgcacctgtacggaatctcagattcgccattaccgggcgcggctgtccggtccgtttctcgaccggatcgatctgtttattcatgtaaattcgccggtcggtcggatcttgcccggcgaaaaatctgagatttcttcagaacagttgaagaaaggagtactgagagcgcgccgcgcgcaaaaggagcgatttcgcacagagaagatacgttacaattctcaaatgtcctcccgtcatctggaaaaatactgccgtctggacagagagagcgagcggctgctggaggaagcgtacgaaaaactgagaatgagcagccgatcctgcagccgcgttctgcgggtcgcccggacgatcgccgacatcgaggactcagaagagatccgcttccgtcatctggcggaagccattacttataaagtgaaagaatggaaataaatgcgctgacaggaggaaagcctatggacgaaaaagaaaagaaaaatcatccgccgggaggcatgcgggaaaagaagcaatcaggacatctaaaaccggcagccggagcggggaaccgggaagaaatgaaagttctccgcatcggagacagggtttatcccgaactgctgcgtcacattccggatccgccggagattttgtatgccatgggagatacccggctgttaagaaaaaaatgcgtggccgtggtaggcgcgagaaaagcgtcgtcttacggaaagtgggtatcttataatatcggcaggcggcttgcggagtacgatatcgtgacggtcagcggcatggccttcggctgcgattccgaagcgcaccggggcgcgctggaagccggcggagcgacgatcgccgtcatggggtgcggtgcggatatctgttatccttcatctaatgcggcgctttggaaaaaaattctgcgcagaggtctgattctttccgaatacccgccggggacaaaaccgcggccctatacatttccgcagcgaaaccggattatcagcggaatttcagaggctgtggctgtagcggaggcgggactgtccagcggatctctgattacagcggcctgtgcggcggaacaggggaagacgcttttcgccgttcccggaaatatctccgcttcaaacagcataggatgcaataaattgattcaggacggcgccgttcccgtggcttttatcgatgatatcatcaccggcgtagggctgagtctgtcgccggagcgaaaagacgaaagcgtacgtttgggaaaagatgaaagagaaatctacgatatcctgaaaaacaatggggaaatcacatcggattttattgcggaaaggctgaataaaagcgtcccggatgtcaatgctatcgtaagcgtaatggagataaaaggatttctctcgacttccgcaggaaaaatttttattgcaaagtaatatgaatgacaatataatctgaatttataggacagattttaaagaagtgaaggtttattatatgaaaggcaaagctttagttatagtagaatcgccttccaaggcaaagacgatcggtaaaatactcggaagcaggtacaaagtcatcgcatcggtgggacatgtgcgggatcttccgaagagcaaactgggcatcgatatcgaacataatttcgagcctcagtatatttcgatccgcggcaagggcgatgtgattaaaatgctgaaaaaagaagcgaaggccgcttctaaagtatatctcgctaccgacccggatcgcgaaggggaagcgatttcgtggcatatttctcatcttctcggcatcgatgaggacgctgtctgccgtgtggaattcaatgagatcacgaaaaatgcggtaaaggaggcggtaaaaaagccgcggaagatcgatcacagactggtggatgctcagcaggcccggcgtgttttagaccgtctggtcgggtatcagatcagcccgcttctgtggagaaaaatccgcagagggctcagcgccggccgcgtgcagtcggcagcgctgaagatactctgcgacagagagcgggaaataaaggcgttcgtaccggaagaatactggacggtaaacgccacttttgaaaagtcacgcaggaaatttctggcaaagcttttggaataccagggaaagaagattcggccttcttcaaaagaggagaccgacgcgattctcgccgcactggaaggcggtgcatatgtggtcacgcgggtggaagaaaaggagcggatgaaaaagccgatgccgccgtttaccaccagcagtatgcagcaggaagcttccacgaagctcaatttcaatacgaaaaagacgatgatgatcgcccagcagctttatgagggagtcgacatcaaaggactgggaaccacgggtctcgtgacctatatccgtacggacagcgtcaggatctccgacgtggcgagggaagctgcaaaaaatatgattctgtctgattacggtcaggaatatctgggaacaaatgtatatacgaataagaagaaagacgttcaggacgctcatgaggcgatccgtcccagcaatcccgaactgaaaccggacgatatcaaggagtccctgacgaaagatcagtacaatctctatcggctgatctggtgcagattcaccgccagccagatgtctaatgcggttttcgacgcggtcagcgccgatatcgtaaacaacgattatctgttccgcgcgacaggttccaagttgaaattcgacggctatctggcggtctacaataatacttccgaagatgaaaagaacagactccttccgcctctggacaagggcgaagagctgaaacttctcgatctgaagggtgagcagcattttacgcagccgccgtccagatatacggaggcttccctcgtaaaggacctcgaggagaagaatatcggccgtccgagtacctatgctcctatcgtagggactttggccgagcgcaaatacgtgacaagagagaaaaaaatgctcatccctacggaactgggacttctggtaacagagctgatggagacttatttcaaagacattgtggatgtagggttcaccgcggagatggaagaccgtctggacgcggtggaagtgaaaaatatcgactggcactctgtgatcaacgatttctattccggatttgagaaagacctgaaagtcgcggatgagtctatcgaaaaactggtgattgaagatgagccgaccggggagaactgtcctaactgcggcaaacctctcgtcattaaacacggccgtttcggagaatttatcgcctgttccggttatccggagtgcaagacgacgatgacgattcagaaaaagttagacgtcaaatgtccgaaatgcggcaacgatatcatcgtgagaaaaagcaaaaaaggcaaggtcttttacggatgcagcggatatccggactgtaatcaggtgttctggaacaaaccggtagataagaaatgtccggaatgcggatctctcatgacagaaaaaaagacgaaaacgtattctcttatttgttccaatccggaatgcggccacaaagaagcgtagaaatt

SEQ ID NO: 477 - DNA, 9886 bp, Unknown
  16S sequences of unknown bacteria
cgatgtaaatctgtctttgcgggaagaaggaagcacagaatacggtacgcgctgcgaaatgaaaaacctgaattccttccgttctgttacccgtgccattgcgtatgaggcgcgccggcaggcagagctgttggaaaaaggtgaaaaggttatccagcagacattgcgctgggatgatgatcttggcaaaacctacgccatgcgcgataaagaggacagccaggattatcgttacttccctgagccggatctgcctcctattgtcatttccgccgagcacatgcaggaactcaaggatagcctgccggagctgccgcaggcccgctcccagagatacgaggcgctgggcttggccagccaagaagcgcggcttttggccaataccgcttggatgactacgttgatggatggtgcgctagcccaaaaggcagatgcaaaaattgctgccaactggctgatcggccctatggccagcctgtggaacgagcatgctgcccaggaagagccgcttccttttacaggagagcaatacggcgcatttgtgcagctaatcaccggcaataaaatcaattcttccggagccaagaccgtgctggaaacgatggtggaaaccggtaaggatccggatacgatcgttaaagagaaaaatctggcacagatggaggataccgatgcccttttacaggtagccaaagaggtcgttgcggaaaaccaggataccgtggaggcatatcttggcggtcgggaaaaagcttttgccagtttgatcggcgctgccatgaaaaaaacgcgcggcaaggccaatcccaaagtaattcgtcagttgatcttggatttaatccaaaaataagcgtaataaaaggagggttttaatgccctccttttttgcattgttgaaggttgctgtattgtaaattaactattttatcttctttacaatttatattcaatcgtcaactatcttataaatatatgtaaattatttgtggattcaaagggagattttgtctttgcgtattttctatgcttggatgccgtccagccgcatagggatcccttgctgatccaagtactttttcagtgtaccgatctgtaaatgcccaaagtggaataacgaagcggcaagcattgcatctgcacccgcccgggccgcttgtgcaaaatgctccatcgtacccgctccgccggacgcgataagcggcactttgcaaattttagacgcctgctcgagaacgggcagatcaaatccctgcatggaaccgtcggcgtccatactagtgagcaagatctcccccgctcctcgcttttgcacctcatacagccactccatcgcatccagccccgtattgatgcggcccccatgaatgtacacatcccagccatccctatcctgacagcgctttacgtcgatagatacaacgatacactggctcccaaagcgcatggcgccttcctctatcagctccggcgtttgcaccgcaggcgaattgagggatattttatccgccccgcggcgcagcacctcccggatggtatcgatatcacggatcccgccgcctacggtaaagggaatgaacacctgctctgccgtgcgctctacgacatcaaacatcgtgcttctgccctcgtgcgtagcgttgatatccaagaaggtgatctcatctgcgcccagttggctgtaacgccgcgccgtttctactgggtcgccggcatctcggatgttttcaaattgaatgcctttgactacgcggccatctcgtatatccaggcaaggaatgattctttttttcagcattgttctgctcccttcagcgccaagaaattgcgcagaatctgcatcccattgtctccgcttttttctggatgaaattgacaaccataaatattatcttggtgcacagcgcaggcaaatggaatttcatattccgtaataccgcttacatacggcttttctatctgctgggcacagtagctatgcacaaaataaacagaaaactccttaggcaggccggcaaacatttcctcatccctattttctacgctattccagcccatatgcggcaccttttcccgtatggcaaattttgtaatttccccagggatcagccctaagccttgctgccatccgccctctgtgctggattcaaacaacagctgcatgcccaagcaaattcccatcaggggcgttcctttttcaacagcttcttgtatggcctgcaccaatccccgcctggacaattctgccatcgcatctccaaatgcccctacgccaggcaaaatcagcttttgcgccgtttgtatttcctcagcatcctgagataattttggctgcgcacctaaaaaagaaagcactttctgcacgctgtgcagattgcccatgccataatcaatgaccacaacctcttgcattgctctgcctcctcagcggatgataccacactataacactttatcatgatagtgtaaagaagtttttgctatttcttctatgaattgtattcacaacaatttcctggcgcgaatttgtgaattttcaatggaaaaaaggtcggttttagactataatatttctgttataaacaaaactgtgtttccgcagttcctttaggaggaaaccatatgtctgttacagccatcgttggcatcaactggggagatgaaggcaagggccgcatggtggattatttatccgaatcctatgaggtcgttgtccggtatcagggcggcaacaatgccggccataccgtcatcaatgaatttggtaaatttgcgttgaatcttctcccttccgggatttttcgtccaggtaccattaacattttagggcctggcaccgtcatcgatttggagcacctttgcggagagatcgggcggctccaaaaggccggcgtttccatttctccggagaatttatacatttccgatagggccatgatctgcatgcctttccatcgttggcaggatcaaatggaagaggacaggctgggggccgcgcaatacggctccacacgccgcggcatctcccccgtatatggggataaggccatgaaaaagacgctgcagatgggcgatttattttatcctgaatcgctgcatgagcatctgtaccgccttgtggattggaaaaacgcgttgctgggcagtgcatatcactgcgaagcgatctccatggagcagatgcaggcctggctggatacctacggcagcgttctaaagccgtatataacggacgtaggccaggtgctgcgcgaagcgttgtcctgtggcaaaaatgttttgatggaagcgcaactaggggcgttaagggatctggactatggcatttatccttatacctcctcttcttccccgttggccgggtatgcacccatcggctgcgggctgcccagcatcaagctggacaaggtagtcggcgtagtcaaggcatattcctcctgtgtgggggccggcccgttcgtcggagaattggacggcgctgaaggggatgcgctgcgcgaagccggcggagaatacggcgcagccaccgggcgcccacgcagggttgcgtactttgacttggtcgccacaaagcacggcattgagctgcaaggggccagcgacatcgcgttgacaaagatggatgtgttgagccatatgcccagcatccccgtgattcgtgcttacaaggtggatggcaaggaaataacacgcttccccgctacgcagctgctagatcgggctgaacctgtgtatgaaacactgccaggctggcaatgtgagattagccacatccgtaagtttgaagatttgccccaagcggcgcaggattatgtcctgtatgcggaaaggcagctgggcgtctttatcaaatatgtttccgtgggaccggaacgtgaacaaatcatcatccgtggatgaacgaaacaatttgtggagggattatcttatgagcgaacttttgtatgaaggaaaagccaaacaagtttttgcaaccgaagacccaaacgtcgtcatggttcattataaggatgatgcgacggcgcaaaacggcctgaaaaaaggtacgatcgtcggcaagggcgtaatcaacaaccgcatgagcaacgccatgtttcaaatgctggaggaaaagggcattcccacgcactatgtcaaagagctaaacgaccgcgatacgctggtaaagcatgtgaagatcgtgccgttggaggtcatcgtgcgcaacattgccgccggttccctggcggagcgcttgggcgtgccagaaggtaccaagatggcttctacagtattggagttttgctataaaaatgatgatttgggcgacccgatcgtcaatgaataccatatccgcgccgttggactggcttcagatgaggatgtaaagaccatttcagagatggcgctaaagatcaacgagcttttacaggagcgcttgcagcaggcgcatatgatcttggtggactttaaactggaatttggcaagctgccagacggcaccgtgatcctagcggacgaaatttcgccagatacctgccgcctgtgggacgacaaaaccggtgaaaagctggataaggaccgtttccgccgcgacctgggcaagaccgaggaagcataccaagaagtaatgcaccgtttggggttggataaataacatggatcagctacgtgaagaatgcggcgttttcggcgtctacaaccaatctgaaatggacagcgcgcatatgggctattttgctcttcaggctttacagcatcgcggccaggacggctgtggcatggcagcctccaacggcggccctgcacagctgattaaaaacatcggtcttgtgacggatgttttccagcatgatggcttggggccgctgatgggcaaaaaactgctcattggccatgtgcgctatgctaccagcggcgccaccaacgtattgaatacccagcccctgctgatgaaattccagggagggttcttagcgctggcgcataacggccacttggtcaacgcccctgccctgagccgatatctcagggaggacggcgttctgtttcaaacagacatggataccgagttgatcgcccatctgatttcccgttcccgcgccaaatccatgccggatcgcatcaaggaaatgatggaatgcgtttacggctcctatgcgctggtgctgatgacgcggacgcacgtttatggcgtgcgtgatccttgggggattcgcccgttgtgcatcggcaaattgggcgatacctatatggtggcttcggaatcctgtgcttttgatgttttgggggctgaatttgtccgcgatgtggagccgggcgaaattatctccattggcaaagaaggcattcaaagctaccgtacccctgtgcgcgaaaaccacggaacatgtttgtttgaatatgtctactttgcccggccggacagcgtgattgacggcattccggtataccaagcacgccgccgggccggccagatgctggccagcgtgcagcaggtggatgcggacattgtcgccggcgtgccggacagcgccatcgcggccgcgcagggttacgcggaggccagcggcattccctatggcgatgttttggtaaaaaaccgttacatcggccgtacctttatcacgcccaaacagcaggcacgcgaattggctgtacgcttaaaactcagcgttttgaaaaaacaggtggccggcaagcgagtcctgctggtagacgactctatcgtgcgcggtaccaacagcatcatcattgcgcgtatgctacgggatgccggggccaaggaagtgcatatgcgcatctcttccccgccggtaaaatttccctgtttatttggcatcaatacaccgacgagcaagcatttaatcggcgctcaacaatcggtagaggatctgcgcaagagccttgggctggattccctcgcctatctggatctgccgcttttggagcaagctgtcagcgattataaccaagggtactgcactgcctgctttgacggcaactatccgatggatatccataaatgtaagaactgtgtttccatactcaaaaaaattaaaaaggagcgccaaagatgaatgacacatatcaaagcccattcaatgcgcggtatgccagcgcagaaatgagccgtctcttctccccggatatgcggtataccacttggcgcaagctgtgggtcgctttggcggagtctgaaatggagctagggctacccattacgcaggcacaggtggatgcgctgaaagcgcacattgagcccatcgattatgaagtggtagccgccaaagaaaaggagattcgccatgacgtgatggcacatgtctatgcctatgggcaggatgcgccggaagccaaaggcatcatccatctgggcgctaccagctgttatgtaacggacaatgcggatcttatcatctatcgtgaagcgctgcgcctggtacgcggcaagcttttggctgtggtggagcgcctaagccgctttgccctggcctaccaggacatgccgcagctgggctatacgcatttacagcccgctcagctggtcaccgtcggcaagcgcgccacgctatggatccaagagctgatgatggacctggacgagctagactgttgcctggccagctttaagctgcttggctgcaaaggaacaacgggcacacaggccagctttatggatttatttgaaaacgatgaggagaaatgtaaacagctggatgctaagatttgtcagaagatgggctttgaatcctccttccctgtatccgggcagacctatccacgtaagtttgatagccgtattttaagcacgctgtcctccattgcgcagtccgccagcaaatttgccaacgaccttcgcctgcttcagcatatgcgggaggtagaagaaccctttgaaaaaagccaggttggctcttcagcgatggcgtataagcgcaaccccatgcgcagcgaacgcatctgttcgatggcccgccatgtgattgccctggcgatggatccgcccatgacggcatctgtgcagtggatggagcggacgctggatgattcggccaaccgccgcatctgtatgccggaggcgtttttgtccatcgatgccgtattggaattgtacgccaacatcgcagatggaatggtggtgtatcctcagatgatccagcgccatgtagaggagcagcttccctttatggctacggaaaatattttgatggaggctgtcaagcatggcggcgaccgccaagagctgcatgaaaagctgcgtgtacattcgcaggcggcagccgcggtggtaaagggcgaaggcaagccaaacgatctgttagagcgcattgccgcagaccctgcgtttggccttacattgtctcagctgcaagaggtcatggatgctcgcctgtatattgggcgctgccccaaccaggtcgtggaatttattcaggaacaggtactgccgcgcttgtccggtgcggcccaaggcccaatcgggcagattcgtgtataaagagtggggagtagaaataaaatgaagatcgtatttattaccggcggcgttatgtcttctctggggaaaggcgttacctccgcctctcttggtatgttgttaaaaagccgtggctatcgtgtcacgatgatgaagtttgacccttatctgaatgtggaccccggtacgatgaaccctttccagcatggggaggtttttgtaacagacaacggcggcgaaacggatctggatcttggccattatgagcgttttattgacagcagcctatccaagcgtagcagtataacctctggaaagctgtattccagtttgattgagcgtgagcggcgcggcgatttcaacgggggtaccgtacaggtggtgcctcatttgacaaacgccatcaagcagcccatcaaggatgtggcaaccaaggacaatgccgatgtaacgctggtagaggttggcggcacggtaggcgatattgaaagccttccgtttatcgaggccatcagccaatttcgtatggaggccggccccaccaatacgctgagtatccatttgacctatatcccttacctggaatctgtaggcgagctaaaaacaaaacctacgcaacatagcgtacgcgagctttgttctttgggcatccagccggatatcctggtttgccggaccgagcatgagctgagtgcggaaatcaaaaataagatttcctatctatgcaatatcacgccgggctgcgtaatcgaaaataacgacgtcaaaaccatttacgaggttcccttgatgctagagcgtgaggggctttgcgtcaaggctctggaaaaattagggctgccagatcgtgcgcatgacctatccgattggcgcgatatggtacaacacatcatttctcccaagcgcgaggtcaatgtggcgttggttggaaaatatatcaagctccacgacgcttacctgagcgtggtagaatccttaatccatgcgggcgcttatcatgatgcaagggtaaatatccattgggtagaatccgaagaaatcacccctgaaacggttgatcagctgcttgatcccgtggatgctgtccttattccaggcggttttgggcagcgcggcacagaaggaaaaattttggctgtgcagtatgcacgtacgcataaaaagcccttttttggcatttgtcttggcctacaaatggccgttatcgaatatgcacgccatgtagcagggctggaaggggccaattccacggaaatggatccccatactccctaccctgtcatcgatatgatggaaacacaaatcggtgttacgcatttgggcggtacacagcggctgggccaatatacctgccagctggaggaaaacagcaaaagcatggcggcctatggtacgccgatcattcacgagcgccatcgtcatcgctatgagtttaatgccaaatatgcggacaagttgtttgacggcaacctgcacaaggcaggcaccaatcccgaaaccggcttggtcgaaatcgtagagctggtggatcatccctggtttgtcggcgtgcaattccatccggaattcctctcgcgtccgatgcgtcctcatccgctgttccgtgaatttatcggagcggccttgaccgaaagagaagggggccaggattgatggaaaaaatcattgtgctggatttcggcggtcaatacaaccagttgatcgtgcgccgtattcgggaagccggtgtgtattgtgaaatctttccctgcgatactgcggtagatacatggaaaggcgatgatcttaaaggcatcatcttgacgggcggcccgcaaagcgtctatgacgagcaagcaaaagcgtgcgatcccgttgtgctttcccttggtgtcccagtgcttggcatctgctatgggcagcaatggatgacgcatatgttgggtggtaaggttggccctatggatgcgcgtgaatatggctctacggacactatgttcgatctctcctctgccctgtttaaagggttgccggagcggaatgtagtttggatgaatcataacgacgctgtcaccgctctgcccgatggtttcgtttccatcgcgcataccaagcattgtgcctgtgccgccattgccaatcctgataagcggtattatggcgtgcagtttcatcctgaagtggcgcacacacagcatggcagcgaaattctaaagaactttttgaatatttgcggctgccagggcggttggaaaatggaggctgttgtagattccatggtagaggccatccgtaagcaggttggagacagcaaagtgctatgtgctctttccggtggtgtggattcttctgtggccgcggtactggtacaccgtgccattggggacaacctaacctgtatctttgtagaccacggcttgttgcgtaaggatgaaggcgaccaagtcatgc

SEQ ID NO: 478 - DNA, 32759 bp, Unknown
  16S sequences of unknown bacteria
cacggataccgcggtacatattaggaaaacgccgacggtaagatcggttttgataattgattcaagcacagaaatgcgcctccttttcgcaaaaatcttttttcagaatattttcacggtagcatgtaccgtatttcgaaaacggcaccggaaaagccccgttttccgaaagtattcccgcaagccacatcgggcacactccgggaagctttatctccatgagaatccttgcgtcgccgaggagcgctttcccgtgatcgcccgcgcgaagatcaagctcgcccgttctccaacgtattccggtatcgaaagtgatgcgcagctccggatcgtacagtccggcgtatgcctcgcggtcgtatgcgataaacaccttcggtacggctttgtagaagccgacgaaatgcccgatctcgcgttcggtctgcgtgccgccgtctccgaaatgcccggagaatatcgcgtccgtttccgaagcgccgatcgagatccttcttttatatacgatccccgcatactttttctttatttccgcgaacacacttccgtcgtcgccgaccgttccgtagctgcgaagccgaagcttttccttataatccggcgcgcccgtgcccgcgcgcacaacgctccaatcgtcgctgtcgcagtagatattgcatatcgtatatctgccgtaatcgtcctctttcacatacgggcgtatatcttcaatgatatgcgcatactgcgcgggtgtgagaaaatatttgttctcgtatctttcaaagctgtatcttattatgtttgccacgcttctccctcctttgtgcttatattgtagagcaccatcctaaaggaatcctaaaggcaaaaacgcttttccctttaggttttctttagaaatccctgttacaattaatgcgcagacaaaagaaaacgtccggcttttcgccggatgaaataaagacggaaggaagatggcattatgaaaaaatttttcggatcacggattctcgccgtattgacggcggctgcgctgttttcggcgcagcaatgcactgttttcgccgccggggacggcgggggatcgtttgtattctcggataccggaatacaggtgtcgtccggtgcatcgggatatgagacggaaggcacatcgctgaccgtggacactcccggaacgtacacggtatcgggaaaatgcgcaaacggctctataaagataaagaaggggacgaccggcgtcacgctgatcctatacggtcttgagctgacctcggaggatacggctccgcttgtatgcggcaaatcctccgaagtgacggtcacggcagcggacggaacagaaaacacgctcaccgacaccgaatacaacaacgacaatgagcatcccgaaaacgagaacgcggaaaacgccgtaataaagtgcaaggacggctccgacgtcacgctgtgcggaggcggcacgctgaacataaacgcaaacggcaaaaacgggataaagtccggcgcatccaccgaagaggagggcgaagcctctctctcgatcgaaggaataacgcttaacataaacgcacccgtcaatgacggaatcaacgcggaagcgtatatagcagtcaaaagcggaagcatcacggtcgatgcgggagacgacggaatccactgcgaccttatcgccgacataggatcggaaggcggcggcggaccggaaattaacatcaccggatgctgcgagggacttgaagcggcagagctgaacatgtactccggaaacatacggatatattcggaggacgactgcctgaacgccgcaaattccgatctcggcgactacgatttttctctccttatcgcgggcggcgcgctttatatgtattcggtgtcaggtgacggaatcgactcaaacagcagtctcacgatatccggcggagtcaccgaggtgtggaccgcaaacacggcggacaatcagccgcttgacgcagacggaacaatcaccgtaaccggcggaaccgtatttgccgcaggcggcagcgccggaatgggcatgaatctttcgtcttctcaggcgaatgtccgctacggttcggcttcgatcggaggcggagatcacggctcatttcccggcggtcaggctccgaccccgccgaacggaaccgaaggcgaaagctttcacgaaagcggagagctcacacctcccggtggggtgaacggcagcgctcatcaaagccccaacggcgattccgaagacggtgaaaatccccccgaaatgactatgcctgacgggagcacatcgccttcggacggcacgttccccgaagctcccgaaaatccttcggacggtgcgacacctcccgaaaagcccgacggcggcgatatgccttccccccgtgaaaatcagggcggaagcacgccgccctccggaggcttcacccccggcacgtttcccggcggcgcgggcatcgcgtcctcactcggcatatccgaaggaagcgaggtcgtcataacatcatccgacggaacgtatatttattcagcgacagcaccgtgcaccgtcggcaccgtattcttctcatcgtccgctctcgccgccgacgaaacgtacactctcttttcgggctccacggagagcgcttctgcggaagcttccgccggaaatgcgaagaccacgcaggacactgcgaacagcatcaccgataccgaagctccggaaagcgaaagcaccgaggagaccgcggagcctgaggcggaaaactccggcacaaaacgcacagtcataacggttattgctgccgtcgccgcagcggcggtcgcaggagcagcggttacattccgtatgataaagcgcaagaagacaaacgtcgaataagaaacgggtatcctcaccgcctccgcagcgtccaagtgctgcggggggcggtgccctcgcttttcctccggaccgtgcgcacacccgtcattttgtacagctgatcgtttttgaaaacattgcggaatttacataacgacgaaattcgtcatcaaggaagaaaatattcgaaacctcttgacaaattgaccgctcgggagtatcatattaaatggttagcgaggactaaccgttcaatatgatactcggttagtgaaagctaacctgaaattacggagggttacgtaaaatgatgccgcttacacttgcatctccggaagaagaatatataataaagaagatcggcggaaagccggaagtgaaaaaacacctcgaaaatctcggctttgtcgtcggcggaaacgtaaccgtcataaccgagctttccggaaacgtcattgtaaacgtaaaggaagcccgcgttgcgataagccgcgaaatggcgcagaaaataatgatctgaaaaatcccgcaattaattttggaggagaatacatatgaaaacacttaaagaagcgaagatcggggaaaccgtgacggtagtaaagctccacggcgaaggcgctatcaagcgcagaatcatggacatgggtataaccaagggtgtccagatacacgtccgcaaggttgctcccctcggagatccgatcgaaatcacagtccgcggatacgagctttctctcaggaaagccgatgcggattccatcgaagtagagtaatttcccaatcgggcgcgtgccgcttttcggtacgcaaaggttagccttcgctaacattcggaagccgtcacggacagaccgagaccggcatcccgactttaataatttgacaaatcaaagaaaggtacggatataaaccatggatctgagaatcgcccttgcgggcaacccgaactgcggtaaaacgacactgttcaatgcgcttaccggatcaaatcagttcgtcggaaactggcccggtgtcaccgtcgagaaaaaagaaggaaagctcaagaagcacgacggcgtaacgatcaccgaccttccgggtatttactcgctttccccctacacccttgaagaggtcgttgcaagaaactacctcatcggtgaacgtcccgatgcaatactcaacatcatcgacggaaccaacctcgaaagaaacctttacctcacaacgcagctcaccgagctcggaatcccggtggtggtcgccatcaacatgatggacgtcgtaaagaaaaacggcgataagatcgacactgcggagcttgcgcgtcagctcggctgcaaggtggtcgagatctccgcactcaaaggcacgggaatcatggaagccgcagatgccgcaatcgatgccgcaaagaacacaaagaccgttccgatgcacaacttctcgggcgccgttgagcacgcgatcgcacacatcgaggaggctgcggtacacaacatgcccgcagaacagcagcgttggtatgcgataaagatctttgagcacgatgacaaggttctcgaaaagctcgacatccccgcggatacgatggctcacataaacgaagacatcaaagccgccgaagatgagcttgacgacgatgcggaaagcatcatcacaaacgagcgttatatctacatagcttcccttattaagagctgctacaaaaaaaagaacaccggcaagctttccacctccgacaagatcgataagattgtcacaaaccgctggctcggacttccgattttcgtagccatcatgttcctcgtttactatatttccatggtaggcgtcggagctgccgctacggattgggctaacgacggactcttcggcgacggctggcatctgttcggcatcgacgacggatacgcagagctcagcgaagactacggcaacgcagtaaacgcagtcagcgctttcaccgggatcgaattcggcgaagaatacgaaagcgaagaagaagaagctgcggcatatgaagctatgctcaagatgatgaaggatttcaccaccgacgagacaagcgcaacgattgacgttgaggatgaagaaaccctcgctgtcaacacgatgaccgtatattattccgaaattccctccggtgcagatgaggactccacggttcccatgacatacaaggatgccgtaaagttcttcgagaaaaacggtctcgccgagcccgatcccgcagagtacggcatctggattcccggcgttcccgttctggtcggcaacggactcaatgcaatgggtgtcggtgaggacacatggcagtacggactaatcatcgacggtatcgtagccggcgtcggcgccgttctcggattcgttcctcagatgctcgtcctcttcctgcttcttgcattccttgaggcatgcggctacatggctcgtatcgcattcgtccttgaccgtatattccgcaagttcggtctctccggaaagagcttcatcccgatgcttatcggtacgggatgcggcgttcccggaatcatggcttcgcgtactatcgagaatgagcgtgaccgccgtatgacgatcatgaccacgacattcatcccctgcggcgcaaaggttccctttatcgcaatgatcgccggtgcactcttcggcggaagcgcacttgtttccacctccgcttacttcatcggtatggcagcgatcatcgtatccggtattatgctcaagaagaccaaaatgtttgcgggcgatcccgcgcccttcgtaatggagcttcccgcataccaccttccgaccgtcggcaacgtactccgcagcatgtgggagcgcggctggagcttcataaagaaggccggcacgataatccttctctccacgatactcgtttggttcacaacctacttcggctgggttgacggatcgttcggaatgctctctgaagatcagatcgacggctccatactcgcaaaggtcggcggcgcgatcgcttggctcttcgctcctctcggctggggcaactggaaggcagtcgttgcttcgatcaccggacttatcgcaaaggaaaacatcgtcggtactctcggtatcctttacggcggcggcgacgcaagcgtatatcagagcctcgcaagcgccttcaccggacttaccgcttactccttcctcatctttaaccttctctgcgctccctgcttcgcagccatcggtgcaatcaagcgtgagatgaacaatgcaaagtggacttggttcgcaatcgggtatcagtgcctgttcgcatatgcgatcgctctgatcgtaaatcagctcggcatgctcttcaccggcaatgtgaatattatcggaaccatagcggcgcttgctctgatcgcgttcatggtattcatgctcttcaagccctacaaggaagcgaacaagctgaccgtcaaatccggaaagaagtccgcgtaacaaaacaaaaaagctttaaggaggatttcatatgctgacatggttatctcaaaatcttgcggcgacggcagtatccgcagtgctcatcgcaatagtcgtacttataatcgtaaagcttgtccgtgacagacgggcgggaaaatcctcctgcggatgcaattgcagcacatgcgcaatgcacggaagctgtcacaaaaaataggtttttcctccgaaaagaggcgagccggataatccggctcgcctcttttattttttttactgtaaatatcggtatgttctgcaaaagcagcattacacaggaactgcagccgacttatccgccgggtttgaacagatcactgcagcggtaacggtcattcggggaagcacctcagcatatcccaaggggtgattatcccgagcagcttgctgttttcggttccgtctcttgtaacaaaaacagcgactactctgcgcctgtcgggggacgttgcctcgaaaaatttctttatattataataggatgcgtcgggcgcacagaaacggtagctctccgtgatgtgcgcttcaaccggaagaaattccgaaaactcactgatctccgtttcaccggttatacttttctctccatacttttcaagatatgagaataccgtcgccgtgctgaatactcccaccaagtagcctgaggacacgatcggcacatgagagaatccctgcgcgttcattcggcgtataagccatattacatgatccgtcatactgcatttcataagagcatcaaagggagtcatggtctttaccgcgacaggaggatttttcacactgtcgagtatttcgcgcataacatctaccacggaatccgatggctgaaagatatcctccccgccgatctgcgcatgatgagaaagcatattccgaagctcacggcatacattaagctcctctcgccatcttctgccctccgcctccatggaaaatcggactaccgcgctcgaaaagcggcggtcgtttttcgccgccgaatatctcacattcagaagttcttcaagattattgtacagatcaagaaattcatcggcgtttgacatttttcctccgaaatttaaaactgtttttcaaaacaggcatctttcttttatttcagactgcgataactgcggacaatcttcacagattcgggaaatacgtcataaatctgcgtctgttcgcatatattgcagatcggaagctgtacaaatattatatcattaatcgcatcggcatgcaacctcataaactgttaatttttgcgcgtttttttacaattatattgcgcgtgatgttttttcgtgaattttattcttatatatcccgtatttcgggataataattcacattttcgaaaaaacccggtgctgcgccgaatttttatgcacactttcgtctttcggcaaaaacttaatcttcggagttaagaaaaattgtaaaattttatcattccaccgggtaaaccggaaaatgaaaggagaggcaagtattcatcatgaaaacacttgcaccgacaaaaagccgctgtgagcagcagcaaagcaaatgcggaatcgtggattcccgcgccgtaccactcgccgacgggcgtctgcttctttatgttctgaaatcgttttatcatgacggatatacaagattcggaatatgtatttcgtcactcagccatacctccgaagtacttgaaaaaagctgtttcgatgatataacggtatgtgaaaaagaagcgcgcaacctgttcgggacgatgtgtgaatcctgcctcgagccgtgccacctcggcgaagtgctcgaaaactttctcggagaggtgcagaattaagcctccgtcccgttcagagaagcggcgagggcgttgatccgatgcggaaagatcattacaaagcatcaccgaaaaaagagattcgcccttgttttatgcagctgcataaaataagggctccgtgaaatacggatcaaatcacatcatgattcgcccgggaatggacataaaaagccgtttgtgtatatacaaacggctttttatgtgatatcatttatctgtcagttttcgtattcgggagggagagtgagtatgcttatccgcaggcgcatgtttgttttctgcttttcttttttcgtatcgtctctgatattttcatccctttctcaatccgcgaagctcgtgtccgcggctttcttcgcctgtgcactcgccgtttccgcaatccttcttcgcagatgctccgccgacggcgataaacgaaagaattctccctttcggtgcctcaccgaaaagaacaagatacgcattttcgcagtgttcttttcgtcacttcttcttgcctcgctgttttccgcattcaccttcttccgtatgtacggcatccccgaaagatcggtaacggacgacgaacagatcagcgcgtccgtcgtatcgagaatctggagttcctcgggaagcggcggatataaggtgcgcttccgccccgccgacggcgggaaaacaatttcggcacttgccgttatccccgatgagtcccttgaaccgggagatgtgttcacctcacacgccgctgtgcatccgctctccgacgcgcccctgccgggcggcgaacgctatctgcaatcacttgggttatcgctttacatcgaggtgtccgacggcataaagctgaccggagagcgcaattcccccgaggcggcgctgtcatccgtaagatcgtccctgtccgcgaagatcaggacatatatcggaaaggatgccggagcgctgtgcgccgcgcttctcaccggagaccgctccgcacttccggataaggtcagcctcgatttttcgagtctcgggatttctcatcttcttgcgataagcgggcttcacatgacggtgctcttcggcgcggcatccgcgctgattcgcaggacgcgcctcggtcggcgttcgcgcgagataattccgatcgtgcttgcgctcatgtatgcagcgatcaccggattttcgtcctccgtcatgcgtgctgcgttcatgctcatcatcacgcgcaccgcatccctcatcggaaggcgcaccgacacggcgaccgtgctcggcgaggccgcctttctgatatgcattttcgatccgtgctcggtgttcgacatcggatttgtgctgtcggtgctttccgtacttgcgctcacactgtttgaaaatcccgcagagcatatactgaagagccgcacaaaaattgcgaaggtgcttctcttcattccgaaaaatatgctcatgaccctcgcggtaagcgcgatgaccctgccggtcacctgtcttgaatttcagtacatctccttggctgcgccgcttgcaaacacgctttttattccgctcgtcacgctgctcatgtatctgctcgtgccgttttcgatgctgctcccgtttccctccgccgcaagcatattcggaaagctgtgctcggcgctcgcctcagcggtgctctcgctttcgtcatcgttcgcgtctctgccggggatcaccgtatcctcgcgttatccgtttttcttcccgctctcccttttgctcgtgatcgtccttgccgccctcgccgtgtcaaagcgaaaaaagattcccgcacttcttctcgcattctgtctgtgcgcgatatcggcatcggtcgccgtctcggagatcatgcgctcggacaccgtaagcatacggaccctgtcagacggaaagaacgacatcgtagcggtggaggatgagtcgcggcttttgctcatcgactcatcatcggggtatttttcgttcgcctcggactgtatcgacgaagaatacgaccgccgcttttccgaaatcggaatgtacgttttcactcactatcactcgcgctgcgtgcctcttatgaaaagactgacatcaaattaccgcatcggcgaaatacttgtgcccgagccgatgaacgaagaagaacgcgcgctctgcgatgcaatgatacgaagcgcggaggagggcggcgtctcgctgcgaacgttttcggatgctgtttcattctccgacgtatcgctttccctcggcgcaagatgctggattccggacagctcggaggcggtattctccttcacggtaagcgcctgcgaaaaaaatgccgtatatctgtcgtcgtcgtttttcaaagcgtcgcccgccttttgcgcgcttaccgatgccgggaatgccgatctctgcattttcggctctcacggcccgaagtacaaggagacgtttgccctgccgcggaatttcagtccgaaaagaaccgtttttctcggaagcagtgcggactttttccccgcggggcgcgccgtcggaatatcggattcgggaggacttcttctcacctcggagcatatcgaaacatggaagaaggactgagcgcatttttcgtccgtaacagtgtgatttttacatatttctattgactttgcgtgcctctcggggtataatccgtatgttcggggatcggagtacaaagtgctccgttcccgttttttcgggaaaagccgtgaatccgaggagaattcatgaaaaacactgttttgcagaacgattggtacggacgcgagaaaatatcgaagatactcctgaaggtcgcaccgcccgtcatgcttgcacagctgatacaggctctttacaacatagttgacagctttttcgtcggcatgtactcaaacgatgcgctgacggcgctctcggtcatatatccgatgcagctcgttataatcgcgcttgcggtcggcaccggagtcggagtaaacacatacatggcgcgcaaatacgcacaggagcggccgaaggacgccgaagccgccgcgggatgcggaacggttctcgcactcgtatcgtgggcgctgtttgccgcgctatcgctgatattcatgcgtccgtatgtaaagacgagcgcaacctcgcccgaagccgtggaatacgccgtcatttacggaaatattgtctgtgcgggaagcgtaggcgtatttctcgaaggaaattggacaaaggtgcatcaggcgcgcggcaacatgcgccgcccgatgatcgcgcagatcaccggagcgctgacaaacataatcctcgatccgatccttatattcggtatcggtcccgctcccgaaatgggcgttgccggcgccgccgccgcaacggttatcgggcagatctgtgcggcggtgatcgtgtcggtcggcgcggtgtgcaagccaccggaattaaggcatatgcgccggttcataaacaggatctacttcttcggatactcatcgatcctcatgcagcttctgtacacggtgtacatactcgcgctcaacataatcctcgcgggcttttccgacgccgccgtgaccgtgctcgggctttactacaagctacaaagctttttcttcattccgcttttcggacttcaaacgtgcatcgtgccggtcctcagcttcaactttgcaaagggcgacggacagcgctgccgtcagacgatgaatttgtccttccttatatcgtcggtgttcatgctgctcggcatcgtctgctttgtatccttccccgttccgatgatccgcctgttttccgacagctctcaagtcatcgaaatcgggaaaatcgcctttccgataatcggtacgggattcgtttccgcggtattcggaatcataatgcccaccttctttcaggcgatcggcaagggcgcgcagagcacgttcctttcccttctccgtcagatattctgccttatcccgatattctgggcattctcgctcgtcgggctcaactgcacatggctcgcttttccgctgtccgagacgatctcgggtgtcgcggggcttgtcatgtaccgtgcggagttgaaaaaatggagtaagcattccgaaggtaaaaaaagcccgtcagacgccgttctcagaccatcccgtcccggcgtaatcataacgatcgcgcgggagcacggctcctccggcaagcagatcggaaaggtcgttgcagagcgtctcggaattccgttttattataaggaaatgaccgcactcgccgccgaggaaagcggactcgaccgcgaattcatatcggacatcaacgcaaattccccgaaaatcctccacgatctgtatctcagcacgcacgtcgttcagcaggcagtcgccgctcaggaccgcataatccgccgcattgcggaaaacggaagctgcgttatcgtcgggcgctccgctgactatgttctgcgggatcaccccgatcttttcagagtgttcgtgtatgcgccgaaggacttcagaataaagcggctcggcaaggtatacggcgacgatccggaaacggcggaaaagaatatccgccgctccgacggcgcacgcgccgcctattacagaaacatttcgggcagggtttggggagagcgcgaaaattacgatcttatgatctcgagcgagatcggaatcgaaagcagcgcggacattatctgcaaatacgcggcggcaaaggaaaatgcggacagggctgcccgataaataccgacccacacagtgcacgcaagaaggagttcggcaaatgccgaactccttcttcgcttatttgtttaaatcctgaatggcgatgctgtcaaaaatcagccctgttccgccgggctctcgccgtccgtgtcggtgcccgtttcgctctccgccccggtatcggtcgaaggctcggtgtcggttgaaggttcggtatccgttgaaggatcggtgccgccgggatttccgatcggctgtccgaccgtgtatccctcccactcggcaaatgcgcggatcatatacacgatatccgtcatgtttatgttgccgtcgcccgtcagatctccgcactcagtctcaaaatcgccgagctcggctccgatcgtatagcggatatagtacacaagatccctcatatcgaccttgccgtcaaagtaaacgtcaccggtgatgcgctgaacgctgtcgtcgcgcgtccacaccgcgtaaagcaccgcagatgcattttccctgtaaacagcgttatcgggtgcggtatagacagcctccgtgccctgctcggcagcccagccgccgaaggtgtacccgtatctctcgacaccgtcgcagacaagaacaagctcttcattgatatgcttcggctgaggtgtcagacggcttgcgcatccggtgacatattcgacggtgtagatcgcgccggagacatactcgcagtaatcgagcacacaccatccgccgggaatccttccccaaacatacgatgcggttgacaccgcctgggtcacggtgatctcggtgccgtcggcaagcttgtcggcgacgggatatgaggtatcgggacccgtccgcacattgagcgatatctcgcttgcgacgcgccatatctcaaacgcgctctccggctcggtcgcattgtatttcggccaatacttttccttcgcggaattgccgcgggcgacggagcgctcctcgcgcttgtcgggaatctcaaaattatagcaccaataatatcccgcatcgtatgcaccctgatcggaattttccactgcgtagacgtagttccagaccttcggatagaaattctgaagctcgtatttgaggtagtaaagctgagacataagctttgacggatcgtagccgtttttcacacagaactcgcggagtttcgtccagcgtccgctgccctccgctatatcgtgccactgacagattccgtagcttgttccgttatctccgagcgcttcgggattgaagccggattccatctctatattggcaaggatgccgcacgctgccgccgaattaagcttcatatctcccgtgaggaaatcataaattatatcaacattggagcgttcggtgccttttgcgggctcgtcagcaagcaccgcaacgaaaggaaaaatcacaaggagtgcaaggaatgtgccgagaattctttttttcattatgtaggttgcctttctccggacagcgcttaattcacatgcgcttttcgtccgatcctatataagatattataacacaatatgcgaatttttcaagtatatattccttaattacacaaggataaataaggaataagaattcggcgggattgattttgcgcactttgtgtgatataatttatgcggacgtgacgcgcccggttttccggacgctcttacataataaaaacggagcgccgaatgtgctccggacgacagacccgaaaggaaagctcaaaatgaaaaaacttgtaatgggcaacgaagcgatcgcatacggtgcccttgccgcgggcgtatccgtagtcaccggataccccggaacgccgtccacggaagtgctcgaaacagtggcaaagctcaagaagcgcggcagactgcccgacgtttacgttgaatggagcgtaaacgaaaaaactgccctcgaggtcgcggcgggtgcatcctactcgggcgcacgcacgcttgtaacaatgaagcaggtggggctcaacgtagcctccgatccgcttatgtcactcgaatacgtcggacttcgcggcggtatggtcattctcgttgcggacgatcccggtccgatatcctcgcagacagagcaggacactcgcaccttcgcctctttctcaaaggtcccggtattcgacccttcctcacccgaagaagcgtttgcgatgatgccggaggcatacaagctttcggagaaatacgaaacgcccgtgttcatgcgtcccacgacgagaatatgccacgcaaacgcgacgctcgaaatccccgaagcgttcgaggcaaagaaagccgacggattcataaaggacccgtcaagatgggtcatctttccccgtctttcgtatgcaaatcacaaaaagatagaagagcgtaacgccgccctttccgatacgctttcatcatacggaagaaacagcgtatcaggcagcggaaggctcggcatcgccgcaggcggagtcagcgtcgcctacgcgctcgaagcgctgtcgcttctccgtgccgaaaacggcgagatccccgatataaaattcatgaaaacggcgaccccgtttcccttccccgaaaagctcgccgcggattttctccgcggtctcgacgaggttctcgttttcgaagagcttgatccggtgattgaacgcgcgctcgccttcaccgcgcacaaatacaggatcggcgtgaagatcctcggaaagctgacaggagacgttgcgtgcgccggagaaaattccgcagaaagcgccgccgctgcgtttgcgcgatttttctcggtcaaagcgcccgaatttccggagcccgtcgacatgccgctgcccgttcgcccgcccacgctatgcgcgggatgtccgcaccgcgcgtccttctacgccgtcaagcaggcaatgaagggacgccgcagcgtattctgcggggacatcggctgctacacgctcggaaacgccgcgcctctcgagatgacggacacctgtctctgcatgggtgcgggaatcacgattgcacagggaataaagcgcgccggagacgacgcgatctgcttctccttcaccggagactcgaccttcttccacaccggaatggtcgggatcgcaaacgccgtatacaacggcaccgatatggtcgcggtaattctcgacaattccacgaccgcaatgacggggcatcagccgaaccctaacacgggaaagcgcgcatccggcgagatcgccgaggtcatcgacattgagggcgtactgcgcgcgctcggcgtgcgcgatgtggcaacggtcgatcctctcgatcaggcggcggcgatcgaggcggtgcgccgcgccgccgacggcgagggcgtccgtgcaataatcttccgttcgccctgcattgcgctcttccgaccgaaaaagcgctgtaaggtgaataccgaaaaatgcacgggctgccgcagatgcatacgcgagctcggatgtcccgcgctcgtccgcgacggtgaacgtgtgaagatcgatgcctctctctgctacggctgcaccgtctgcgagacggtatgcccgttcggcgcgatatcccactgaggacgccagaccaaccgaaaggaaaaacgaaaaatgataaacataattctgtgcggagtcggcggtcagggcaccgtccttgcatcgaagattctcgcatccgcggcaggcgcgcgcggcgaatcggcgcacaccgccgagacgatcggcatggcgcagcgcggcggcagcgtagtaagccacgtccgcatcggcgaaggcgcatattcaccgctgatcgccaaaggatgcgccgatgcgatcatcgcgttcgagcctgccgaggcggtccgcgcctttccgtatctgaaaaagggcggatcggtcacggtaagctcttctccggtcaagcccgtaacggactcgcttgccgacaagccgtacagcgccgacgatatgatagaatttctcgaaaagcaggacatacgtttgaccgtagtcgacggcggcgagatcatccgtgaagcgggaagcgcaaaatccctcaacgcggcgctcatcgccgccgcctgcgcatcgggtgcggttccgttttccgtcgaagaaatcgagaatgttgtgcgaaacgagctcaaggcggaatacgctgaatcgaacctccgcgcgatagccgcgggtgcacgcgccgttctcggataaaagccggggcatcggaaataacggtttaggatctgggcaaaattgtcgaaatcgttttgccgatcatcggataattgcccgaatcgggcgcgcgtgccgttcttctgttttgggaagaacaatcgctttttatctgctttccgtacacacaaaaaggctgaccgtccggtcagcctttttcattcggagaaacgaagcatcatctccgattcaaatcgggtcattcttcgtttgctttcattttttcgtaagtgaacaacgcgccgagaaggaaaacgattcctcccgtgagaacgcccgtcgtatagatctgacggcggcggcggatcctttttgacagcgcggcaaatccgtccggattcttcatcgttacggtgatacccgcgtgctgcgcgtttttcttcatgctttttatatatgccttgtaatagtttctgcatgccggacagctcttcaaatgctcctctacgatcacgcggctcgccgcgctcgctattccgtcgcggcaaagcggaatgagatctctcaccgtgtcacatcgcatattcattttcaagttcctccgtaatcttctttcttgctctgaaatatatcaccttcgccgaattttcgctgatcttcagcgaacgcgcgatctccgcatagctcattcccgcgtatgcgcgcagcagcaccacgttccggtgcttttccggcataccggcgacgacacggcggaccgcgcggacaagctcgcgcctgtcaagctcgctctccggatcggagttttcaagatacgcgcacgtcataagccctacatacgaatcctcaacgctcatcttctgcttcttcatatatttgaagtaaacgtgcttcgctatcgacgcgagccatgtgaacacatcggattcgcccttgaagcggtgaatggacagatacgcctgaaagaaagtctcctgcgtcagttcttcggagaccgattcattcctcgaaagcttcaaaaggaaagaatagacgcgggcgaagtattcacggtacagtttttcaaaatcctgcgttttgtattcctcccttcttttcggtcaatcatattgtatcgcctttttcggataagtttgtgaacaaaatgaaaaatctgagctccgccgaaattttttccgaaaaagtgtaaccttttcgattccgtcggcactaacaattaaaagcaaacgaaaaacaggagcggcggaatccgtccggatgcatccgccgggatttttgaggatcggagtgcgcatatgagctttaatataaaaggtacgggaatgtacgttcccgaaaaaatcgtaacgaacgacgatctttcgaagatcgtggaaacaaacgacgagtggatagcaaagcgagtcggagtgaaaagacgtcacatatcgaccggcgaaaccgccgccgacatggggctgaaagcagccgagcgcgcgctcggcaatgccgggatcactccggatcagctcgatctcataatcggcgcgacggtctcgggtgagaacgttcttccctccgtatcgtgcgatatacagggcaagctcggcgccggatgcatggcgttcgacataaacgcggcgtgctcggcgttcatattcatgcttgatgtggcggcgggattcttcgcaaagcaaaagctgagaaacgtgcttgtagtcggcgcggaacgcatgagccgcatagtcgattggtccgaccgctccacctgcgttattttcggagacggtgcgggagccgcggtgctctcccccggagacggctacgaagcctcgacatttcacgttgagggcggagacagcgtgctgcgcgttccgcaggagcccggaatctccccgtttttctccggagacggtgcaaagccctacatccacatgaacggtcaggagaccttccgtttcgcagtcaactcgatgaccgccgatataacgaaggtgcttgatgacgccggacttacgatggacgacatagcgcttgtgatcccgcatcaggcaaattacaggatcataaaatttgccgccgagaaattgggcgttcccgaagagaaattctttgtcaacatcgcggagtacggaaacacgtcctccgcaagcattccgatcgcgctctgcgaggctctgcaaagcggagccgtacacaggggagaccgcgtgatcttctccgcattcggcggagggcttgcctctgccgcctgcatagtaaagctgtaaaatccgccgaaaggcaggaaatatatatttaattccaaggagaaaaaatcatgatactcgaaaaaatcgcatccatgctcgctgaaatctgcgacacccccgccgaggagatcaccgccgaaagcaaatttgccgatctcggaatcgactccctcgacgtcaccgaaatccttatgaagcttgaggacgaattcggcgtgaccctcgagatggatccgtccatcacatccgtaggcgatcttatttccaagatcgaagagcagcagaaataaaagccatgatcaaatcaccgatatgcgaaatgatcgggatcaaatacccgatctttcagggcggcatggcgtggatcgccgatgcgaatctcgccgccgccgtatcaaacggaggcggactcggaataatctccgcaatgaatgcggatgccgaatacctccgcgggcagatcgtgcgcgcccgtgagcttacggatgagccgttcggcgtaaacattatgctgatgagcccgttcgccgacgaggtcgcgcagatcgcggcggaagaaaaggtaaaggtcattacgaccggtgccggaaatccgacaaaatacatgaagctgtggaaggacgcgggaatcaccgttgtcccggtagtggcatcgtgcgctatggcaaaaatggtcgagcgcgcgggagccgacgcggttatcgcggaggggcaggaatccggcggacacatcggagagctttgcaccatggcgatggttccgcaggtcgcggatgccgtttcgattcccgtgcttgccgccggaggaatcgccgacggacgcggagttgcggcatcgttcatgctcggagcagtcggagttcagctcggaacacgtttcctcgtcgcgcgcgaatgcggagtacatcagaattacaaggatgccgtgctcgccgccggggacatatccacggtaacgacgggacgccgcttcggcggaaacacctgccgtcagatcaagaataccttctcgcgcaattttataaaggaagagtattcgcccgaggcgaccgccgaaagcgtcgcaatgctcggtgcgggcgcactgcgccgcgccgccgttgacggcgacgcaaagaacggatcgcttctctgcggtcagatcgcggggcttgtgaacaaggagcagagcgccgccgaaatcatcgaggaaatattctcggaggcggaagagctgctgcgcggaacaaaattcgcggactgagcttctctccgtaaacgtatgtgccgcgaacaatgaaagctgcggcgtaatcgctcgatcgccgatcactcgaatcgccgaaatgcgtgagagcgcgcgcccgaaagaaagatgcgcgaaccgtttgcccgcgggggcttccccgcccgaggctgacgttcggtctacgcttcgcttcatcaagtttgcccgcgggggcttccccgcccgaggagttgttatgggaaaaatatcatttgtgttttccggtcagggcgcgcagttcgccggaatgggtaaagtattctatgagaactgcgaaagagcgcgaaatcttttcaacaaagccgaagaagcacgtcccggaacgatcgcgcagtgcttcgatggcagcgccgacgaactcaaaatgacggaaaacacgcagccctgcctgtatcttgcgtctctcgccgcatcctatgcaatggacgatgcgggaatttccgccgacatgaccgcgggattctcactcggcgagatatcgtcgcttgcgtatgcgggcgcgtacaccgccgaagagggctttcgcatcgtatgccgccgcgccgaactcatggcgcaggccgctgcggaaaatcccgcgtacatggcagccgttgtgaagctcggcgcggaaaagatcgaagaaattgcctcaaagttaagccgcacttatccggtaaactataacagcgcggagcagaccgtgatctccggcgatcccgcggaacgcgacgcattcgccgcggaagtgaaggctgccggcggaaggctgatacctctcgcggtatcgggcggattccattcgccgtttatggcacaggccgccgcccgcttcggggaatttctccgaagcgccgatataaaggctccgtcgatccccgcatactcaaacttcacggcggggctttacggggacgatgtgcgcacgctgcttgaaaaccagatcaatcacccggtgcgctggcagaagaccgttctcgatatggcgcgaaacggcgccgacacattcatcgagctcggtgcgggctcaacgctcgccaagcttatatcgaaaactcttcccgacgcgaaggttttcagcgtatcgggatatgaagatatcgaaaatatcaaagaagctctgtaactgaaaggaaacgccatgcttaaaggaaaagtcgctcttgtcacgggagccgcacgcggaatcggaagagcaatatgcgaaaacttcgccgattgcggcgcggatatcgctttcttctacgcctcaaacgacagcgccgccgaggaatgcaaagcatctgtcgaggcacgcggcgtaaagtgccgcgcctataaatgcgatgtctccgattaccacgcggtcgaagaggctttcaaatcggtcgtcaccgaattcggcacggtcgatattctcgtaaacaacgcgggcatcacacgcgaccgcctcgttctcgcaatgaaggaacaggatttcgacgacgttatcgccgtgaatctgaaaggcgcgttcaacctgataaagcaggtctatcccgtgctcgcgcgcaagaggagcggcaggattatcaacataagctccgttgcggggctctgcggcaatcccggacagctcaactactccgcctcaaaggcagggctcatcgcaatgacgaagaccgtcgcaaaggagcttgccgcacgcggcgtgacctgcaacgcgatagcccccggatttgtcgaaacggacatgaccaaggacatcgcgcagagcgcacctctcgccgatgcgataccgatgaagcggtttgcaaagccggaggagatcgccgcactcgcgtcgtttctcgcctccgacagagccgcgtatatcaccggcgaggtgatccgctgcgacggcggactcgcaatgtaacgtccgccggaaagccgaaggacggtcgaaaaaacattttccgctttgccgccgcccggcgtttttgacggcagaacgtcacccgatcccacagagaaaggaagcttccgtacaacggaagctacggtcatagaaatgaaaagagtagtcgtaaccggactcggaaccatatcccccgtaggtcactcggtcgccgagacatgggcatcgctcatcgccggagtgaacggaatcgcaccgatcacatacttccccaccgacgatataaaatacaagctcgccgcacagatcaaggattacaatcccaccgattttctcgataagatgaccgcgcgcaagaccgatctgttcgttcagtatgcgcttatcgcatccgaggaagcgatgaacgacagcggcatcgcgggcaatgtggcgcccgaaagactcgccgtatactacggatcgggagtcggaggattcaacacgatgtgctccgagcatgaggctctcctctcaggcggaccgcgccgtgtatcgcctcactttatcccaaaaatgataagcaatatcgcagccggaaacattgcaataaagtacggcgctcacgccgactgcgttgcggtatccacggcatgcgcatcgggcacgactgccgtcggcgaggcttaccgcctcatctccggaggatacgccgatgcagcaatctgcggaggctccgaagccgcgataacgccccttaccgttgccggattcggcaactgccaggctctcaccgcgtccgaggacgtgaacgcagcgtccatccccttcgataaaagacgaagcggatttgttctcggagaaggcgccggaactctgattctcgaagaatactcccacgcagtcgcgcgcggagcaaacatatacgccgaagtctgcggctacggttcgacctgcgacgcacaccatgtcaccgcgcccgatccgggtgccgccatgagcgcgaaggcaattgccgacgcgctgaaggatgtcgcatatgagcccgaaaagctctatatcaacgctcacggaactagcactccgctcaacgaccgaaccgagaccgccgcaataaagaaggcgctcggcgaaagcattgccgcaaagatccacatgagctcgaccaagtcgatgacgggtcacatgctcggcgcagcgggcgcacttgaagcgatcgtcgcgatcaaagcgatatgcggcggcatagttcccccgacaatcaactatcttgaaaaggacgaggactgcgacctcgactgcacgccgaacaaagcggtttcgtgcgagatcacgacggcagcctcgacctcgctcggcttcggcggtcacaacgcctgcgtagcgttcaaaaaaatcgactgacaccgcaaattcccgtcggagcatcatcacagccgccccggcaataaaatatcgtctctattcggaaggagattcaccatggacatcaaaaccgtcgcaaagcttgcggaaatcatagacaaatacggtcttacaaagatcgacataacggacacttccgtccgatacctgctcgaaagagaatgcgcttcccccgttcaggcagccgcagcagttccctcaccgactcccgccgctcccgccgacgaaagcgccgcagaggagccccgctccgtaaacggaacggtgcagaaatcctcccttgtcggcacggtgtacctcgctccgcaggaaggacgcgatccgttcgtttccgtcggctccgaggttaagaagggcgataccgtatgcataatcgaatccatgaagatgctcaacgaaattcccgcggagcgtgacggcaggatcaccgccgtccttgtctcgaacgaggaaacggttgagtacggtcagggacttttcgttatcgaataatgcggaggattcaatgaacaaggaagaaatcaaaaagatcctgccacaccgcgacgatatgcttctcatcgacgaagccgagatcgttgacggcaaggctcatgccaaaagaaagatcaccggagaggaatttttccttcgcggtcattttcccggaaatcccgtcgttcccggcgtgatactgtgcgagatactcgcgcagtccacctgcgtgcttctcgccgacacgatggacgacagcgtgaccccgtacttttccgggctgaacaacgtaaaattcaagcatcccgtaaagcccggcgataccgtcgagaccgagtgtgagattacaagagcgaagggcgtgttctatttcgcttccggaaaaggctttgtcgacggaaagctctgcgtgagcgcggatttctcttttgccctggtaaaaaaggactgatcccgccggcgctccgatacaattcccgttttgcctaaggagaataaagtgttcgataaaattttatgtgcaaaccgcggcgagatcgccgtcagagtgattcgtgcctgccgcgaaatggggataaaaaccgtcgcggtatattccgaagccgacaaaaattccctccatgccgccctcgccgacgaatgtgtctgcgtaggaggaccgagcgcctcgtcaagttaccttaatcaggaaaacatcatcagcgctgcgcttgctacaggagcacgcgcgattcatcccggatacggctttctcgcagagaacgcctccttcgcccgtctctgcgaggcgagcgggatcgtgttcatcggtcccgacggtgacaccatcgagaagatgggaaacaaaaacaatgcccgagagctgatgataaaggcgggagtgcccgttatacccggatcgggagctctttccgacgctgcggaagccaaggcttttgccgaaagcatcggatatcccgtgctgataaaagcatcagcgggaggcggcggaaaagggatccgtctcgtcggaagtgaaagcgagcttgaggatgcgttcatcaacgcctcggaggaagcgcgccgtgcgttctccgacggagaggtgtatatggaaaaatacctctcacccgtccgtcacatcgaagtccaggtgctcgccgacgaatacggaaacaccgtcacgctcggagagcgcgactgttccctgcagctcaacaggcagaaggtcatcgaagaaaccccctgccccgtgctttccgaagatacaagacagcgcatgttcgatgccgcgcgcgccgctgtctccgccgccggatacacgaatgccggaacggtcgaatttcttctcgacggtgacgggaacttctacttcatcgaaatgaacacgcggcttcaggtggaacacgctgtttccgaagaggtctcaggaatcgatatcgtcaagtggcagatccgcatagcttcaaagcttccgctctccttcactcaggacgacgttgtcctgcgcggtcactcgattgaatgccgcgtcaacgcgaaatcacaggggcagatcgattttctgcatttgccgagcacgacgagagtccattttgattccgcactcgttcagggagaaaggatatctcccctttacgattcaatgctcggaaagcttgtcgtttacgctccgacgcgcgacgaggctatccgcaaaaccgaagcttcgcttgccgaggttgcgatccagggcgtggaaacaaacatcgacgatctgcataccattattttcgaggatgccttccaatccggggaatacgacacctcatacctcgaaaagctctttaaaaaatgaaacacttcgttttcgcgcatcgcgcgggaacgtcagacataaaacagaaaggcggggatctttcagatgaacaacattatcggaatgttcagaggatcgaaaaactctcttgagagcggcggtatcagcgccgccgacacaacggatgatcttatccgctgtcccgactgcaagtgcttcgaatcgagaaaggcgattgccaaaaataaggcggtatgcgcaaactgcggtcaccacttccgcgtatcggcgcgcaaccgcattgtaatgattgccgaccgtgatacattcaccgagcatgatgcctccgtgacctcatgcgacccgctcgacttcccgggataccgggacaagctcgaacgggcgaaggatgagacgggcgaaaatgaagcggtgataaccggcgaggcgaagatcggcggcgagtgctgcgtcataatctcgatggagccgcgcttcatcatggcaagcatgggatctgcggtcggcgaaaaaatctgccgtgcatttgagtacgcgacggaaaatcaccttcccgtggtcgcgtttaccgcatccggcggcgcgcgcatgcaggagggcatcctctcgctcatgcagatggcaaaggtgagcgccgcggtcggacgccacggggacgcgggaaatctctatataaccgtgcttaccgatccgaccacgggcggagttaccgcaagctttgcaatgctcggcgacatcattcttgccgaacctcgcgcacttgtcggatttgcggggcgccgcgtgattgagcagaccacgaagaaaaagcttccggaggactttcagcgtgcggaatttcttctcgagcatggcttctgcgatgccatcgtggagcgccgcaatatgaaaaagactctcacgtttctcctgcgcgctcactcctataccgaaaaaaacgactctgaaaaggcaaaggaggactgacgatggaaccgtatgaaaaagtaaagcttgcgcgttcgagcgaccgcccgacggtgcgcgaatacatcaacgcccttttcccgaattccgttgagcttcacggagacaggtgcttcggcgacgaaagcgccatggtcggaggaatcggctatctcggcaaaactcccgtcaccttcatcggaatcgacaagggacgcaccaccgaggagcggatcaaaaaccatttcggctctccgggacccgagggatacagaaaagccctccgcctcatgcgtcaggcatcgaaattccgccgtcccgtcatcaccttcgtagataccgcaggagcatactgcggcgaggaagcggagatgcgcgggcagggtcaggcgatcgcgcagaatctcatggagatgatgaagctcgactgccccgtggtcacgctcgtcaccggcgaaggtggatccggcggtgcactcggcatcgcggtatccgacagcctgtacatgcttgaaaatgccgtttattccgtgatctctcccgagggatgcgcggaaatactgttcaaggatgcgaagcggagcgcagacgccgcgaaaacgctgtgcataacggcaggcgacatggtccgcttcggtgtcgccgacggcatcgtcagtgaggatttcgacaacttcccgttcatgtgcaaaaggatatctcttcttctctcaagcgagatcgagcgtctttcggcaaagacggcggaggagctccgatgcgaacggtacgacagattccgcaagatcggcgttttctgcgaaaactgatttctccttactttgcgcgctcacaccgaaatcggtgcgggcgcgcatttttttcgtcctttttgcagataataacaaacagctcccgcagacgcggagagaaaaacgcaaaaaggaagtgccaaaatgtcaagatttactttgccgagagacatataccacggtcccggttccctttcggagatcgcaaagctcaaaggaaaaaaagcattcgtcgtcacagggggcggatcgatgaagcgcttcggattcctcggaaaaacgctcgaattcctgcgtgaagcaggaatggagactcacgttttcgaaggggtcgagcccgacccgtcggtggagaccgtacgccgcggagccgaggaaatgaagatattctgccccgattggatagtggcgatcggcggcggctccccgatcgacgcggcaaaggcgatgtgggcattttatgagcatcccgacatttcatttgaatcgctctgcactccgttcagctttccggagcttcggcaaaaggctcatttctgtgcgatcccgtcaacgtcgggaagtgcgaccgaggtcactgcattttccgtgataaccgattacgaaaagggtatcaaatacccgcttgccgatttcaacatcacgcccgatgttgccgtcgtcgatcccgatatcgcgcaaaccatgccgccgaagcttgccgctcacacgggaatggacgcattcacccacgcggtcgaggcatatgtttcgacccttcactcggaattcaccgatccgctcgcgctccgtgcgatatcactcgtttcggagtatctcatcgattccttcggaggagagcgcaccgcacgcgaaaagatgcattacgcgcagtgtctcgccggaatggcgttttcaaacgcgctgctcggaataactcattccatggcgcacaagaccggagccgccttctccggcggacacatcgtccacggatgcgcgaacgcgatgtatctgccgaaggtaatccgcttcaactccagaacccccgaagcaaagaagcggtatgcggatatcgcgcgcagcctcggactcgccggaagccatgaagaagagctcgtttcatcgctcatcggacgcattgaggagatgaactcacagctttcgatcccatcatgcataaaggattacgaaggcgggatcatctcggaggaggaatttgaagaaaagcttccgtctgtcgcgcgtcttgcggtcgaagatgcctgcacgctctcaaatccgcgaaagatcaatgcaggcgagatggaggagctgcttcgctgctgctactacggcaccgaggtcgatttctgagtccgacggacacgcgcggggcgaatattcgcatacgggcatatgtaacaaatatttcggtttcgagcggcatatttcgcttaaatatgccgctcgtcgctattttttagctgggcatttaaagtaaataaatttatttgaaaatatttttgaaaaactatttacaattatacaatggtgtgttagactgatatcggaaaataaaacctcgaaaggaggagataccgttggtttgctgagcctgccgaaagctgccgcaaggtaaatccgttcggacccggataaaaggaccgcgcatccgccgtctttatccgcagggcggagcgcgttaactttctgtccgtttttccgaaatcagaacacttcggaacgaaaaaaaggaaggacagaaaaatgacaaaaaagtttttttgcggtttttattctcatatgcatactcgtaacgacagtttccgtcacggcaagcgccgacgcaccttaccgtgagcccggctacatcaatcactattcggcatactatataagaaatgccaaaagcgggctctatcttgaccttcaggcaagcggaacgacgaacggaaccaattttcagcaatacacgttcggagatccgtcagaggtatttactcttatctcggtaagcacagatgtatatgccgtaaagagcaccttctacaacgcagaaggaagaagcatggtaatggacggacgttcaaactgcgttgccggcgcacaggtaatactctacaattattcaagcggagcaacggaacaagcgtggagattcacaaaaaacagcgacggaacatactcgctttctcctcagaaaaacccttccctttgcctcgcaattgaaggcggctcgactgcaagccatgccaaagccaagcttgccgcgaaaaacacgagtgacctgagccagcgttggtatttcgagtatgtgcccgatgccaccggtgtgacaagcacgggaatggaatacttcttcataaggaacaagcacagcggactttatcttgatcttcaaagaagctccaccgaaagcggaacccattttcagcagtatcaattcggacagaacggatgcccgtccgaaaagttcacgatatcggaccgcaacggatacgggcttattgaaacgtctctcaaatcacgcatggtcatggacggaaggtcgaactgtgtcgcaggagcgcaagtgatcctctatccgcgtgtaagcgaagcgcccgaacaggattggtatttcaggcgcaatgacgacggtacatactgcatttcaccgaaaaagaatgtatacctgaatctcgcagttgagggttcttcaacatcaaacaatgcaaaggtcaagcttgaagcacgcgcttcttccgacaatcagaagtggtatctcgagcccgtgagtgccgcggattttcagcctaagtatatgttcccggatccggagaacggaataacgccttacagaaacatatcttcaggctataaaacatccgaaagaccgacccattacgaattagacattatcggaaaaaacgccgatatctcctaccaaaagatttactctcccacttcgggaacagttgttttcagcaactataccggcgaagcgggatattacgtcataatagaatccgatatgtgctggcgcggaacgggtaaaaagatcaaatacactttcgggcatcttgcttggaaatccgaattaaaagtcggacagcgtattcttccgtgggactttataggttatgtcggggatacgggggatcccgatcccgtatacggacctcccggatttcaccttcatactgctatattccatgttaagaataatgcccggctctggcccgatggcgacaattgccataatcctcagtttttccattccaacaccgattttgtaggtgacctgtcttcaacgtctccgtaacactgccccccaaaatataacaaaatataaaggagaactcacatgaaaaagattgctgttgtgatttttgcggcgcttcttacagcctccgttttcgcgggatgcgataaaaaagacacgcctcccaaggagacccggagtgcagtacataccgacgctgcgccttctgaagtaacgaccgaagcccctgccgtaacgaccgaagctccgaccgcgaacataggaatcggaggttcgcgccctaactacttcaccaaagaatatcatttcgtctacaccagtattcccggagagctgatagatcaggtcggcgatgacaattttcagaaatggcttgaagaggatcttaactacaatccgggtgctgtaggcaaaatcgactcaaagcctctttatatatacgatttcataaagcacttcaacatttccaaagaagatttcatcgccgcagacaaagtcgcaggcggcaaataccgccaattcaccgacggaatgatcgatgcgctttattccgacgatcagagcgagatcaacagatacttcgtcagccccttctctttccttgtcggcaacacgatctatactcccgaatggatctgcaatcacagccatgaggaagtaaacgccgtcggaatatccgatcaggcaattgcagacaagatgggtatgtggaaagcggactttaccgccgagcagttcgaacagttaaaggaattctgcgaatccaactcaatcagctacactctcgatgtcgatgaaaataccctcggcgatcccgttgatccgaacacctcgagaataacgccgcctgcaatcggaaccgataccgcaccttccgaaaataccgaatcataagctcgcaagataaaaaatcccgtgccgtgcacaggatttttcttttgagatatcatattataatttcgtcaaggctgcgcttcggcacgaaatgaacattcgcgctgttgcggaaatacttcgtgtttccgtcctgcgcctcgcagaggattacggtctccgcctttttgccgagcgcgatcagcaggcgaggaagcacgttctccgaaagaccgagaagcgacgcgcacttttcgggggaaaacgatcctatcatgcacgcgccgtatccggcttccgcagcggcaagcgtcacggactgcgcggcgatcccgacatccattgcggagaaatcgttcatgctttcgcttacgttcttatcatggcatatcacgataaacgcagtcggatgaccgccgtcgggcggaagctttctgtcggtgatatcccccgcccagcgggtaagcgcgagcagcgcttccgtctcgtccttttcaagcacgagacggaatttaagagtctgcgcgtttcgcgctgacgcgctcagccttgcgcagtcaacgaacgatgcgagagtctcacggtcaaagcgcacgctttcgtcaaaggtgcggatactgcggttctctatgataagctctttcaggtcaatcggcatcattttacatcgattatcgactcatcccagatatcgggagcgcggtatccgaggaagttgaccgcggtcgccgcgacatcggaaagtccgaatgcacctttctttacggtataattcttatcagtggagttatcgtagatcacgaacggaacggggttgagcgtatggctcgtctttgccttgaagccgtgctcgcccttcttcggctcgccggtcttcttatcgatctcgtacatctcgtcggcgttgccgtgatctgcggttatgagcgcaactccgccgagcttatcgataacggtgaggatgcgtgcaagctgcaggtcaagcgcttccatcgagcagcgcgttgcaagatagtttccggtgtgtccgaccatgtcgccgttcgggaagttg

SEQ ID NO: 479 - DNA, 9119 bp, Unknown
  16S sequences of unknown bacteria
tcggttctggcgtcaaaggaaacaaactcgtttaacagctggtgcttttgccgtgtggacgctttgaccgcggagataacctgcctttgcacgcacagcttggcaaagctgccaaatgcgcctttggcaggatcaaaatcctgtatggcgcgaaacaagccaatcatgccttcctgcaccaggtcctcggcgtcggccccgggcagataatagctggccgcctgtgcgcgcaccagcggtttgtaccgctccaataagcactcctgcgcccaggcctcttccttggcccgggccgccagcgcctcgtctgaaattgcggtgtcgcgtttttccgtcattgcgtttcctttcccgttttcggtacgcggatgcgctctaacgcctccagcgtttccccgtctaaatgatgaaacagatagcccttctgcctggtcttttcctgcatttgcctgcgctgccttttggcctggcgcagcgtctgaatcaattccttggcgctcatgcgcagcgcgcccagacccaaaatcatatgctgctccatcccatcgcctgtggccacgcgcaccgtgcaccgctcccggctgagcagcgcgcattgtctttctatatattgatccgccgtctcctctgcctgggtatacaccacccgcacaccgctgaccatggtttcgctgcccttattgtttttcacatggtgcccatcgtataccaatacgatctcgatattggtaaagccggaaaaatcggccagctcgtcggccaggcggtcgcgtgcatggtcgatggacagcccttctttgttttcttcggcgcccaggatattatacccatcgacaaaccagatttccctcatggccgttacccgttgcgctggcgcagcacctcatagatcagcaccgacgccgcacaggatgcgttgagcgattccgttcggccctttagcgggatacccaccataaaatcgcacttttgctctgtcaagtgcgccaggccttcgccctcgcttccgatgcagagcgccagcgcgcctttgaggttggcccggttgcagtccggcgcgccggccgccgtgcctgccacccataggccgtattccttgagctgatccaacgtggcggccaggtttgtcacccgtgccacgccgatgtgcgccgccgccccgctggaagcgcggaacgccgttgcagacaatccagcgctgcgccgtttgggaatgatgacgccatgtacgcccagcgcctctgcgctgcgcaaaatcgcccccaaattgtgcggatctgtgatgccgtccagcacgatgacaaacgggtcctccccgcgctgggccgccacgcgcagaatatcctccacctctacataggcggcggcagacaactgcaccacaatgccctggtggttgggggttctcccttcctcctttgggcagaggtagctcatgcgcttttcgtctacctccaaaatcggtacattgagcgacttgagctggccgatcaacggcagcacagccccctgcgccctacaggtataggccctttcaatgggcatgcccgccctgagcgcctccttcacgggattgacgccataaatgatctctactgtttcttgctcgtgcattgcagtgcctcccggtaagcgcgtacttgttcggcttgtccacagctcattttgccttccgggcatttgccgcgaatgcagcccggcccgctgtttttgaaaagcgtgggcgctgccttctctgccaaacgcagcatttcccatgccagcgcgcggatctcccactgcgcgcggttacagcagcgcagcgagaaaaagtgcatcagctcgcgtgcgttcatcgtgataaccatgcgcgtttcgcaggcattgggcaatacgaagcgggcgtcctcgttgcttttttctcccttggcacccagcttggcctgccactggttataccatttctgcatggtctccatctgccggtcgtactcggctacggcttccggccccaacgcctcgatagagggcggcaggatatacggaaagctgcccatttggttggcctgggaaacatagcgctggctctgtacggaaaagctggcgatgcggtgccgggtaatctgcgccaaaagcgcccgcgatacgccctccaccgcaaaggtaaagctggcatgctcgatgggggatagatgccccatatccacaatgcgctgcaaatatttactctggtctttttccgccacgccgcggatcagatcttccacgccggcggaggaatagcacatcctagcgcccgtagccactacctcgtccgggtgcggcgtatggcttagcaattccaccttaaggcttgtcctgctcatcgttccaattcctcccatgtcatttggctggccatcgccaagacagcttccagcctgtctgtttgttctgttaagtataaatatccaagcaccgcctcaaagccggtggacgcgcggtaatcccccacatccgcgtgctttggtacggtggcgttgtgcatgttgcggccgcggcggaataccccccgctcctcttcggtaagcctgtccatcagggcggcggcggtaaacgcctgcgccccggcccgcaccaggcgggtggccatgatatgcaggtcgtgcgtggtacgccccggatggcggcctatcagcgactgccgcacatacatctcataaatcgcatcccccatatacgccaaggtcaaaggggaaagctgtcttgcctgttcgtttgtcaatgtgatctccttatggtgttgtcccggcgatgggcagcgtttggcaaacgccctcggcaatggccaaggccaaggcctgctggccttcttcgctgcgcaaaatgccttcctcccggctgttggaaagaaacccgcactccacgatgagaatcggcatctctccgcttttcaaaatatatttatcggtctggggcacagcatctcgcatcttttcgcttttcaatgcgccgttcaagcgttcctgcacggcctgtgcgatacgctgtccctcttcgctttccttataatatagcaccatcgcgccgttggcgctgcggttcgggttgctgttttggtggatgctcagcaccagatccgccccgctctgcccgatcatgtcgcgccgcgcttgcatatccgcttttttcgtatgcgccagcgccttatcctcttcccgcgtcatgagcacgcgatacccgcgctgctccagctctgctttgagcagcttggcaatggccaggttgatttcgcattcctctaccttggtatccatgccgatggcaccggggtcaaacccgccgtggcccgggtcgatgactacaagcggcgcagtatacacccgcgcctgcaccgccaggctgcgtaccgtcgctgtgccagtgatggccagcagtaggcccaagcagaaaagcatccctattttttttcgtttcatcattcactcccccttgcggaaaatccgttgacgatttgcatgctaccgtcccatctgctccgctagaaaagagaggcgaattgtgtaagatttttgtaatttttggataatggcccgtatatacagcatgttatgcacagtttccacagggttatccacagttttatgccttctgaacagctttttatcgtagttttccacaattttgcctgtgaataaattttttcgttctattcaatggcaacctgattttgaaggcatgcactatgatgtaaataatataaaaatcaatatttacatctgtttttcaatcgttttcctccaatatggcaatgttaacgatgggtcggcattcagtgtgccgtcgcttcgttctccctgggccagccttcgcctggcggcctcggcaatcatcaccgcattgtccgtacagaatcccttttccggcagatacaccgcaatattatcggcgttgcagcgttgctgtgcctctgtacgcagcgcgccgttggcgcaaacgccgcccgccatactcagggtatgaacgcccagcattttgcatgcctggattgcgtttgtcaacagaaaatcaatggccgcggcctggaaagaggccgccatatctgcctttttcacgcgctctcctctctgctctgcgcggtgcagcgtgttgatcacagcggttttcaggccggaaaagctgaaatccagcgggttttcgcaacggggcctcgtaaagggataggctttggggtccccctctgccgccagcttttcgatcatagggccgccgggatacgccagccccagcgcacgggcggccttgtcaaacgcctcgcccgctgcatcgtcacgcgtttcccccagcagatgatactgcccaaaccgctccacatacagcagcatggtatgcccgccggacgccaataagcatacatacggcggcgttagctgcggatagcttacatggttggccatcaaatggccctccatgtggttcacacccaaaagtggcttgcccagcgcataggacagccccttggcatagttgacaccacacagcagcgcgccggaaagccccgggccataggtacaggcaaaataatcgatctcctgcagggtacagcccgcttgctctaccgcctgggccaccaccgccggcagcgcctctacatgctgccggctggcaatttccggcactacgccgccatacagcgcatgcgtttgaatctgcgaagcgatgatattgctgtatactcggccgtccatgcccatcacgcaggccgctgtttcatcgcaggaggattcaatggccaacaatcgctgcatctgtctgctcctttcttcttgcccggcgcttggccacagaaaggcccaggcccgccaaagcaaaccaaataatcatcaccacggcaaaccaaatcaagatcttcgttacaatggcggagaaaaaggcctccggtaccatctggatcagcacgcttgtcgcgggattcagcagccacaggtcgtttgtaaaaaacacatggtggaattgcgtccaaaaccagttgaaatccaccaccgccaatacaccgcacagaatagggatcagcaatccgatgcccagcccccacatcagctttttcatggcgtccgccagcgggaggcgtagcgcaaacgccgccaccaagcacagcatagaagcaatggccaagccgttgcgcaccgaaatcatcaacaaaaacagggcctgtacatccaccatatgcgccacttctgtctcatcggtaaacatctgcatccgcacgccgtcgcgctctactaccagcgaaagatcatcccgcttgcccgcgcagtaatccagcagcacatcggtagcgcgcatcagatcttcctctgaaatgccgatgcgctgcgccgtgcctagcttttgatattgatatcgatagaaccttttatcaaaagcggcggtatcaatgctggtcaaaagcgtggccagcgttacaaaaacgccggccaacaccatgagaatccttgccaaagtctttcttttcatctgtattccttaatatctttgtatcgttttataaaagggcagcttttccatgtggcaagcaaggcgctctgtgccggattccacggcaaaatcatgctccttttcctccaaaaagctgcggtttaccagcgccatcgccacctgctgctgcacatacggcgcccagcccgcgcttgccaacaaattccccctgcagcgggcgcacaaactgccccagccccgcttcaaagggcgtaacctcctccgttagctcctgcccgtatacaggcacaccggcctccaggcaaagcgaagcccaggcatccgtgccacagggaatgggctcatcctcgtcgctggcgtctagaatttcccgccacagctgggcggcgtgggaagcgctgcaaaagatctcatacgcctgctcgccggaaaacccgatggaggcgataaagcacatccggcccacgattttggtttcatggcagcggtacggccgctctggcaggtgcttgcaaatgctggaaaggatgcgcttgctatgcgggccttggatattgatctgcgcagttttctccgtcacatccagcaccttggcccccggcagcccatgcgccttcaaatgcgccaaaatcttggtacggttttcgggatggatggtcatgccaaaggtcttctcatcccacttataaatgataacgtcatccatgatcccgcccttgtcattgcacacgagggtgtattcacagtccccctccgccatttcggaaacgtcgttggtggtgatgcgctgcacgcacaccgctgcattgggccccaaaatcaaaacgcgggttaggtagctgcgatcaaacaagccggatttctcccgcacactgcgatgctcgtcctctacccccaaatattggtttggcagggcatagcccttataattggccatttggccgcccattgccatgtgttcttggtataacggcgtatgcttcatccctgcactcctctcatgcccatgcgcattcttgctatgatgaatttattatactgtatcggcatttaattgacaaatatgcgtgttttctacgtctatgcctccaatctgcaaaaaaagaagaacgcgtgcgttcttcttttccctttttatgcttttttcaccacagggccctgcggcgtatcctccagcagatagccccggctttggatctcgtccctgagtttgtctgcaacgtcccactgtttttccttccgggcctgttggcgctgggccgccatgtctaaaatctcctgcggcaccgcttcctcggcctgcacccgaagccccaacacctccagcagcctttgcagcagcgccagcaccttttgcgcgccttcgctgctgccctgcttggcgtacaccgtattggcctctcggatcaagtcaaacacagcggaaagcgcatcagcggtgttgaggtcgtcatccatcgcctcgcagaacctggcttcatatccgtccaggatgtgcaggagcgcctcttccccttcgcccagcgcagtctggtgctggccggccacacgccccagcagctctacggcattttcgatgcgccgcagcgcgctggtggcctgctcgatgagctcccggctaaagttgatggggctgcggtaatgcgcgctcagcataaacaggcgcaccgccatcagatcaaattccttggcaatatcccgcacggtaaaaaagttgccggcggatttgctcatcttctgattgttgatgttgatgtgcccattgtgcatccagtacttggcaaacggctttcccgttgcgccctcgctctgtgcaatctcgttttcatggtgtgggaataccaaatccaccccgccgcagtggatatccagcgtatcgcccaaatacttcatgctcatggcgctgcattccacatgccaacccgggcgccccatgccccacgggctgggccaggcaggctcgccgggcttttgcgccttccaaagggcaaaatccagtgcatcgcgcttaatctcggatacgtctacccgcgcgccggactccaattcgtctacatcatagccagatagcttgccataatccttcatcgaacgcgtggcaaagtatacgtcgccgtgcgattcatacgcgtgcccattttggatcagcgtttcgatcagatggatgatctcttcaatgttctcggtggcgcgcggcgcaatatccgcccgctttacgcccaaggcgtccgcgtccttatagtattctgcaatatagcggtctgccagctcgcggacggttacgccctcctcgttggcctttttgatcatcttatcgtcaatgtccgtaaaattctgtacgaacgtcaccttatacccgcgatattccagatagcggcgcagcgtatcaaaaatgatgaacggccgggcgttgcctacgtgaaaaaaattatacaccgtaggcccgcaggaatagatcctgacttcccccgggtgcaccggcaccagctcttccttttttcttgtcatggtattaaatattttcatgttgagcctccctcatcaatattgtaaccgccttttccaaaatgtctaccttatcgcgcaattcctgcagttcctgctctacagggtccggcatatggatctggtccaaatcagatgcctcgatggccaggttgcaggtttcgcactcttcgcacggctccccagtcagattcttcgggcaatagcggcgcacgatgcgccccggcacgcccaccactgtgcagtacggcggcacctcgttgagcaccacggcgcccgcgccaatgcgcgagcccttgcccacacgaaacggccccagcaccttggcgccgctggaaatgacgacatcgtcctccacggttggatgccgcttgccagtatccttgcccgtgccacccagcgtggcgccctggtaaatggtcacgttgttgcccacctccgccgtctgcccgatgacaacgcccatgccatggtcaatgaatacgccgcggcccagctttgctccggggtggatctctataccggtgaaaaaccgtaccagcgtagacacaaaccgccccagccctttcatgtggtgcgtatacagccaatgtgcgcggcgatgccagcgcaccgcgtgaaagccgggatagtttaagacgatctccagcgcgttgcgcgcggcagggtcgcgctgttttaccgcctttatatcttccctccatgtcttgaaaaacatgcctgatgcccccttaaaaaagaaaacaaaagcgccgcctcctctcaggagacgacgcttaccagtcgtggttccactccaattccgcaacggctataaaagcccttgcgcttttcccatccttaacgcggacgatacggcacacaccgtagcatgtgcagctcacgcagcgcatcttcgcgcccctttccacccaagcgggctttcagcctatggccctgctctctctgtacggcttttgaaaacggcctacttttctgcggtcatcacttttttcaaacgcttttcatttattatagcgatgggcaaaccgtgctgtcaatcccccgccaaacggggggaaacgccggttttccctggcctacaataaaatcatacacgaaacagcgcgcaaatgtgatacactaacccaaggaaaacacgaaattgaggaaggaac

SEQ ID NO: 480 - DNA, 32759 bp, Unknown
  16S sequences of unknown bacteria
tcttattcgtgtgaattagattcacaatcagctttttgttatgttgcttcataaatacgatatatattgttaccacatattttagtacgattttatacacttacacattgtattttctattagaaatatgggagatatcttatatagcatagttatttgatatcactgaaataatcatagctttaggtttatggcacaataaatgttactgtctgtaaaagtgataatataacttttttcgaaatagaatattgaaattgtgatgattgatataaaaggtcgtaaaatgtgttcttttggtaattttacttttaaaactataaaaagtttggtatactaagtaaaatgattggaaaggtatgaacggtatgttgaaaaacaaaacagtcttgctttgcatttcgggaggaattgctgcttataaaatggcacacgttgcaagtgcgctaaaaaagcagcactgtaatgtacatgtcattatgaccgaaaacgcaaccaattttattactcctattacgtttgaggaactaacagggaataaatgtgtagttcatactttcgatagaaattttcagcataatgtggagcatgtggcattggcgaaacaggcggatgtctgcttgattgctccagcaaccgccaatgtaattgcaaaattggcacatggaattgcagacgatatgttaaccactacagttttggcatgcagatgccctaaaattgtggctcctgctatgaatacggctatgtttgaaaatccgattacacaagataatatagaaacattgcagtcttacggttttaccgtcattcctcctgccgaaggatatttagcctgcggagatgttggagccggtaaattaccggaaccggatgttctattggaatatatttatcaagaaattgcctttcagaaagatatgaaaggacttcgtgtgctggtgacagcaggccctacgcaggaagccattgacccggtacgatatattactaatcattctacaggaaaaatggggtacgccattgccaaagttgctgcacgtcgaggtgcacatgtaactctggtaacaggaaaaacacatttacagcctcctatgtttgtagatgttgttcctgttattagtgcggatgacatgtttcaagcagtggtcagccgccatttagagcaggatattatcattaaggctgcagcagttgctgactataagcctgcgacatgtcataaacaaaaagtaaaaaagagtacggaagatatgacgctttctttaacacgtacgcaggatattttggcatatttgggttctcatcgaaaagaaggacaatttttgtgcggcttttctatggaaacggaacgtatgctggagtatgcacatggaaaattggaaagaaaattaattgatatgattgtagccaataatgtgacagaggcaggtgccggatttggaacggcaaccaatattgtaacattagtcaccaaagcagaagaacaggctttacctttacaaagcaaagaagaagttgcagccaacttattggatgcgattatgaaggcaagagcataagatttcgtaaaataaaaatgatgtagcaataagaagccctttccctttgatacagtattccgtatcgtgggaaagggctttgttatttcaacagagtgtttgggtaactccgatgaaagcgttataagatattttgtatatagggtagttctgcttcatttaaatgttgaaccatctcaataatacggttacattctgcctgaatatccgcttcttctcctaattctataaaagccggtaacgctgctaaggagcggtcaatttcttccaactgcatatgagacatgaatgtacacaacaccgcatggtgattttgccatttttcttctgcctgtctgctgagtgtaagcgctgtatctttatcatcttgcagagaagtatcggcaatttgttcaatatcttgtgtgatagaattcgtaatggattgggtggaaatgactgctaaagtacatattgtaattaagactgccagtagtcctgcagcggcccaaagtctgttcatacaacggatcctttcgctttttcgatgattttatattcgccgcttcgatttgcagtcataataaaaacatcttgtaactcatagtgttcctgctttaaaatttgatatacccattgtgtatctttttcacataattttaaagaaaaatcagatatttcaccatcactgataatgacggtttcaattcctttatccggaacatgtaattgcagcatttctgcagataccgtgtctttttcaggttttttaattacactgatttttccgtttgtttccataatggcatatgcgacatcctgtaaggaaaaaacatctttttgccgtaattgttcaaataaatcttcaatggtaatgcgtaatctgcgcatttgtttttggtcaactttgccatcattaatcaagataatggggctgccgcatacagcttttcggaatccggaatgttttaccattaatgccgatacaacaatttctgcaatcaccaaaacggcaattggcacaataccgcttaccaaaggctgtgcagtatcttgcattggaatggcggctatgtcagaaatgagcaatgttacaactaattcagatgtttgtaattcactgatttgacgttttcccataatgcgaattgcaagtataataaaggtatataataaagctgcacgaataatggaaataatcacaatctatcacccaatttctcatttaatgttaagtatgatacgctttggtattttttatacaataaacctgctgtatacggttatttttccttttcttaagaaacattttagttttatgtttgcataattcacaagttggataaaaaagagcaattgcaaagtgacaagttgcttttgcaaaatagcagttggtttagttttggatttgcttctggtaaaatttatataagtgaatagccagaatatgggggaaattgagatggaaatatcctatgccgaactgcatagaaaattaggaattaatgtagcgtattatagaaaattaaaaggattaacccaaatagaattagccgaaatgatacaaaaaagccgtacatacgttagccagcttgaggcccctcaaatgacggttaatatgacaatagatgtgttattcaaaatagcagaggttcttgaggtacatcctgcaagactgttggagtgaacttgtacataagagaggcggaatgatgcgatgaaaatctacaaaaatacagaagatttatctttgggagagagaataaaatatttaagaaaagaaaacaacttgttgcaggaagatgttactgctgctctcggagtttgccgttctacttgttcccattatgaacgtggattttctataccaagcatttccaaatctatgaaactggctgaggtgtttcaaaccagtatcagctatttattaacagggaaaccagataaaaatattgataaagacaaaaaagaatagataaaaagagcaagctgaaaggtttgctcttttttatttataaaatgaaaaagttgaataaaattggcaaattcagtgaaaagtataaagtaaacacttggaaaacagaatggaggaaacaaattgagcaggcaagagaaacagcaagataatgttccgcaaaaaatttcctcttccctattggaaaacttagtttacttgcgcaaacaatttgacggaagcatggattttatcatccgtcagtttaatattgaagggaccaaagcggcattaattaccattgataatttaattgataaacaaaccattgccgaaagtatcttaaatccaatccgaagagccgaattgagtcatttaaacggaatggaaaagatgaaagaaattcgagataacatactgacaaccgtagatcaagagcaaatggtggaatttgatacgttactgaccaaattaatgagcggctttgcaatgctggcaatagacggatgcgattttatgctttctatcggcgtacaaagttttgcttacaggagtattagtgaacccagcaacgaagtagtacagaggggttccagagaaagttttgtggaaccgtatgtgattaatatttctatgatacgccgccgtatgaaaacaccaaaattaaaattcgagcgtatgcagattcaatcagagagtaaaacagatgtttgtttgtgctacttaagagataaggtatctcctcaaatattaaaacagttaaaaaataatatcagcaaaatcaaattggaaaccgtaatggcatcaggatatattgcaccgttcattgaacgcagaggattatttaacggagtaggagtatctgaacgaccggatactgtgtgcggaaaaatcagcgaaggaagaattgccattattgttgacggtacgccgaatgtattgattgtaccgcatttgtttattgaaaattttcaaacgttcgatgattatgcaactcgtcctttttttgcaacttttacgcgttggctgaaagtatttgcgtttttcctgtctatttttctgccgggattttatgttgccagcggaacgtttcatcctgagtttttacctcaggttttattaacaaaagtagtgcaagctcaggctgagacaccattttctcttatgattgaatgtattatgattcacattatatatgagattttaagagaagccggtctaagagtaccaaaacctttgggacatgcagtcagcattgtaggcggtttggtcattggagaagctgccgtacaatccggtttggtaggtcctccaacattaatggttattgcgctaacggcaatttcttcttatgtagttccaagtctgtatgaacaaaccgctattttacgtttaatatttatcatcattggaggaactctgggattttggggaattacattaggtttctgtgcaattttaatcagcttatgttcagaaagtatttacaagattccgttttctgctccgctttctccatttaatttgaaaagtatgcgggatgttgcaatacgtgccagctggaaaatacttcgtaaagatgtagaaaaaatacaaaatatgccgggttccaatgtaaaaaagaaatgaggcgtttttcatgagcagaaaatgtttaatcagcgcaggccagttatttagtctactgctggtcagcagcttaattataatggtaactaccaatagcacatggacaggcggaggcgattttcttgacaatatcatttcatgtgcaattgcgtttgcagtaaactttattgcagttattccgctgggattgctataccgcagaaaacctaccatgaacattttggatcatggttatcatttaaccggttggtttggtgcagtaatcgcattattttatggtttatactttattaccattgattgttattatttatctgtatttcaggtatttaatgcaaatatgattgaacctgaaatgccgtcttggttaatcgttattgctgtattggttgtggcagtatatgcagcttggaaaggtgtggaatctatttccagaacttccgtttttatattggtcatgctgctcataggttttctttttattttggttacttctattccgcaagtaaaatcagaaaattttaaaccgctgttatataacggttgggaccaaaccatacaaagtaccatgttgtttctgggcagaagtacaggtcttgctacattagccattttattacctgcgacaaaaggaaacaaaaaaattggttttaccgtttggaacgtagttacttatttgcttatgagtataattatggtgattatggttggcgttcttggtaatgcaatacaaacacaaatgtttccaatttatactctggcggcgatatcaggtattggtccgtttcagcgtatggattctatttttttaggtatttggctgatgggggtctttatcaaaatagccattgatttatatttgttcggcagttgtatgcagcgtgtatttcatatcaaacgtggtggattttttatcatagggggtgcaattgcggttggtctcatatctgtactcattacaaaatcagttgcactgcagcatttgtttttcgatgtatatttattggcaccgctgactttgtttgcatcttttgtaataccgctgattctattattaatagatactatcaaatgcaaaaataaaacgattcgacgtatggaagagacgttggaggtgcaacatgaaaacagcgcgttggattaaatatatacttgcggcactactggcagtcagttgttttgtttctatgaccgcttgttcgtttggaagtgatatcagtaaaaagatgatgatacagggaattggaattgacaaagaagaggaagggtatttagtttctgttcattatttgcgttcggatgaagaagttaaaatggattttatacaatctcaaggtactaccgtatacgaagcattacaaaatttaacgctgcaaacaggactgatacccacatattctcacaatgccatggtagtattcagcaaacaatgtgcacaggaaggtcttaccgatgtttttgacttttttattcgctatcatgaaacaagaccgacagtagatttatttgtagctcaagatagagcagagacattgtttcaactgcaaagtgaaggtcaatatgtgttggctacacaggcaaaatcttttgcagaggcagacagtgccaccaataaatttgcaggttctactgtgttggatgttgccaatcgcatggcgtcagaatataacgcgtttgcattgcccgaattaacccttatagatgaacatgtgcaattgggccgtacagtgtattttcaagataatcaattaatcggatatttcaacagagagcaaagcagaggatatttagctgctgtgtataccatccgaaacggggtaatggttttggatattccggacattggtacaatcagtttaaagctggagaatacgagcaacaaaataacggcagatattgtggatgatgtaccacatttccaaatagaggtatcctgtaaagcatatatatcagaaatcaatcaagatttaagaaaaaaattgtcactggatgtttatgaaaaatttgaaacagctttgaatgaaaagctaaaattgcaaatagagagtgctgttgaacaagcagtcatcagagatagtactgatatttttaattttgatgtagcattacagcagcaacaaacagagtattggaaagtacatcgagattcttgggcacaagaacttgcaaaaataaaatacacggtcaacgtaacatcatccgttgaccgtgtacagcaagaagctagtcctgcattttagctttctctttcttcttattatgttttggtgcttcttcctctgcaagttcgcttagaatacgttctgccgcagtacgccttgcgttggcttctatggaaagctctaaggcaagttttgtcagtgcgtcttttccttgctcagctgtttggttaacacggctgcaaatgtcttccaaaacctttgcttgcgagatgcgaaattgatcataaagttctgtttttgaagtatgttcggttaaagattttaataattgagaaatatcttgaatggacaaaacttgctttaacatgcatatcatagtcagcatggcaagatgttctttcgagtattttttttgttcgggacgttccaatacattgtctttcacgtagttgttaatcatgctggaagtaagcaagcgagtattttcatttctttcaaataactttagctgcttatccatataagtgattacttgatccatatataaataaatttccggcattttatcccatgcaatcgcttcaaattttccagtttcttctgcccatttttgaatttggtcaatggcttgttccaaaattttatacgctcctttcacaatggagatagaacactgtatcataatatcatctatattctttattttttattatagcatagaaaaagttgcaaagcaatttttaacctataaacgctaaaacgttctcatagcagccaaaattttaattttgctgctggtataaaaagaaataattgtatatatgctgttaaagcgaaagagataccgtaagaatatattttttgtgactttttcacttataaatttgctattattttaaaaatgatgtacaatatacagatatacaacgttttgtatttacaatttatatttcttggcggtgaatccatgagtaatcaaattaagcaagaatgcgtgtctttaagaaaacaactaatggagaaagaattttccaaaatgaatgcaatgcagcgtgaagctgtttttcaagtaaacggacctttgctcattttagcaggtgccggaagtggaaaaacaactgtgcttgtcaacagaattgccaatctgattcggtacgggaatgcttatcaaagccaagaggtttctgatgcgattgatgaacaagatatcaatgaaatgaaagcatgtttggaaaataatcaactgctttcagatgataccagaagaaaactttccgtgcaggcttgtaaaccatggcagattcttgccattacatttaccaataaagcagctgctgaattgaaaactcgtcttgtaacgatgttaggtgaggatggaaatgatatttgggcatctacattccactccatgtgcgcacgcattctgcgcagagacggagagcgtttgggatatacaaatcgctttaccatttatgatacagacgattcccgccgtttaatgaaagattgttgtaaggcattaaatattgaagagaaaattttgccggcaaaagcaattttatctgaaatttcaagagcaaaagatcaaatgatagatgccaatgaatatttgcgcagagcaggaaccgatacacgtaaaggtaccattggcaaagcatatcaaatgtaccaagagcgcctgaaagctgctgatgctatggattttgacgatatgatttgcaaaacagtagaattgcttcaaaaaaattcggatgttttagaatattaccacaataaattccgttattttatggtggatgaatatcaagatactaaccaggcacagtacctgctgattgatttactggccagacacagcggaaatctttgtgtagttggtgatgatgaccagagcatttataaattccgtggcgctaccattgaaaatattatgagttttgaagaatcttatccaaatgcaaaagtcattcggttagaacaaaactatcgttccacaaaaaatattttgaatgcagccaatgcagtgatatcaaataacatggaacgtaaaggaaaaactttgtggaccgataatgaagagggaaagaaaattaccatacatacttcctgtacagaacaggaagaagcggaatatatggcaaaacgtattttggaagaagtggcgcaaggaagaaccttttcagattttgcagtattgtaccgtatgaacacacaatcgaatatcattgaaaaattatttgtaaaatcgggcataccatatcgcatgattggtggccatcgcttctatgagcgcaaagaaattaaagatatgatggcatatttgcaggtagttaacaatcctgccgatgaaattcgtctcagaagaatcatcaatcagcctaagcgttctattggagataaaactttggcagtagcaacggaaattgcacaaggcattggcgaaacattatttgaggttatcagccatgccgatgagtttgaagccttaaaacgcacttcgcctaagttgttgaattttgctcaaattattcaggaattaatgaaagctgcggaagatgaaaccgtttcgttagcagatttatatgagcttattttagaaaaaacaagttacattgaatacttgaaaaccgaatatgaagatgcacaagacagaattgataatatccgtgagcttgcttccaatatcattcaatatgaagaagagaattttgaggatgcaagtttatccggatttttagaagaagtgtctttaatgacagatattgataattatgatgataaagcagattctgttgttatgatgacaatgcattctgcaaagggcttggaatttcctgtagtatttcttcccggttttgaagaaggtattttcccgggattacaatccatttataacccttatgaaatagaagaagagcgcagactggcttatgttgcaattacacgtgcggaagaagaagtggcactgctcaatgcagaaagccgtatgctgtttggttctacaaccagaaataaagcttctcgctttttatcggaaattccggaagaattggtagaacgctctcgttcccgttcatggcaaaaaccgacaccgggcacaagcttaccaacttctgcatatgaagctagggaagttaccaccaattctgccagaaattttggtcctgtcaatttgccaaaagcaaaatcatccggtgaaaaattggcagtgggcgataaggtaaaacatcttacatttggccaaggtgaaattatatctgctacgcctatgggaaacgatactttacttgaaattatgtttgaaactgtcggcagtaaaaagattatgcagaattttgcacgtttgaagaagttgtcttagtgattctatataaaaatcgcagtatgccttgatgtatattgcgattttttttatcatttttgattgctttttacacaatattatgaattttgtaaaatttgtattgattattagaattttcaatattgaatttatatgtaaaatcatgtacaataacattattgatttggcactgtaaagtttttttcacctaaaactttacagtgctaaagtgaaattgaattttgggggagaaaaatcatgaaattttcaggcgtaaagaaaatttctgcagccgcgattgcagctatgatgctggtagccggtatgacagcatgcggcagcagtgattccaccggtaccgctgacagcggtgccacaacaggcacagatgttaagaaaattggtattattcaattggtagaacatgactcattggatttggcaagagaaggctttattgacggtttggcagaagccggctatgtagatggtcaaaatattaaaattgattacaaaaatgcacaaggcgatattccaaactgtacaaccatcgccggccaatttgcaaatgataataaagatttggtattggcagttgccacccaagcagcacaagctatggcaagcaaaacaaaggacacacctatcttggttaccgctgtaactgaccctgcagattctggtttggttgaaagcaatgaagctcctggcggtaatgttacaggtacatcagatttaacacctgtaaaggaacaaatggaattgttaactcagctttgtccggatgccaaaaaagttgctttactatattgcaccagtgaagcaaactcaaaatatcaaattgatttggcaaaagaagaagcagccaaatatggtattgaagcaatagaaaaaactgtttccgatgcaaatgatgtgcaatctgttgtacaatctttggtaggtcaagtagatgcgatttatgtacctactgataatgtaattgcttctaacatgactttagtagcacaaattgcaacagcaaataagattcctttgttcgttggagagaataacagcgttgaaaatggcggtttggcaacatacagcgtagattattatgagcttggtaaattaaccgcaaaacaagctgttagaattttggaagatggagaaagtccggctaacatgccaattgaatatttgagtgaaaataaactatatatcaatatggatttggcaaaacaactgggcattgaaattcctgcagatttagcggaaaaagcaattgacgtaaaagtctaatcgacttttacgtattcgggaggtaactatgggaacattgttggcactggaaggtgctgtagcccaaggattattatatgcaattatgacccttggcgtttatattacatataaactgctggactttgctgaccttacagtagacggcagctttgcacttggcggctgtgttagtgcaattttaattacagtagggttggatccgtttacaagcttattaattgcaacccttgcaggtatggcgtccggtgtaataacaggattctttaatacagtatttaaaataccgcctattttgtccggtattttgacaatgctggctttatattccattaaccttcgtgttatgttgggaaaagccaatgtgcctctcggtcaggatgaaactatctttaccattattcaaaagtggattccgattcaaaccgatcttcttgttattttaatcggcttggtaattgtaatacttgtcattgcatttatgtattggttctttggaacagaggtgggaagcgccattcgtgcaaccggtaataatcctgatatgattcgtgcgttaggtgtaaacaccagctggatgaaaattattgctctgttgttcagcaatggtttggtagcattatcaggtgctttaattacacaataccaacaaaatgccagtgtaaccaatggtaccggtatgattgttgttggtttggcttctgttattattggtgaggttatttttggaaacagatttaactttatctacaaattgtcatctgttgtaattggcagcttaatttatcgaattgtagttgcgcttgttcttcaagttggtctggatacacaagatttaaaactctttacagcagtatttgttgctttggcattggctgttcctgtattcaaacaacgaattcagcgtttatcaaacagaacaggtaaaccgaagaaacaacaggatagcaatgagagtgagcaaggaggtgcgccgaatgattcaactcaataatatttacaaaacgtttcataaaggtacggtaaatgagaagaaagcattaaacggattaaacctccaaatgaaaaaaggtgattttgtaacagtaatcggcggtaacggagcaggtaaatctactatgctaaacgtaatttcaggcgtatattatgtcgaaagcggctccgttatattagacgataaagatattacaaaaaaacctgagtacaaaagagccagatacttaggccgtgtgttccaagaccctatgaaaggtactgcagcagatttatctattgaagaaaatctggcacttgcatatcgccgcggcaaaacaagaagtcttagatggggaatacacagaagtgaacgcgagaattataaagaacgtttaaaacttctggatttggggttggagaaccgtttaaaatccaaggttggattgttgtcaggtggtcaacgccaagctttaactttgctcatggctacactgcaaaagccaaaactgttgttgttggatgaacatactgctgcattggacccaaaaacagctgcaaaagtattacatattacggaacaaattattgagcaagatcaattaacagcattgatgattactcataacatgaaagatgccctccgcatgggtaaccgtttggttatgatgcacgatggaaaaattatctttgatgttgagggagaagaaaagaaaaagctgaccgtttctgacttgctggagaaattccaaattgcaagtggtgatgaattagcaaatgacagaatgctgttaggataaataataaaagccggagtgtaaaactccggcttttattatttatttgttaatgttggtcgcatccacagccacatccgttaccatgttcagccacttttggagggaagaattcatctgtcgggaaatctattctgcggaataactcgcatggattatcagaagtagttacacattctttaccggggatgcagaagtcatatgcaggaattaacatttgcacatttcttgtaatttgtacaatggtaaataaaccaatggtaacaaatacacttttattgccgcagcctgtatcaaattcaccgccgtaacgtttgcaaatacactccggaatacggcagcatgtgtcgcagcagttgcattcacaaatacgtgcggacagtgcaattggttcagcaacttgaacagttgcttttggcaatacttttgaacagccttgactgtctaggtcgtctaaatcaaagtcagagctgaacatttttacattgccttcgctaccatataagataacttttttgttgaagattgcaattccatttacagggattggaccggttgcaggtgcacagaatacatctacgcatacatcaaagaagaatgtcatgtctacagaatagaagcctttattaaatggtaccggctctaaatcaatatagactgtaattacatttacatcttttagtcttacatttactgcatcttcaattaaacattgtttttctcttgtgaaatatacgcgcaaatcctccaaacagtctttatcacagcagctatcatatacacgcattgcgtctatacatacagcttctctgaaaccttccggagttctgcaatcatttgtgttatattcatgttctgccataaaatgctcctcctaacagatttgtttcctttgttttctattgttattctatggcagtattataattttgttactcttgattgctgttttaaagggattgtgttgtatattttttggcattatcacaatatgttgatggcagtgaaatgtgcaatcaggcacaaaaaacagtggattttgaaaaatttttacaattgagacaaaaaaactgtcgattgggaaatattagaaaacgagcagtattgtactgctcgttttaactttgtgttttaaaaattgcataaatcaattcattataagtaaagcaaatcatttgttttgtttcaggtagattttgttttatttgtgaaatcattaagtttaaaatacctgaagctgcaaacgaaattgccaatttataggtttcgatatgatagcctaatacttgtaaacggttcgttagactgttttcaataatatttgatagccttgcaataaattcagcgctgtcctgtttgctgattaaaaattgaaattcagatagatgtgagtcaatatatgttaatagatgacaaaaggtctgattttgaaattcttccagaggaatatgctgttctttttttaacagtttttcaatacggtacagcaattctttttccaagtaatctgttaaatcgtcaacattatcgtaatgtaaataaaatgtgctccgtgatatttggcacgcctgacacaatttgctcacggttatttttttcatcggcatagtttgagagagtgaaaaaaaggtttcttgtattttttgttttgttgcttctgttttcaaattttcaggtctctttctaaaatttttaatagtatatcatgttcctataaagtttataccaaaaaacagctattttaattcttatatagaatataaattgcttgcatgcaataaaaaggtattttattgataaattttagccaaataaggtaaacaaaataacttgttttgtttaccttattatgaaaagaacatgctatgcttatagtagtaaaagcagtagtatggagatgtaatatatatgaaagaaacactttgcataggcgctttgcaagcagaaagcggaacaaaaacaaatggatactataccgtgcctaaaacattacacagaattcccgtaacaattataaatggagcaaaagacgggaaaataattttgattaccagcggcatacatggcggggaatatcccggaatacaaactgcaatcgaattagctcaagagttaaatcctgcagaggttcaaggggcgcttattattttgcaccctgtcaatacacaggcttttttgcaaagagttgcgggagtgattccggaagacggagaaaatttaaatcgagtctttccgggaaccatgggaggaaccattactcataaaacagcattttccattacaaaagattttcaaagcatagcagacttttatatcgatttgcatggtggagatgtcaatgaattggtaatgccatatgtatattatcccggcattgcggaggaaacggtttccaatcaagcaagagaatgtgcctacgttaccggttgtgaatatgtggtgcgttccatagcaacaggaggcgcttttaattcagctgctgctaatggagtgccaagtttgctgattgaacgcggtggaagcggtctttggagcaaagaagaggtacaagcatacaaatttgatgtacttaacattttaaaaaaattagaagtccttcctggtgaaccgatgttatcgaatcaaaaaccaaaagaaatcacaactgcattttatattgattcagaagtagatggctgttggtatcctgcagtaaaggtaggacaaaccgtatccaaaggagaatatatcggtgtgattaaagatttttttggtaaaacattgagagagtattatgcccctgaacacgtagtggtattgtatatgaccgttaccttggggattgaatctggaacgtctttaattgcattggggcaaattgattaaattttttcatttaatgtacaatcctttcttaatgagaaaagttactcaatagatgtttacaactttgataaaagtgtttacctgtcataatatctgttatgttatgcttaatacggtgttaagtgttatttttgataattatagtagataaatgttccagaacaaaaagcaaaaggggatggcgtcatgagtcaaataaaagaaattgccgcatactggggaacacgtgcacaagggtattctgaaagatgcaaaattgatttaatcgaggatacaaaatttgattggctggataaaatttgcaaatatgctcctgcaaagcagcaattaaatgtgttggatataggatgcggagcaggattcttttctatccttatggcaaaggccggtcacaatgtaacttctattgactacactgaaaatatggtaaacagtgcaatacaaaatgctatggatgcaggtgtagacattgaagtattgcagatggatgcccaaaatcttgattttgaagacgatacatttgatttgattgtaacccgtaatgtgacatgggtcatggaacagccaaccaaagcttacagcgaatggattcgtgtattacagccgggtggcagaatgattaactttgatgaaaatcaatatttatatttatttgacgaagattataaaaaggaaaaagagcgccgcggtgaacctgaatacatgaaaaaagtacataatacacaaatcatggaagagctcgcatataaacttccattaagcaaagaagtacgtccgtgttgggatgtacaaacattgctgtcattaggtgtaagcaatgttactgctgatgtttataacaaacgtgtgattgaaaaagacggaaaaaataaagtgttatataattcttttattgtttgtgcggaaaaataatcaagaaaaggatttggaagaaagcactgctcagccggttgggaagtgagcaatgtgggggtgtatcattatttggaagtacgtagtgaaacgactgcttcagctgattttaattctgtttggaattacattgctgtcttttgcgttaatgcagacggcatccggagataccgttgatgctattcaacagcaaatgggaacttctatgtcagaagaggcgaaagcagcgttacgccatgaaatggggctggaccagccatttatcattcaatattttcaatgggtaggaaaaatctttacagggaatatgggatattcttatatcaagaatcaagaagtctttcccatgttcatgcaagctttgcccaacactctgcttctaacgttatcctccattgtgacaaccattctcatttccatacctcttggaatttggtcagcggtaaaacaaaataaaataacagactacgtgattcgtgtatgtacttttattggaaatgcaatgccaaacttttttattgcattattgttgatttatgtatttgctttgcagctgcattggtttcctgttatgggtaacaatggttttatcagtattatcttaccaactttaacgctggcgctggcaatgtcagcgaaatataccagacaggtaagagctacagtattggatgagttgaataaagattatgtgattggagcacgtgcaagaggtatcaaggaacgaaccattgttttggctcacgttttaaaaagctctatgttgacgattgttacccttctgggattgtccttaggctctctgttaggcggtactgctattgtagagtctatctttatgtggccgggagtgggcaaactggcggtagacgcaatctcgtcgagagattatcaggtcatacaggtttatgtgatttggatggcaatcatttatgtagcaattaatttgattacagacattgtttatcattatctggacccaagaatccgcattcagggagaggagggctagaatatgacagatgatcttttcatcataaagcataaaaagttaaaaaaggaccgaactacattaaagctcggcttttttttaatactggttgcaggtttattgtttgttgcttgttttggacaatatattgttccgtatgacccatatgcacaggatttaagcaacgcgcttcaaccacccagcggcagtcacttactgggtacggaccgttatggaagagatttattttctcgtattattattggtgcgcaaaccaccattttttctgctttggcattggtagccggcattacaattgtaggtactgtcattggtgttatttgcggctatgttggaggatggattgattctctgattatgcgaatctctgacatctttctggcctttccggaaatggtatttgcaattgcaattgcaggtgttttaaacggtggtatctggagtgcggcaattgcagtaggactcattgcttggccgagatacgcaagggttgctcgaagtcaagtgttggcaatgaaaaatcatcagtatatgaatgctgcaaaattgatgggtacccgttggtacaaagtaattctcaagcacattatgcctaatattttgggaccgattgtagttacagctgcattggatgttggggcaatgattatgaatttggcaggtttgtcttacttaggtttaggtgtggttccgccaacgccggagtggggttctatgatgagcgaaggacgcagcatgcttcaaacatctccatggattgtattggcgccaggtcttgctatttttatcacagttattatttttaatctgcttggcgataccgttcgagatattttagacccgaaacaaaccagaagaactttaaatgataatgtacagaaaatgaaaggtatattttcagggagaaaaaagagagaaaaaactacaatttgatcccaggacaagaatcatttggtttatcaacagatgaattgcataaaatatcgctgaaccaagtcttaatatctaaacaatacagtgatttctacatgatgttaaaataaaattaaaaataaaaaatcaataaagcaatctattggcttttagattatatcagatgggagaaagaaatatgggtaaaaaatttacgaaaatccttgcagtggcagcttgtttggcattgggagtaagtgtactcacaggatgcagcggaggttccggaagccaaactacttccggttcatctgtaactgcaacggatattgacagcagagtgttcaactatggtgttaccgcatattcaggcgcacaggcaaacggcggtattgatccccatttaagctatgccggatggagtacagtacgttatggcgtgggtgaatgtcttgtaaaaatcagtgaagaaggtaccattgaaccttgggtggcagacaattggacacttgttgatgatactacatgggaaattaacatcaaggataatgttacattttccaatggtaaaaaagtagatgctgcggctgtaaaagcctgctttgaacgtttgattgaaaaaaatgagcgtgcagcatccggcttaaaaatttccagtatggaggcagatggtcagaagcttaccattcatacatcagaaaagaatccgattttaattaactggctgactgacccgtttgcatgtgttattgatgtttcagaagaagtgaacggcaataatcacgtgataggaacaggtccatatacattggaatctgctacaacagacaaagttgttgtaaaagcgaataaatcttattggaatggtacaccaaaattcggcactattaatgtacagtgttttttagatggggacactatggcgatggcattacaaaatggtgaattagatgcttgtgctaacttaggttatgcaaaccttccaatctttgaaaataacagtaattttgaaattaacagtgcagccacttcccgttcctatatgtttgtgtttaacacacagagtgaagagttttcagatgtgaatgttcgcaaggcagtaacaatggcaattaataaagaaggttttgtaaatacacttatgaatggatttggagaggttgcgcaactgtgctatcctgcttcttatgaattcggtgacagtaaagtaaaaggtccggaatataatcaggaggaagccaaaaagcttttggcagatgcaggttggtctgatacggatggagacggctaccttgacaaagacggaaaaacttttgaaattaactgggtaacttatagaaatcgtattgaacttcctttacttgctgaatctgcacaggcttccttaaaagaaattggaattaaagtaaacattgatgaccgcgaaagcaatactgtaattgaagatgtatctaaagattttgatatttattcctgggcagttgtaacagcaccgtatgcagatggtattactttcttcaatgaactgctgaccaactataatattcatggatggtccggagaagaatacgataagtttgtagcgctgtacaataaagcttctcaagaaacagattctgaaaaacgtgcagaatacagtattgaactgcaacagatgttagttgacaatggtattttatgtgtagcttctcataacactatgaatattgttacaaaagcaggtgtaacagggctcgcaccacatccttccgattattatgaaattacagcagatttagatatgcctcaatagacaaaactgtttaaaatgagtgatgacacaatatgacaacaatattagagattgaaaaattaaatgtgagctatcagggcacatccattctgcaaaatattaatatgaaagtcgaaaaaggagaaattctaggtattgtaggagagtctggcagcggaaaaagcactttgctgaaagcgatgataggtttactgggagacaatggtcgtgtagaatcagggcgtatcagctttgaacaagtggatttactgagaatttcttcaagagaactgcggaatatccgcggagcacagttaggcatggtattccagaatccgggaatgtcgtttaatcccattcgcaagattggtgctcagtttttggaagcgctaaaaaatcatggaaagattgatgaatcacaggcaaccaaacagattctggacatgtttaccagacttggtctgcgggaaggtaagcgtattttgaacagttatccttttgaattaagcggcggtatgaatcagcgtgttgccattgcactggcaatgattctgaatccgcagctgcttttagcggatgagcctaccagtgctttagatgttaccgtgcaggcgcagtgtgtcaaagagatgatggatttacgtcaacatttgggcacaacaatcatcattgtcactcataatatgggagttgtgtctcatatggcagataaagtagcggttatgtatgcaggaagcatcgtagaatatggctccaaagcagatgtattgaatcatcccaaacatccatataccaaagcgttgattgcttctattcctcaaatcggcggtacgattcccaaaggaattccgggacagccgcctgcttttggagaagtattcacaggctgtagtttttctccaagatgcagtttatgtgataatatctgtacacatgaaaaaccggtcatgcacagtggcgaaaatggacatgctgtattttgccataaatgtctaagtgaggtttaaaatgaaagtgttagaattaaaagatgtcaaaaagacctttcaaaaaaataaaaaaacctttacggcagtggatggtgtcagtttttccatagagaaaggcgagtgcatagggctggtgggggaatccggttgtggtaaaagtaccattgcgagaatggttacacatcttgagcagaccacctccggagaaatttttatgaacgagagaaatgttacaaaagcgaaaggaaaagaactgcgtaatctatatcaaaacttacagatggtatttcaaaatccaagtgattcttttaatccaaggataaaacttggaagcagcattggagaagtgctcattaattttggaaaaccgcgcggtgagataaaacgtactgtagcacaattgctggaacaagtagggttgaaatcggaatttgcatcgcgctatccccatgaagtcagcggtggacagtgtcagcgtgccgctattgcaagagccatagccattcagcctgatttgctcatatgtgatgaagcgaccagcgctttggacgtttcggttcaagcgcagattgtagatttaattttaaagttacgtcatgaaatgaatatgtcctatttgtttatttctcacgatttggctttggtacaaagcatttgtgaccgcgttcttgttatgcaccgcggacgcattgtagaagaaggaaacacacaagatgtgattgaatatgctgcacatccttatacgaagttattgttgtcttcggtttttccaattcatccggatacacaatggcaaatcccttccgttcctcaagtgacggaagaagagggggatgcctgtagattttggcaaagatgtccccattgcaaggaacagtgtaaaaaagaacggccacagctgaaaaaaatcagtgaacatcattctgttgcctgccattttgttgaataaacagtatagcaaaaaaggaacaaccttttcaaaaggttgttccttttttctatgttctggaatattcgcattctgggagaagaagattaaatagaatccatcacttctctgatagaatcagcacaaatctttacggcctttttcatttcttcacgcgtcatgataagaggaggattaaaatataaaatatctcctaaaggacgcagcagcaatcctttttttaatgctgttttgtatatttggtatccgtatctgtgagaagagtcaaacgaagttttggatgctttatcctgtaccagttcgattgcattgattaatccaatggaacgaatgtcgcctacataatgataatcttccaactcttcacgtattaaattcgtgagataaggagcattccgatttgcgttttgtaaaataggttcctcttccaaaatgttgaggacttcaatggctgccgaacatgccaaaggatttccgcaataggtatggctatgcataaatgcctttccttcttgataatcagaataaaaagcgtcatatattttttgtgttgtaacagccaaagcagtaggcagataaccgccggtaagccctttggaaagacacataatgtcaggagaaatgtttgcatgattgcaagcaaacattttacctgttcttccgtatcctacagcaatttcatcggcaatgagatgaacgtgatatttgtcacatgctttacgcagtttttgcaagtatacgggagagtagattttcatgcctgcggctgcctgcaccaatggttctatcataaatgcgcatgtttcatcaccgtattgctcaaaagttttttcagcatcttcaaagcattccgcctgacaggtttcacagttttttccgtatttgcagcgatagcagtcaggagcctgtacacgtatgatgtctaacataattggtttataaatttcggaatataaatccactccgctgacagataacgctccaagtgtttcaccgtgataagcatctgtcaaagccataaatcgcttcttttggggatttccggtttgatgatggtactggaagctcattttcatagccgcttcaatggcagaagaaccattgtcggtaaagaaaaacttttccaaacctgtcggtaattttttctgtaatctttcgcagagttcaattgcaggagtatgagaaaaattggaaaaaataacatgttccaaacggtcgatttgtttttttacagccagattaatacgttcattacaatgtcccagaaggttacaccaccaagagctgacaatatccatataactgttaccgtctatgtcatacaggtagattccctttgcatggtcaatgacaatcggaggaagtgattcgtaatctttcatttgtgaacaaggatgccagatatattgtaaatctttttctgctaagttcataatcgtcacagctttctttttggttttacatgtacatacacttacaatacttaagaaatatcattgcataaatggagcaataattctgcgctgacagacagctctgtttcattcgattttacacatgccacaacgggaattccggtgaggtgttctatttgttttttattatcgcggtgcataagattgttagaatcatattgatttaatataattccgttgacggtaatattgtgctgtttggcatatgctgcggttaaaacagtactgttgatggtacctaatcctgcatgagcgacaattaaaataggaagatgtaatgtttgtatcacatcggtcaacataataggggagctatccatacgcaaaggacaaatgattccgccgcttccttctgctaccacaacatcaaactgtgtagctatatgatgaaaatcggattgaatctttttcatatcaactggacgtttttccagttgtgctgccaaatgtggggaaactgcaggttcatagatgtaagataccaattgttcaggagggacaggtaaacctgatatagacgtaacatacgcagcatctccgggaaccagtttgtctgcattacgatatgcaccgcttaatgccgctttataataacctgcattgacagacgcttctctcaacttttttaaaatcaatgcagtcacatatgtttttcctacgtccgtaccggtagctgttataaaaattccttttttcttgtgtatcataaaaaattcaccgtatactttaattgttttaacatattcatatcgtcttgtatagtaatacctgaggttgtcagcatatcaccggagattgctgcatttgcacctgattgaaatgcagattttcctttatcgcacatattgccgcgccctcccgctaaacgaatggctccgtttggaattaaaaagcggaaaatagatacaatacgacataaatcatcttctgttagttttggaagttctgcaaacggcgtaccgggaatcggatttaaaacattaacaggaacagaagtaatgccaagctcacgaatatcaattaccatatcaatacgatcttccatcgtttctcctaaccccataataccgccgctgcatacttccagcccggctttcaaagcatgtttgattgcctgaattttatcatcataagtatgggtggtacagatattcggaaaatttcttcgtgatgtttccaaattattgtgataccgtgtaacaccggcttcttttaatttgacaaattgcggatatgtcagcaagccgtgagatgcacacaacgagataccgctttcatcctttaacctgcgatatgttttacagatatcatctacttcttggtcagatagagcacgtcctgaggttacgacggaaaatcttaaaataccgtttttgtaattatgttgtgcttcctgtaaaatagtagtgctgtctaaaagcggatactcttccacagcggtacagaaatgggaagattgtgcgcagtatttgcagttttcagaacacttgccgctttttccgttgataatggaacataaatcaaatacattatcacaaaaatgttctctcagttcatttgccgcctgacataactcatccagcggttggtctgccagtgataaagcttcttctttcgtgattgatacaccttgcatcgctttttcttttaaggtttgtactgtattcatgcggatagtttctccttttttaggattggaaccaatcgttttccgataaaggcacaaacaacacaggtaagaatatctcccggcatgggaagtaagaaacagtataagaacaaagaccatacgcctgcataagtattggtgtaaaacatggcaatgaagaagtagtagatggttcccagcgtataaacaatcaataaacctgaaaagttggcaaccaaaagacgtttgatgcttgggcgtggtactttatggacaatcaatcctgttacaaatgtacctattaaaaatccaatgagatatccaaatgtaggctgcaatacataagcgggaccgcctccctgcgtaaaaataggtacaccgcaaagaccaattagtatgtatacgccaacagaaagtgctccgtattttggaccgagcacaataccggcaagggtagtaaacaacagctgcagtgtaaatggaacgaaaggcaccggaattttaataaacgcgcccactgcgattaaagctgcaaacaatgcgcataaaataagagagtatacagtagattttgatttttctttcatgaagcgaagttccccctaatgctaatttctcctgagtgaagagatgtaatggttccgtcttgtttttcaatcataagaccgccattttcatcaatatcaattgctgtggctttttcagagtttgtaccttgaataacttcaatgtcttttcccaatacaatggagcgcgctttgtattccgcaataaaagaacggtcttgcaattgattgcataagcacagtacatggttgatgactgccgcagcaatttgattgcgtgtgataccggcgggcttttcgtggaataaggaatctactttctgctgaatgttttcaggaaaagaagaaacagcggtactaaagttaataccgattccaagaataattgattcaattccgccgctttcaaagtctgttaatgcttcggtcagaataccgcatatttttttgccgttcatatatacgtcattgacccatttgattcccgtacggatatgagtcacttcttcaatggcgcgtgctacagcgacagatgcagcggtagtaataagaacagcatcattactggttaagttgggacgtaaaataaaactcatataaattccgctaccggcaggggagtgaaaggaacgtcccattcttccgcgtcctgcagtttgttcttcagccaacactacagtaccgtgaggcgcctgctccaacgccatttttttagcaacaagattggtggaatcaacggttttaaaaacatgaatcatatcttggctgccgtttgttaaatatggaccaataccttcggctgaaattacatctgtttcatcagataagcaataacctttattggtaacagaaataatttgatatccttctttttttaattcgctgattgctttccaaatagctgaacgtgaaatttgcagctgttgtgccagttcttctcccgaaacataagttccgcgatttttctcaagtatttgcagtatgttgctttttgatgacatgattttatccctcacataataattttgttgatttcttttagtataaataggaaagaactgattgtcaaccttatttttaaaataggttgacaatcagttcttcctataaaaaagcagcatattttcatttaatatgctgcttcatttattctttatcatttggttcatgttgtgcgtcataaattgcatttaataactgtgtagtaaacatagtagcatacagtttcgcttcagataatgcaaaggccaatacaccgtttgtatcaatggtgccgtcttcttttccgaaagcctgcatacgctggagtttatctccttgtaattctgcttctacattttgttgaacaattgcagaaagttccgcaatgtctttttttgtgagctcaattgccatgtctttttcctcccaatttccttttttatcattttatcatgattcaaattcagaatcaaggttgcactatcataatacaaagaaagcaatttgcttttgcgtttttttaaacttttttatacattttattctttttgtctaaaaaactgacaaaaaggactgactgtctaaatacaaagtcatacttaaatgctattataactgttactaccatattgaaaagaggagagcatgtttgaaaaaacgtaacagtacagaacaagtacaattgcgagacccattaaacgaacagcacaaaggcagaaaaaaattaattagctgtattgctctcgttttgggagttgccattataccgctgatgtacagtggtatttatttggcatctgtatgggatacttatggcagattagatacactgcctgtcgcagttgtaaaccatgaccaaggtgcgcaaatcaatggagaggaacgtaacctgggccaagaactcattgataaaatggaagagtctaaagatttggattgggttattacaaatgaagctgatgcaaaagcaggtttagagacggaaaaccgttattatgctgtcattgatattccttcagatttttcacagaatgtagcaaccgcagaggatatagacaaagtacctgcaaccattacgtattcagcaaatgaaaagcgtaactacattgcttccactattatgaaaagtgcggcacaaagcttacaaaaagaattgcgtgccagtgtaacagaacaaattacaggtaatttggtgcaacagttaaacagtgttccgggtcaaatggaaaccatttctgaaggatttacaacattgggagacggtaccggcgctttgagaagcggtatggatgttctgctgcaaggttcacaaaccattacaaccaacttggaaactttggataatggattagagcaagcaaaagacggttccgaacaattgaatcaggcactaacgcagttacctacattaatgcaaggcatcgaacagttgaatcagggggcttccgatttatctgcaggattaaatcaagcagcacaaggtgcttccgttttaaatgacggcgccgctaatttaactgatttaacaaacggtattaactcattgtctcaaggcagcagccaagtgtcaattggtgcacagcaatatgtaagcctgacaaatggtattcagcaagctttaatggcaaatggctatgacggagcaaagactgttcagactttggcacaacagctgcaatccgccagtggttcacaggcagattcgttgaaagctatgattggtattattggtggtaacagtaccgttattcagaatttaacgaaccagtataatgcaatcaaagataatcctgcttatgcacaacaagcagcccagctgcaagctttgattagaatgcttcaacaggatatgaaccaaggaagtgcttctgcagcatcacaatatgctgctgcaggcgcacaattggtaagtggtaccagccaattaaatcagggcgcagaacagttggcagccggaacaggaaaaattggtgagctgcaaagcggtatcagcagtttgaatacagcgttatcacaactaaatgacggtggtaaacaagtagcagacggtactgcaactctgtcttccagcagcagtcagttaacacaactgcaacagggagtcggctcattaaatagtgctttgggtcaactttccagcggagcttcacaactttatcagggctcatctgaattaacaaacggtgtttcttccgctcaagacggagtagttcaattagatgatggtgttgcatctgcaaaagaggaattggacggtgcaattagcgaaacatcagagaaattaaaagcaacagacggtttggaaacatacactgcaaatggggtatcggttcaggcagatccatatgaggcagttcctaattacggaaccgcatttgcaccatactttatctcagtgtcattatggaccggcggcttatccattttgatgagcatatacttagaaccaaacagaagaatgaaacggttgtctgtggattcccattccagagtaatcagaatgtttgctttcttaggcatcggtgtacttcaagcggtattgcttggcattgttggtcagtttggcttgggactgccaatcaatcatgtctttggtttctatagtgcggttatcttagcttccgtcacctttgttgccatcattcaattcttaatgatgtatttaggtgatataggtaaaatactatctatggctcttatggtattgcagttgacgtcaacgggcggtaccttcccaattgaaacttcgggtgcattcttcgaggtattgaataaaatcatgccaatgacctacagcgtaaatttattgaaagaagtaatcagcggtggagatgccggtattatctggtataatgtaggaattttatttgccttctttgctgtatttacagcagtgacgttgggattgtctatttatcaaaataaaaaagacaaaaagaagaaagaaattgagcacatagatatagatacagatgtaacagaaatgacagtttgatataaatatattgagaaaggcgctgatattcagcgctttttttatgtgaattttttagaaagtttccctgttgagggaaattttttctgtttttacgtggtattacagaggcaattatttatgcttacaaaataagatgtcaatttgtgtatgaaaggagtaaaaaatcaataaaagttgtaagcgatgttaattaagaaaggatacaaaatgaaaaaaacagaaattataaattcacctacttactctgaattagacccaaaccgtaaagtagtgcgagaaattccatcattacgcggcgagaatatcaaacaatttttgatgagtgataaaaccattcaggtagccatgtatgatgaacctgtacattttgagaaaaatggaacatggaatgatattgataatgatttatatcaaacagaggaagggggatataaaaacaaatccaatccatttcaagtagaatttgcagcagataaatatgcagagaaactggttcaaattcatcaggatgattatgaattatcttggagctatcttccgaatacaaagccgagaagacaaaaaagaagtattctcaatacagtacaaattcacgaccacaaagaggcggatttttcagattcggaagtaaacaagcaaaaagtaaactcatttgttacttatgcggatatagagccaaatgtagatttgaaatatattttgcgtgccaaagaagtaaaagaatatatcatactaaatgaaaaaacagattgcgaaacctttacatttttctatcaaagcaaccatttaaaagcgcatcttgatgaaaatggtaacattcagtttatcaatcctgatacagaacagcaagtttatactttatgcagaggatttatgaaagatgcgtcaggtcaaatcagtaatacactatcttatgatttgaaggaaacagaacagggttaccaggttacacttcatctggacaaagattggctcaacgatgctgtgcgtgtatatcccgttgagattgatcctccgattcaggcttctcaagattattttaaaaatgtacatgcatttgtagacagtgcagcgccaaatttaaacaatcatttggcagcggagttgccgattggaagcattccggaaggagatacctataccgcatatttaaaatttacagggtttccaaatttaactgccaaagattatatcgttgatgcaaaattagatttatattgtttggatagttactatgataacaaaacaaataccattaatattagaagaattacttcgtggtgggatagtactacggtaacttacaatactcgtcccagtgtttgtgaagacgttgaaagttattgcaaagtaaccgatacaagaagatggtattcttgggatatcaccaatatggttcgtgattggtacaaaacgggttctcccaatgacaactatggtttggaacttacttctcaagaagatgcatggacagggtataaacggtttctgtcttcagactatgcggctattgctgacggtggttgccccgttatttactttacttattttaataccaaaggattggagagctgttattcctattatgagcaaagccttggacgttcaggtacttgctatgtgcagcatttaacaggaactttcactcatgtataccatgatgtaacaacttcttccagaatgcctattgtgttaaaccatgttgtaacaaatggtgactttgaaaatattggatttggtgcaggtgcaagattaaacatttcacaaacgtgcattgatttatccaaaggagttggtatgactgatattgaccggcaagtttatgctatggatagccgctatcgttataaatatacagatggagatggaacggttatctatttttatcaggatgatgacggggtatatagagatgagttgggtaaaggtttaaaagtagagctggatatcaacaactgtatgtatgtcattgataaaaatcaatttgaatacggttttt

SEQ ID NO: 481 - DNA, 2313 bp, Unknown
  16S sequences of unknown bacteria
gatgatatgtctatttttattatatatggtggtacacttgcagtttctaccgtaatatcccgcataaatttccgctcgtcaatttcttatattttaattattcttgcggagagaagttttttgaaacaatatttcgtatatgaaatatgttttcaccttgtcctgcttgcttttaagcgcatgtttttgcgctcttattgaggcggcaaatgcaaatgaaaaaaaactttggaacggttttgaacgcgaggattttaaaatatccggtcgcgattccattctcgtttctccccaaaacccgcgcaaagacaaggcttggatatggaggcccgcctggttcgacgcatttcccaacgccgatatagagctgctaaaacgcggtttctatttggcgtatttcgacgtcacccacttgtacgccagcccgagatccatggatctgatggacgaattttactacgcgatgcaaaagagggggctctctaaaaaggtcgcccttgaaggtataagccgcggaggagccgccgccctcatgtgggcgaatagggatccctcaaaagtctcttgcgtatatgtcgacgcccccgtctgcgatttcgactcctggcccggacaatcccgcaaaaaactctacgccgattttcttaaggaatgggggataaaagacacgagaaacttttccgggaatcctatagacaattacgaaagactcgcccaaagcggagttcccgtgctgatagtagcgggagacgccgacgttgatgttccttattcgaaaaacggcgaaatatataaaaagcggttcttcgacagcggcggtaatataaggagcatagtcaaggccggttgcgcccaccacccgcacggatttgaaaatccggaagaaatagcggggttcatcgaagattcccagaatgccgcttccagtaataaaaccgaaatttatggagccattacaaggtttaaggtacgcggcggagtgcgcaaatcgctaaaaaaattcgccgaacaaaggcgcgggaccgtcgcgttcataggcggatcaataaccgaaatgcgcgggtggaaggaaaacgtgcaaagcgaattaaaacgccgctttccagaaaccgaatttacttttctggaatccggaatatcgtcgctgggcagctccgcgcacgcattcagaatattaaaagatattccccaaatagcctccgcagatatggtatttttggaggcggcagtcaacgacgatacaaacggattctacgggaaatatgcgaagaggggatacgaaggtgtaatcaggcgcattctgctgttaaaccccgacgccgagattgtatgcctgcacttcgcctcggacgaacttctcaaaaaatgcgcgaatggcgccattcccgacgtcattaaaagccatgaagaaattgcaagtcattataagctgccatcagtgaatctctccagcgaagttgccgataagatcgcatcgggaatattcggctgggaaaagttcggaggaacgcatccgtcaccgttcgggcacaagctgtattccgagggcgtaaaaaaggtctttgacgcgagcgaacaactgccctgccccgaaaataacccgcctctcccactccccgcagacaagttttcctattttaacggagatttaataggctcggactctgcgtcggtaaagtgcaagtctggttgggcgatggagaggtcctggacgcctaaaaagaaaggacatgtgaggacgcgctataagaacattcctcttttagaaactggcagcggaggatctgagcttagcgtaagcttcaaaggaagcgcaataggcgtttattgccttgcgggaccggacgccggcattattgaatattcgatagacggaagccgcttcaaaaagattgacactttcacgcgatggagtcgcgacctttatttgccgcgcataatcgtattcgacgacgaactctccgatggtcaacacgttttaaagttaaaaacgtcctatgaaaaaaatccgggcagcctagggaattcatgccaaatcattggtttttgcgtcaacgggaaacaataaacgatacaggcacatagcttaaaaaagttgacttaattgcccgattgtgcgagtcgataaaaatacgcgataaggaatatgaatcgctaaagatttacgtgcgcgattggaaatcgcgtgtaggtcaaaagcctaccgggggttcaaatccccccctctccgcgtttataacttccacactgcaagggtggggtcaacaccaaaggttgtggaataggttgattttttagatttgtctttcatag

SEQ ID NO: 482 - DNA, 18312 bp, Unknown
  16S sequences of unknown bacteria
aagcatcccgctccaatcccagcccccggcagtccacccactgcaggtacgttccttccagcgctactgcgtgcagctgcggcagctcacgcacaatgaactcctgcacaaagcggcggttcccgtcaagataggccagcagggctttcagccacggctccgcccgatcataagccgcctgacaggccacatagccgaaggggttcaggctgggggtagcatcgacgcgcaactcccggcaaaaacgctctcgtagcgcccgatcccggattatgatattgctcaggttcatccccgccagattgaaggtcttgctgggtgcggtgcacaaaatagtgcgcccggcaatctcaccctccagtgtgccaaacgacgtgtgcgtatgccccgggaataccaagtcgaaatgaatttcatcggcgatgacaaacaggccatatcgctctgcgatctcagccattgcccgcacctcgcaggctgtccacacacgacccacggggttgtgtgggctgcacagcagcagcgccttgttctccctgcggctggccagcgtctccagcagcgcaaaatcaatactgtagcgcccctcttcataccgcagcggacagggaaccgccgtgcgtcccgtatcgcggatcacgcggtaaaaaggataatagaccggcgtcagaaggataatcccctctccctcctctgtcatcgcccgaatcgcccgaggcaaggcatagaccacaccaggcgtctgtaccagctcttccggggaaacagacactccatgacggcggcgcaaaaaagagcagacgctctcacggaatccttccggcgccccggaataaccggggatctgcgcatcaatatactgatgcagcgccgcccggatctcgggggcaatgacaaactccatatccgccacagaaagcggcaccgcatcttccggtgcgtttggctgcgcctggcgcatcaggtcccatttcagtgcaccggcacggcgccggtccaccagggtttcaaaatcatacttcatacggtatgcacacatcctttgttcattggttttccattttcaaaactcccggcggagattactccacaccttccacagtgagattgtccgtgccgtgggcttcaaactcatcaaggtaggcgtcgatccgccggttcagatctaccatgccctcgggcgtctccgcagcgataccttccagttccatatcccgccgggcaagctcttcggccaggatttcgtagaacaccgtatcctcatatgccatgatcgcctcatggatgccgccttcgttgaaggcgcgggaaggcactgcaataccgcgaaccacatccaccagatccggcatatcttgcagcagacactgggaaaacagaaggctttccacctggtcatacactcggatgcggtcgccgccccggcggagttgagtacccagttgccgatatataccatgtccagcaggcggcggaactgcttttcactcatcttgatctccatgtcgatccttctttcctattgtagcaaattgcgtgccaaaataccagcgccgtgcggtacaaaggagaattttttgaaaaaggcagtgaatttgccggttttgacttgccgcaatccgaaatatcaagtataatatatggttgtttataataaggatcaagcaacaccatgtgttgaagagaggagcggagcatatggatcatcggccgatcggcgtattcgattccggtctgggcgggctgaccgccgtgcgggagctgatgcagctgctgccgcgggaggatatcatttacttcggcgataccgcccgggtgccttacggcgtgcgctccccggaaaccatcctgaaatttgcccgccaagacatgaacttcctgtgctcttacgatcttaaggcagtagtaatcgcctgcggcacagtgagcaccacatctttgtccaccctgcgcagggaataccatctccctatcatcggcgtggtggaaccgacagctgcacaggcggcccgcgtcaccagaagcggacgcatcggcctgattgccaccgccgcttccatccgttccggcgcccggagcaacggtatatggcaaggcctgccctctgtttgtacctttagttgaaaacgggcgttttcagatgggcgaccctgtcatcgaaaccatagcccgggaatatctgcagagcatgcaggaggccgacgtggacaccctgattctgggctgcacccactatccgctgctcagcgatgttatccgccacattatggggccggatgtgacactcatcaattccggccgcgaagcagcccgggcattgcaggctctgctcgtcagcagcgaccgcctgaacgaaagccagtccaacggcgacacttcttattttgtcagtgatacggtggacggctttgaagaaatggcgggactgttcctgcgcagcaacctcaaaggcatggtgcagcagattaatattgaaaaatactgaaaacggatatcctaacagggaaacaggagaacacaatgcagcaacaggtaatgatctccattcgcggagagcaggaatacgaaggcaccgaaaaagatgttacagaatttgtgaccgagggcacgctgacttctaccgattacggctatgccctggaatacgacgagagcgctctgacgggaatggaaggcacgcataccgcttttgagattcatcccaattccgtatctctggtgcgcaccgggcgctttcattcccagatgatttttgagcgggataaaaaacattactctctttatgagaccccctacggcaccatgaccctcgacattgtgacccgcactctgcgtgccgatctggacgaaacgggcggcgaactggaaatccgctacgccatcgaaatcgagcaccaaataaccggcacaagccgctttttcatccaagtgcgtcaaaacaccgcggcggaggcagaaaagcagaacgtaaaaaacggcaaaggatggtaaaaaagatgaccaatatgattcaaaatgccaaagaccaagttgcacagctggtggccgccagctatgcgcgcgccatgaaaaagggtcttctcggcacagcgcagggtaagattcgcggcagtgtggaagtgcctaaggacagccgcaacggcgattacacctcgaatttcgcgctggccggtgccaaagcgctgggcatgcgcccccgggatctggcacagattctgtgcgaccatctggacttgagcggctcttattttgaaaaagtagaaatcgccggccccggctttttgaatttcaccgtcagcaacagctggtacggcgacgttttggccgccgtagaagcggaaggcgcaaactacggttcttcccaggcactggcgggacagaagattatggtggaattcgtttccgcaaatcccaccggccccatgcatatgggcaacgcccgcggcggcgtactgggcgacacgctggccaatgttctctcccgcagcggctgcgcggcctggaaggaattttacgtcaacgacgctggaaaccagatcgccaaattcgcccactccatctacgcccgctgcatgcagctgacattgggtgaggagaactatcccttccccgaagagggctaccatggagaggacatcaaagaactggcccggggcttcctggcccaggtcagcggcgccttccccggcgaaacggcgcaggaaacctgggagagcgccatggctgaatacggactgcgtattaacatcccaaaaatgcaggaagacctgcgcaaatacggcattgagtacgaccagtggttcttggaatcggagctgcacaacagcggctatgtagcggaaaccgtagctacactgacagagaaaggttggacctatgaaaaggacggcgcgctgtggctgaacaccaccgcgctgctgaaggaaaaattcctgcgcgaagggaaaccccaggctcaagtggacaagctggaactgaaggatgatgtgctccgccgtgccaacggattttacacctatttcgccgctgatatcgcctatcaccgcaacaaatttgaaaaacgcggcttcgataaagtcatcaatgtctggggtgccgaccatcacggccatgtggcccgcctgcaagcggcgctggacggccttggtctggacggctccggccgcttggtgattgtgctgatgcagctggtgaacctgcttcaggacggcaaacccgtgcgtatgtccaagcgcaccggcaaggccattgccctgcacgatctgctcgatgagatcagcgtggacgccgcccgctactatttcaacaaccgtgtgcccaacagtcccttggactttgatctggggctggccgtccgcgaagacagcgaaaatcccgtttactatgtacagtatgcccacgcccgtatttgcagtctgcgcaaagcaatgcaggaagagggcgcgtccctgcccgccatggctgacacggatgtctccctgctcagcgacgaggcggcccgggatctgatcaagcagatctcccagtatcccgaagagctgcgcttggccgcccgggactacgacccctcctatatcaaccggtatctggtcaatctggccgcccgcttccacaagttctaccatgacgaccgcatcaaaggcgaagctcccgccgtacgcgacgcccgctggaagctggctgacactgtgcgcaccgtgttggaaaacggcttggaggtcattggcgtaagcgcaccggaacggatgtaatccgataagctgcttgtcacaaaagcgccgtgtgaaagaaattctttcacacggcgctttttcaatgttcagagcctgcacaggccgcgcagagcggcctgtgcttttttctgcttatcccttatctgggcgttgctacgataatccgcatccggccaccggaggattccggtttatcataccatccggtaagactgtaatcgccagaattgagcttatccagattggtgacataatactgcgtacccaccccgctctggttctgcttaaggtagatctgcacaccggtgctgatgtcgaatttctgtccgttgaccgccacagcagtaccgttggtggtcgctgcggtcaacttgacttccgtcagattatacatcttatccagcgtcgtaccatccatcatatagcgcacggccttgccctggctgacagggaaggaaacaccctcacaggtcagcggaccaaccacggagccgttgctcatcagcgtatagatatgaccgttggtcatgttcgcgccgggaatttcatcatctttggtcagcataccgaacgaatacatatcgccggtgacgttcttcaggatcagcgtttcgatctcgccagcgctgttcagttcatagtacgccacatcgccgctgtcaatctttacacctgccaaacgactggccgcgatattcgccgaatgtccatctgcataatccatgatccgcacaccggaggccagcggcatgctgcccagcttggtggccgcgctgttgaccgttccagagaggtttttggaagaattgttcagacggctcagtttggcaacgccgctttcgaaggccaccttcaccagatccccctctttgtaatagccgctcttgtccgtctgatactgatacgtaacaccgtctacgcccagaatcttcacgtagggcgccgtataaggcttaccctgcgcatcggtatagctgtcaataccggtggcaagcacaatgccgtaagtattggtgccggcactggtcggatcaattaccgcagccaccgtattgttgcggcccagcagcagcgtgaccgtatcgccgatcttgaacgtgcccgtggtggacatggcataggctgctgcagagctttcaaaggagtagctcactccagataccacaaccgaggtaggattgctccggttcggttcagcgctctcatacaagccagtgacttgattatgataggcccaaactgttttggtcttttccagataatataccacatcgttctgagtaatagccgaaagggtgctttccccatcgttgcggtacaccacagagggtgtaaagcccagctgcgacgtccagctgccttcgcccaccacaatgggcccctgcagctctgcattaatcacgctcagatagtcgatcttacccgcaccgtctacactgtagcccagtgtagtggcatagactttcccatcctttgtggtggcattcagcgtattgtaaaccagcttggcacagtctccgcgggtcagaacctgcccctgtttggcgttcagccctgtgttcagcttcagattctgatacatggccagctggggatacggataggtgccagtggcaaaatcctcatcggtataacccagcattttcaggcagatattcaccgcctgttccagatagaccgggctgtccggccggaatgtcccatccagataaccgttgatccagcctgcatccaccgcggttttgatataccccgccgcccaatgcgtgtattttacatccgaaaagggtgaaacatgggctgtggacgtagccatatcccgataagtggaagctgccactgccattttggtaaaggccgcccgcgtcacattggcggacagatccagattgcctttctcgtcgccgttcatcacgcccatggctgccagaacctggagtgcctcgccctcgccagccgtagtgccggcggcaaatgccgagggcatcagcagcgacacgcacagggccgctgtacacagcagcgcagtaagtcgtttcttcatgtctcttctcctcctatatcgctttgccggcactgcggttctttattcataccgcagcgcgtcgatgggattcatctttgccgctttgttcgccggcagataaccaaacagcacgccgatgccgacggatacgccaaaagctatggcaacagctcccggcgtgggtacagcctggaacgttgttccgctgccccccatcatactggtcatcataccgctgagcacaacgcccgccacaaacgccaccaccatgcccaacacaacgccaatcaggccgcccaacgcactggtggtgccagcttcgatgataaactgcagccggatatccttccgcttggctccaagagatttgcggataccgatttccctagtgcgttcggaaacagataccagcataatattcataatgccgataccgcccaccagtaacgagatggctgcaatggccaccagcaccatcatcaggacgctgatcatcatgttcagcgactgtatctgctcggccgaagtcataacataataggcgtccgccgtctgataaatactatagagtttgttttcgatcagcgctttgcctgcgtttgccgagtcctgccctgcacaggaaaacatgtacagcgaaacttcggtcgaatcggaaattttaccggcattggtgtaaggaatatacacataatcactggggccgccctcttccagggcataacttccaccggagagaatccccactactgtgtacggtacgccgccaatctggatcgacttgcccagcccgtctcctccaaaagcagtctgattgatgtattccccaatgacgcaaaccgtagagcgccgtgtcacatccagatatttgatatatcgcccctgtgccagctcttcgccgaaagcggcgtccatgtcggcaaaatcctcgctgacaccgtatacctgtgtgcgcttgaacttctctgcgccgctgcgaacactggtgttcacgctgacatatggggtgacgccagaaagcacatccgggtactgctccacaagctccgccatatcctccggctctgccgtgcgggatgagccggggccgcggcccatgaccatcacttgcaccagattcgtcccgattttttcaaactgttcgttcatcatcgtctgcatgccatttccaaggctggtgatgatgatcaccgcggccacgccgataataatgcccagcatggtgaggattgcccgggctttgctgctcatcagggacttaaccgccagcttaaaattctgttccattcccatcagagcgtatccccctctcctgcctcggaaggctgaaccacagcccgtgggtcgtcggagggaccatcgtaaataatgcggccatcctgcagccgaataatgcgctgtgcgcgcacggcaatcgaattgtcatgggtaatgaggacaatggtgttgccctcccggttgagctgctgcaggaacgacagcacctcccggctggtgcgggaatccagcgcgccggtaggctcatccgccagaataaccgaagggtctcccgccagtgcccgggcaatggatacgcgctgctgctggccgccggagagctggttgggcatattcttcgccttggccgccaagcccaccttattgagagccgccaatgcacgctctcgccgttccgccgccggaaccccggcatagagcagtgaaagctccacattttcctgcacggtcagcttgggcagaaggttgtactgctgaaaaataaagcccagcattttgttgcggatctccgcctgcgcatcgtcccgcatggtagacacatccacaccgcccagcagataggtgcccgatgtgggaacatccaggcagccgataatattcatggcagtggatttgcccgaaccggactggccgacaatcgctacaaactggccgcggggaatggaaaaagacacaccatccagggcatgcaccgctgtgtcgcccatctgataaatcttataaatgttacgcagttcgatcagtgtttcattcatcggcgtcactcacccgattccataaccgccgcagtgcctgcatcgccggcgagaacctgatccagatcagatttcaccagcaccaggtctccttccttcagaccatccttgacttccacatagctgctgtcgctgacacccagctctacagtacgtgtttcagcctgtgcagtatcgatgctcccgtctttttcggaaatggcggaagccggaatcacctgcacagtattgccggtgtctaccgcgcccagcggaatggtcagcgcatcctggacttcctcgaccataatgtcggcactgacattcatgcccggcagcaaagacgggtcaggattctctaccatcacggtaaccggataactggtagcgccgccggtggtggtgccgttgatgttgatcttgtctatgtatccggaaaactcctgcccgggcaacgcatccaccgtgatgcggacccgctggcccaccttcactttggaaatatccagctcgtcgatattcatatcaaaggtcagggcagacagatcactgatgatggccagcgtggaattgcccacctgaccgatattgtcgccggcactcatgctcttctgcgtcacagtgccggaaataggcgcttttatattatactcctccagcgcatcctgcgcagaacgcaggttgagctgggcgttctccaggctcagcttcgcgttttggacctgatcggccaaatccgcgccatccagatgaaccagcttcgtgccgggcgccaccgtagtgccctcggaaacataaatcgcgtccacagtaccgcctgccttggccagcacctgggtctgcgtcgcatactcgaaagtgccgccgctctggcaggcataagtgcccactctggctgtggccgccataccgcccgtgatgccgccggggttggtaaccttcagctctacgctctgcaccaacgtgccgccggcgcccactgccgtataagcggacacattgctcaccgtagccgccacggtttctccggtggaagtaatggtaaccgtcccgctttgcccagcgcggatatttttggcgtccgcactgttaaaattgcacttgatcgtcatgtttttattgtcggtcactgtcaccaccgccgtaccagcggagacagcgtcgcctttcttcacttccacgctggacacctgtccggaaaccgtggaggacaccgtcaaatcctgggcggcgcgggacgcctgttcatatgcaatctgcgcctgctgcaatgccagctgtgcctgctccacggcggtttgcgccgcctcggcatcaatcgtgtaaagcacctgatccttttccaccgcgtcgccgatttcaaagctgtcgctgagaatatctccggtaaccatacccacgatcgtgctggaatgaatgggctgaatggtgccggtaccggaaacagtcacgctgaggtcgcggtgcgcggcagcctctgccgtatagttgcctcccatggggattccactgcctccgcccagcatccgcgagaggagaaacagtaccaccaccacgatcaccaagatcaggatcagtttctttttgcttttcttttgtttcggcagttccggtgcagctgcaacagcgggaatttcctcttcctctgcctctgccggtgccaggtctaacttgttttctgtgttgtcgctcttcataacttgctccttccggtcctgttccagggtcctgctttgtcattatatgagttgtcccacctcaaatacaagagagaatcctttaagatttcttaaatattataaaagcccggctctttccgatcaggcaagcaggcgataatgtccattttatggaaaactctccataatcccacccaggcagcctgctccctccaccgcctggcacgcagcgtttccccgcgcagtctaccgcacagccacagggccggcagcaggagcagcggaaaagccagcgcccggaatgcgtgcagaaaggccgccacagacattgccaaccgcaacccgttcccgtccgttttcctgcgccttcagcataacgccaagggcctttcaggaaagcagcgccgcgcagccaaaacagcatcgctctgtgcccttactctgagagcagccggaaagcccctcccgtaaagctgcgggaggggctttccaatacagttatttgtttacgcgccgcacagatcagccacagcctgcgcaaacatcttacccgaaacgatcaggtcttcgatgcgcacgaactcatccggaccgtgcatatgggtgtctacctccgggaattcgcagccgaaaccgacaccgccctcaatattgtgcacataagtgccgccgcccatggaaacgcagcgggcttcccggccggtatagtccgtatagatccgcttcagtgcttccaccaagggcatatcctccggcgtatggtggggcggctcatggagcatcaactccgcctccagcccggcagcggcagccttgtccttcaaaatggcaaataaccgctcttcgccgccgcacagaggcactcggctgtcaaagctgccgcggaactccgtttctgtgcagtggaaaatatccagcgaaatggtcagtgccccgctgatctcatcagcgcaggcaataccgaaattcgttccgtccgtctggccgtgaggggtcagggcatacagcgcgcgcagcttttccacgccttcgcaaggcaccagggggagtttgagcagcgcgcacagcaacgccgtaatggcgttgtttccctccacaggcgtcgaagcatgggcgtttttccccttggccgcgatcagaacgccgccggtgatatccgccgcggcaaacgacgcgccggtttcccgggccgcttcgtcgagatagggctgcacgtcttcggcattcatcccttccaccactgcttcagcctccggcggtacggcgttaagcaccaggccgccgtcaatggcgcggatgcggggcatggccccgcagggggcaaagtgggccgtcacatccggccgcagctgccctttttcggtgttcagaatcggataatccccatcgggcgagaataccatgggcggcgtactttcttttttcaaatagtattcgatatcgctgcagccggtttcctcggcagttcccagaatcagccgcaccttgtgcttcatcggaaagttcagctccctcacgcagcgcagcgcatagagcgatgccacagccggccccttgtcgtcgctgctgccgcggccgtaaatcattccatctttgaccaggggctcaaagggctcacatacggtccagcccttgcccgcaggcaccacgtccaggtgcgccagcatggccagctgcacatcgccttcacccatggtgacggtgcccacatagttgtccatattcttcacatcggtaaagccgtatcgcttcgccaactgcaaagccgcgtccagcgccgcggccggaccttcgccgtagggcttgcccggccgggcctccccgtcgacactgggaatcgccaccaggtccatgatatccttcaccatttcttcccggtgatcctcgaaccattgctcaatctgttctctatacataaaaagcattcactcctttccagaatctgctgcttgtatcctatcacatcggcggaaaagtatcaaggcacatccgctgcaaagcccggcgcgctgctctttcctgtttcctttgatgctgctgaacgctcattataaacgactgcatcaatataaccaagcgtgcagccgtccaatcggggaaaaacgcctgctaaaatacgataatacaattttgaattaccaatctctttcccggatagcttcttctatatcaatggaaatatcaaaccatttcaggatataggccacggtacctccgatgcaatcacgtgccacagtttcaatctcactgtcgttttcgttgaattcctcctgcaaatcgttaatggcacagaccacctgatccagttgcgcctgcaccacctcaatatcggtttctccgctctccagcaagtcaatgactttctgaagccaatttcgtatcttgtccaccagaaagttgggataatattcgtcccgatacatttcgtccaacagtttataattctgatcaaatggtttcatcgtgcttctccatccatgttccaatttaccagtttaatcttatcacagttaactctatacttcaatgtgcaatgaaccaaaggacaaaagcccaaatccaacagcgcacaaaacaaaagggagcacagctctacctggttgccaaaccataagctgcatagtataataaaaaatatagtgggaacacttttaaaaaaactgcgaggtatagaatcaatggaacccataatccgaaaagaaacgccacgcgactaccgtgccgtggaaaccatgacgcgaaacgcattttataacatttatgtgccgggctgtatcgaacactacctggtccataccatgcgcagccatgaagattttattccagagctggattttgtgctggagctggacgggcaggtgatcggcaatattatgtacaccagagccgcactgttagacgaacacggcgggcggaaggaaatccttacattcggtccgctctgcatcgccccggcataccagcgcagcggctatggcaaacggctgatggaatattcctttgcacaggccgtctccatgggatacgacgccattgtgattttcggggatcccgccaactacatcagcagcggcttccggagctgtaaaaaatacggcgtctgcactgaagatgggcgttatccgtccgctatgctggtcaaagagctgcagcccggcgcattttccgggaaaaaatggcggtaccgcggcagcgctgcactggaaatcgacgaagccgcagcacagcaatacgacgaaactctggagccaaaaatcaaatgccatcagcccagccaggaaaccttttatatcctcagtcaatcctttttgccggatgactgacacacaaaaccgggcaacagcactgagcggcggatacgccgcacaaaggaggcgcctttatggatgccgaatggatcaatataacacccgaaaacctgtcccgggagcacctgttctgcataatccgcagccggacatctcatcccggcgtggaagccaagcgccaatggctccgcggcgctcataaataaggacggctggctcaaaggcccgccgtcctgttttccgtttcagcccggtttttcgcttgtcccgcgggaaccgtcaggtgttgtcccggctgatgggttggcggagcagtaaatgcttcagcgctttccagttgaacggatagatcggatagaggtaatggcccgccagcggctttgtagtggcgatcagcacagccatcagcactaagccgccgagaaagccccaaatggaaaacagtgccgacaggatcagcagcagcacccgcatcagtttaaaggcataacccagttcaaaactgggctgggcaaagctggcaatggccacaaaggcgatatacaccagcacttccggcaccagccaattcgcccgcacagcaaaatcacccaaaatcagtgcgcccagcatactgaaagaattgctcagcacatccggcgtgttcagcgaagccagtttcagcagatcgacgatcaactccaacaacaacagctgcagcagaagcggcacgccgttgggctcctcaatgccgataaaggccagccacgagggaatatgctccggattcatcatggccaaataccacacaggtgtgatgaccagcgaggcaagaaacacgaaaaagcgtaccagacgaagatacgttcccaccagcggagggaaatagtagtcgttggtttcctgcataaaatcaaaaaaggaagtgggcaggatcatcaccgatggcgagttgtccaccatcagaatgatgctcccctccatcaccgaagccgccgcagcgtcaggccgctccgtgtagcgcacccggggaaagggattgaaccactgcgggcggtgtatggcttctgcaatgctttcctgccccatggagatggaatacacatcaattttgttgagacgctctcgaatttctccaagggcttcccgatccaccttatcatcgagataacacagcaccacgtccgcctgagagcgctcgcctacccggtgattttccatcaccaatctgggatcccggatgcggcggcggatcagagcggagttctttttcaccacctcggtaaatccatcatgggagccgcgcagcaccttgccgtctgacggttcctctacgccgcgggtggggtaagccttcgcatcgaacagcattgcccgttccatgccttccagcagcagggcgcatttgcccagcaggatcgatgtgacgattgtatccagatcctgctccgttccggtttcaccgtacgtgccgaaacggctggcaaaatcgtccatatccttcacactgcccagctgctgctcggtcagggacagaagaaaggcaaggatacgctcgatcacatcgtcctttccgtatccatccagaaaataaaggtgcgcccgtctgccgccaatgcgaagttcgcggccggatatatcataattgcggctcacaccaagaatatcatccaacagttttacattggtttgaaactgtgcggtcagctgctgcggggttttcgtcgcctgttccatgcaatgcccatcctttccttgccgttgctttagtatgacaaaaaggccgcaggattatacctgcggcctttttccatgccggtacagcggatcctccgttgttgtttgttttttacgggcgccgctgttcggcgtcctcttccgattgggaaacttccatggaaaacagggtttcataagcggcgcgctcggcgtcgttggtgggcggcgaaggcatcagccctgtgcactcgcaggatgacaccgtgtcgcagatatcaggaaattcactggcaaaatattgctttctgggcgttttcggcatgacatggacctccttatggatacttggtacccatagtttgtgccccgtatgtcaaaatatgcgcccggccctgcgcggccagcagctgcgaagatggaacgcagccagtttcatgctccgctgcttttcataacccgatattttttaaaaactgctcatcggcaatcagttgttccaacgcctcgcaggacgtcccgtactctgcgccatatgcttgtctgacccgctccagcgccgttttttcctccacaccctcttcgcacagtttacaataggcgttgaccacatgtacgatttgaacatccaaaatcccgcttttcttttttgtcaaataaggcttgagccagtgaagcattttcagcggctgcagaatttcaagcgccgcctcatcgctggccgtcctttccggcagcatctttttcaaatcatgcagcgcggcgcccatagccgcctgcttgatgctgcgctccgacagctccagccgcatagccagcttcttggcatattcttttacggtcagactgtgacaatacgctttggcgtccagatgggacataagacgcagcagacactcgcaaatggcttcgctctcctccaattcttccatgtgggttttattggaaagcacaaattcgatctgccggcgcagttctttataattgaccggcttgcttaaaaacaaatccacccggatgccctgtgcccgatcctccacatcgttgagtaccgtcagcagaatcactgcaatattctccgtttccgccgaagccttgatgcgcttgcagatctcaaagccattcataccgggcagcatgacatccagcagcaccagatccggccggaatgcctccaccatgggcagcacctctttcccctgatgcgcctgcgccacctcgtatccccactgcgagagcacatccgccagcagatcacagttggccagattatcgtcaaccaccagtatcttcgccatgttcttcctccttctcatcccgcagcggcagccagaacagcgcttccgtcccctgtccgattatgctgcgcagctccatatatccgccgtgcagctccacttgcttcttggacagcggcagacccaggccggtgccgccgtatgctctggaataggaattgtccacctgctcaaattcccggaagactcgttccatatcgcgctcttcgattccgatgccctcatcccggatggaaaagcgaacaaaaccccgttccttttccagcgcgacgctgacccaaatgcgccgggacggatcggaaaatttgatcgcatttgacagcagattatacaaaacctgcttgagcagaagcctgtccgcccacacatgcagatcctctggcacgatgtccaccataaactgcaactgcttttgataggccaggcttttgaccacagtcagagcttcttccaagacgtcatgcaccagcagacgtcccaaattaacctttgttttgccggcatcaatcttggagatatccaggatatcgttgatcagctgcagcaaatgggtactgctcagccagatgttcttcacatattttttctgcttttcatttaaggtaccgaaaatctcatccagcagcagttccgatgtggaaatgttgctgctcagcggcgtgcgcagttcatggctgacattggccagaaaggtgcttttgacacggttggactcccggagcgccttgaccgtctggctcagctccagcgtgcgggcatctaccatgctctcaagctgtttgttcatttcgcccagcgcctgaatatagcgttcaatatcttcccggtttttcttcagcgtctgcgccatggtctgcatggactgcagcaattcctccggctcgcttttaggctgatccggaatggcctgctcgtccaaaactgcaaaatcaccccgggcgatccgcttcgccatggcgcttcccactgtgatcggccgggcaatccgactgctgaccacgccgctcagcagcacaataaaaggcaagaggcacagcatgaccgacagcataatcagacgattcacattgagcatgctggtataggcttcctcttcaattccaacgccgatatagcccaccagcgtgccggaaagatcgtaaagcgcctggtaacggaaaaagtaattcccgccaatcggcgcctgttccgagccaaaatagtttccgctctccgccgcggcctgctgcacaaccgccgggatctccgtgcccagataatgcgtgtccgattccggcagattggaacagacacgggttgtattcgccgagatcgtcaggaaagaatggaccacattctggctgtacgcctccggataataatcgttgtgattgagcatttctcccaccagcaggtacccctgcagctgccggccatcgtaaattgggattcccacataactgatcagtccctgtcccagtgtcccggattgctgttccagcctcacgtcccatcgttcgcgggccgcgctgctttcttcaaacagggcgtcgatcggaaccagggcataagccgccgccat

SEQ ID NO: 483 - DNA, 1871 bp, Unknown
  16S sequences of unknown bacteria
ggtcaccgtccgatgacgcccaggagattttcagagtcatctgctcctccggcaggccgacgcccgggctgcgggtgatggtgtgcttatcatctgccgcaaaaccgatggtctccccatcgtgcagttccacatcattctccagcacataggaggtaaggtttgccagaaagtcccgcagatcgcccggcttggcatcggtacccagtacctccatctcgtctttgccaaacacatccagaccataggtgtagccgttcatgccattctcatcccgccagaggccgaaccagacccagttgaagatgggcagctcatcttcctgtatcatgtcggcaaaaccctcatagaaccggggctcaaacaccacgccgctggtgtagataccggtggcatattcctggcggcagcaggcagccactagttttgtgtagagcttgcctttttccagaacatcctcttctttgccaagcaccgccaccatgatgtgggctctgtgtttttgggccaccttaaccgcatccggccacatatagttgttctccgcattggcctcggcctcgccgccgggaatgggataggtggccaagctgacagcggccaacatatcgcccacttcaaacaccagtgcgtcgtcgtctttctcctcgctggcgtcgtattcctccactgggatgtcccatttttccttcatgtcccggatgaactgccctttatcccattctgccttggacagcagcacaaagccggtgaagacacctgtgtggtcactctcgtcttcgttctctgcctcggcccatttttctatctccttctgacactcctgaatcaccaccggggcatcctcgtcctcagggtccagctccgcccaccgctgggcgtaggggatggccttttcctcctgcccatagagatactggtaggcataggccatgcgcatattccactgggccttgtcctggccctcctcccggacagattccagcacctggatggcccgtcggagagccttatcccccttgtagttgggggttccctcctgatgatctcccaaaatagcgtaattctccagcgcccgtgccatggcgtaggcaatgcggtaatttcgccagtcctccgggatggcgttgagcgcctgaatgcagcgggtgtactcatcctcgtcgttccactgctcgatctgtgcgaagaattcttcctcattctgctgtgtataagggatatagtccatattcgtcagcgtttcgtccagctcggggacctgatcctcatcgtccggttccttctcgggcggcgttttcagattcacagtgcctgcttcccgacggaaggtgtggaagctggcccaggggatgtcgctgcactcgaagaactcctttgccatctggagcgccgtccgtatgtcccaggcgatgaagtccacatagccgcagaaaaggccggtggctccgccggtgagggtaagaacctccggtccgtcgccggtggtaaacacttcctccagcttgtcccggaagtcaaagattttctccgatccttcctcctcccgcagggtatccaggggatagcagaagaagcccgccactgcgccgtcggcatggagatcgtccataaagtcgttgtcggcattcagatagccgttgatgagcggcacacagcaagtggagccgaccatcacatccagccgccaatcggcatcgggatcttcattgggtttcatttcgtagccaagatagctctccagataggcttccggatcggtggagagttccagcccccgctccttcaaagcgtcgggcagctgggacataagtatggacggctctgccttgggttcctccagcacatcaaagctgtctatgtatctcatg

SEQ ID NO: 484 - DNA, 1575 bp, Unknown
  16S sequences of unknown bacteria
gtctttggtcaaacaataccacaataaaaatgtcgatgcaagtatttttggctaaaataagattttcggagaaaatttgaagtttttttaaaaaaggggttgacatattgcacttttgagcttataatgatgaagctgtttgagaaatgcgcttgtagctcagctggatagagtgactggctacgaaccagtaggtcaggggttcgagtcccttcaggcgcgccagagaaagtcgatcagagtaatctggtcgacttttttgcatgcaaattcgccgctctcttcccaacaatcgacttcttttacactttatgctagaataaaacaaagtattgaatgaaaagaggaagactgtatggagccttttctgcttaaaccctcctgcaaagattctatctggggcggcacaaaactaaaaaaacgctttcacaaggagcactccgtagatatcatttctgaatcctgggaactttctgtgcatccggccggactgagtttggcggccagcggtcctaaccgcagtgtgcctttggctgagttgattaaaaatcctgctgttaccggcaatttcgccgcttcttttacggtttttccattgatgatcaagtggattgattcccaactccccttatccattcaagttcatccagataacgattatgccatggcccatgaacaggatatgggaaaaacagaaatgtggtatatcatcgactgtgaaccggattcttatctatattatggtttttcaaaagaaatttcccgagaagaatttgcccatcgtattgcagatgacacgctgctggaagttgtccgaaaagtaccagttaaaaaaggagatgttttctttatcccttccggcactcttcatgcaattggtcccggcattctgttggcagaagtgcagcaaagctccaacgttacttaccggatctacgattatggccgcttggacactgatggaaagccccgccagcttcatgtggaaaaagccgttgatgttacaaagctcattccgattactgaatcatcaccgattcccctccccctttcttgtccgcaggatgaacttctggcctcttgcccttattttgcggtgattcgccagcagattaccttcccaaggcaatacaacggagatgccggttctttccatgctttgatgtgcgtagaagggcagggagtccttcaaacggtttcggaaacattaaccatcccctccggtgccaccgtttttgttccggctgacagcagcgcctttaccatttcagggaatttgaccctgttggatgtgtttgtccccgaccctgctttctttggataagcgtatctcagccacatcgtctgcccagatcacttacttttcgcaataggaagacccctcttccaccagtgatgttcttcaaaaattatcctttgccttatgttttcggcaagcttcaccattggaagatcacaatatttttagcttggatctcctgtgaaattccctgctttcccagataaaaatgcttccgctcccctcactgccggggagcattctttttgccaataatcaaaaccactagtaaacta

SEQ ID NO: 485 - DNA, 32759 bp, Unknown
  16S sequences of unknown bacteria
tgcgatagtggcgtagttggtaacgcgcgaccttgccaaggtcgagaccgcgggttcgagccccgtctatcgctctaaggctccgattgcatcggagcttttttattgcttgttctataaaaattctttctataataaaagccctgcactttcaggaaagaatatccgcattcaaaaatgcattccgtccgttttcctggtgcagggcttatttttatttgcttttagtggtggaacagtctgattccggtaaatgccatggccatattgtatttgttgcaggtctcaatgacatctgcatctcttacagatccgcctggctgtgcaatgtatttcacaccgctcttgtgagctctctcaatattatcgctgaatgggaagaatgcatcagatccaagcgtaacctctgtcatctgatccagccatgcacgtttctcctcttttgtaaatacagatggcttttcggtaaaggtcttttcccaatttccatctgccagaacatccatatattcatccccgatgtaaacgtcgattgcattgtcacgttctgctcttgagatggtatctttaaatggaagattcagaaccttagggctctgacgaaggaaccagttgtctgccttctgtcctgcaagacgtgtgcagtgtactctggactgctgtcctgctccaattccgattgcctgtccgtcttttacatagcatacagaattggactgggtatatttcagaacgatcagagaaaccttcatatcacgcttggcttcctcagataatactttgttttctgttacaagattggaaatcaatgcatcatcaatggcaagctcctgtcttccttgctcaaaggttacaccgaaaacctgtttatgttccagcggagcaggtacatattccgggtcgatctcgatcacgttgtagttaccctttttcttctgcttcagaatttcaagagcttcctctgtatatccgggagcgatcacgccatcggatacttctctcttgatcagaagtgctgtatctttgtcgcacacatcagagagggaaatgaaatcaccgaaggaggacattctgtcagcacctctggcacgggcataggcgcaggcaagaggggaaaactctttccagttcatgtcgtttacccagtagatcttcgccagggtctctgtcagcggaagtccgattgctgctcctgctggagaaacatgcttgaaggaagttgctgccggaagtccggttgcttttttcagatcgcgcaccagctgccagccgttaaatgcatccaggaagttgatgtatccaggtcttccggaaagaactttgatgggaagctcgcttccatcctccatgtaaattctggaaggtttctggttgggattgcagccatattttaattctaattctttcatgccaatttcctccgttttatcctcaaattcatccatttcaaatggaaaactgtctttttacttttataaatcttcttctcagtgatttttgttgatgatctttgtctcatattttccagttgcaatatcaatatatctcacaaaaagggaaaccttattgtcttcattcaggctctcccacagcatacctgcaaatgcatccatatcatccgggatggcaaccagctttggctctccctcaaaacttggaagaggatttccatcgcatttgtaggtgtggatgaaatgtccctcgccagccttggcattctggtatgcgaaggtgtagcggttgcaggaggaaggatctccattgttgcttttcagaatggacattgcgtagctgtagcttccgttctccacatgcatgactccggaaatacgaggcgtatagttcgggccgtccggctcaaactctctagaacgcagggactgctcgaaagtaagctgatgatccattccctcgtaaatggtatctgtctgatctccgttggtcacgattgttttatttccaagtacgcgtacaggtgcataaatgatcaggcttggatctaccagcttggaaggatcaaaggcctgtgtacggattccctctccgtcctctacaaacacacggttgcggctgttctcgcttcttcccatgataaaatacgcggtaactgccttggttccgtcagcggagcgaccgattacgattcctcttcccggataagaattctctttcagttctttgtcaagtgctatcatttccatgcagatgttctcctttcaagattagaacgtattatcctgtggtataaaaaaacgcctgggaagcccttcttccaggctgcccaggcggtcggcacaaattcagcactgcactccctgtgggtattcccacgatccgccagtcatgcagttcttttttatactacaatatttccaaaggtatttcaagatggaaaaaattttatttatgcggcaatttttttgtaacgctatgcataagagaatttcaggaaattcccataagcccctgatccactgtgatctgcgctgcaatgtccgctttcatctgctcccaggcatccggatgatccacataatattttgggcactctttgccggttacatcataatggcggatcacctgctcagaggtcagtccgaatctggcgcacagccaggcagtcagcttcactgtagaatcataggttgtctgctcgaacaccccagtctcgtcattgtggcagcactcaatggaaatggagtccacatttctggaattggtggcataggacatctccgaagtagggatgcactggatcacttccccctctaacccaaccacaaaatgactgctcaccttggcctcatgagtagtggcaagattttcaaaataatccctattattctgggctgtggcacctggattggccgtataatgaatggcaatgtaatccacctcattcagaggcagctgaggtctggaatactcatttggcgtcagaagctgcacatctatgtacggtgccccctgttccatccactgctgcagtccgctgctgtccgtattttctgcttctgaaaccgtcctcgctgcctgtttatttctctggccatgatacaccaccaaaataataattccagtcagcgccagcagaaaaaggagggccagaagcgccactctttggtttctctgacgggttcttcccgctttgtctaattttctctttttgttaaaagagggccgccttgaaaaagacggcccagcagattttcttttcatttatttgtcatctacactgtagtttggtgcttcttttgtaatgtggatgtcatgcggatgagactcttttaaggaagcagcggaaatcttcacgaatttaccgttctgcttcagagcttcaatgttctcagcaccacaataacccataccggaacgaagtcctccgatcagctggaatacagtatcctcaaggtgtcccttgtaagctacacgtccttctacgccttccggtacaagtttcttggcattctcctggaaatagcggtccttgctgccgttctccatggctgcaatggatcccatgccacgatataccttgtattttcttccctgatacagttcaaaggttcccgggctctcatcgcatcctgcaaacatgcttcccatcatgcagacattcgcacctgctgcgattgccttggtcatgtcaccggaatacttgataccgccgtcagcgatgatcggaatgccatactcttttgcgacttcatagcagtccataaccgccgtgatctgcggtacaccgatacctgcaacgacacgtgtcgtacagatggaaccaggtccgataccaaccttgactgcatctacaccagcctcgatcagcgcttttgctgcttcgcccgtcgcaacgtttcctgcgatcacctgcagatccggatatttttccttgatcatgcgaacacagttcaaaacgtttgcggaatggccatgcgcactgtccagtacgactacgtctacctgtgcttctacaagtgctgcggtacgttccagtacatttgcagtgattccgattgctgctccgcagagcagacgccccttcgcatcttttgccgaattcggatatttgatctgcttttcaatatcctttatcgtgataagacctttcaggttgaaatcatcatcgacgatcggaagcttttcttttcttgcctttgccaggatcttctttgcttcctcgatcgttgttccgacttttgcagtgacaagattctctgaagtcatcgattctttgatcttctttgagaagtcctcttcaaacaacagatcacggtttgtgatgatacccaccagtttgccattttccgtaattggaacgccggaaattcggaattttcccatcagctcatttgcatctgccagcgtatgctccggtgagagataaaacggatccgtgataacaccattttcagaacgctttactttgtcaacttcctcagcctgctgctcaatggacatattcttatgaataataccaatgccgccctggcgtgccatcgcgatcgccattctgtgttcggttacggtatccataccggcactcatcataggaatgttcagcttgatcttcttcgtcagataagtcgtcagatctacctgattcggaatcacttcggaataagcaggtaccaggagcacatcgtcaaatgtgattccctcgccaataatctgtcccatgtcattttcctctctttctgaatcggtcttttgtgaatttcatgctttgaatacatactctaacaaattcgcttttcaatgtcaactgcaaatttaatataaatttactttgcgcggtgcgatccggcggatatcgctgataatggaatcttccagctccacacggatcatctcctgccctttttctttgttgaatacaagcaaataactcttgacctgcggatccagagacgtataatcattgatcttcacaccctgcttgtttttgtaggaatcgattgcatgagaatctgacggtgccaggatctccagctctgccatatcgtaggtacccatttttttccgtttctgtcttgagtagatcgcatcaatatccagttctccattgacatacagatattcatactccacatcaaactttggtaccacaaagtaatccactgcgatcagaatcgcaccaacgatcaacagcggccacatcaaaagtccggccaccagacttaaaacggtcagtccgatcagtgcgcctttcagtacccgcatccccaccggtgtctgtcttttcaccagtatttctttgtaagagtcattcattttgtcaccctccgtttagtatatatttttctctttgtcagctgttttttcgttttccgttaccggtaagcctgtctgtaccgcttcatttttctgcacaaatgcacatgcagcccgcctgattgtccaggtaaaccggccattctaatcttctgctgccagacctgtgccaccaagcagataatctagaaactccactgctgtatccgtatgcttgttgttgccaaggatcactgcatagaccggttcgtcgtaataagcattaaattcttttatgatcggcgcatcctgcattttcagtgccaccggaacttctgtgccgcttcgtgtgtttccctgtgtatcggaatctgaaactgtctgtccgggcccggcagccgtttcatccacctgtcctgctgtatccgctgaagtctctgcagctgtattttcctgtgccggagatgtctctgcctcatcagaagacgctgattctgctcccgactccgtctgcctctcaatctcaccgtacaccagcaggtctgaccactgctccagctgttccttcgtcagaagtgtactaagatcagcaaatgcaccggaaccatcatacttgtcatacgctgactgattcagcagaagcacgtccacatcgccagctgcgatataagccgtcatcttcatctgatttgccgtaccatagtttgacatatcctcgtcatccagtgtcgtcatcgtatccacatggatctcatccttctcgccaatccctccgagatatgctgcaaaatctgctgcgattgcatccccgtctgcatccagcgcattgcaattgataaaataagcattcagcagcgtgttgatctgcatgttgtgataaatactcacgccaattgaaattgccagaatcacacaagctatcgctgccatcagcggcttatagtaatcccagatgtaaacaatccgctctccccacgaaagctttgacagttttttccattcctcacgtatcgtctcctgaatcgatctgccgtccattccactactccttcatctgcacgctttcgttccagtttaacacaaatgagggtaaactgtccatggtttaccctcattttataaagatttaatcgaatctctgtttatctgtcatcaccgtatccggcaacttctcagtttgcggcgcgacacgattacatcattcccatgccgccctggccgcctgccggcattgccggagtatcctctttgatgataccgactacggactctgtggtaagcagtgtagatgctacactggttgcgttctgcagtgcgcttcttgtaacctttgccgggtcaaggatgcctgcctgaaccatatctacgtatgtctcattgtaagcatcaaagcctgtgcctgctgctgactcacgcactttgtttacgataacagatccttccagacctgcatttgctgcgatgtggaacagcggagcttccagtgccttcagaatgatctttgcaccggtcttctcatcaccttcaagatctgcaaccttctcagcaactttctttgctgcgtggatgtaagcagatccgccgcctgcgatgataccctcctcaacagcagctcttgttgcgttgagtgcatcttccatacgaagttttgcttctttcatctcagtttctgttgcagcacctacacggataacagctacgccgcctgccagttttgcaagacgctcctgcagtttctctctgtcaaagtctgacttggtctcttcaatctgagctttcagctgtgcgattcttgccttgattgcatccttatcaccaagaccatcaacgataaccgtgctctctttctgaaccttaactgattttgcatggccgagcatttccagtgtcgcatccttcagttcaataccaacctcgtcggaaattacctgtccgcctgtcaggattgcgatatcctgcagcatctcttttcttctgtcgccatatcccggagcctttacgcccactacctggaatgtaccacgcagcttgttgacgatcagggtagtcagagcctcgccctcgatatcttcagcgataatcagaagctttctgccactctgtacgatctgctcaagcagcggaaggatctcctgaatgttgctgattttcttatccgtaatcaggatgcacggatcatccagaactgcttccattttctctgtatctgttgccatgtaagctgaaatatagcctctgtcgaactgcataccttctaccagatccagctctgtctgcatggttttggactcctcgatcgtgataacaccgtcaccagttaccttctccatcgcatctgcaacgagctggcctactttctcatctccggaagaaaccgttgctactcttgcgatctgctccttgccgcttaccttctggctcatctcacggattgcttctactgctgcatccgttgctttcttcattcctttacgaagaacgatcggatttgcgcctgctgccaggttcttcattccctcatgtaccatagcctgtgcaagtacggtagctgttgttgtaccatcgccggctacgtcgtttgtctttgctgctacttccttgatcagctgtgcgcccatgttctcgaatgcatctgcaagctcgatctcttttgcaatggtaacaccatcatttgtgatcagcggagcaccgtactgcttatccagtactacatttcttcctttcggtccaagtgtcacgcgaaccgtatctgcaagtttatttacgccgctctcaagagctgctctggcttctgcgccgtatttgatttcttttgccatgataatcaatctcctttttctgtctttctatcggattcttattttctgaatctctgtttttgatctgcagacccataagcctgctccatcttctatcagccttctacaacagcaagaatatcattctgtcttacgatgatatactcttcgtcgccaagctttacttcatttcctgaatacttggagtaaataaccttgtcgccagcttttacctgcatggtaacttcttttccatcaacgactccgcccgggcccactgcgattacttcagcttcctgcggtttctcttgtgttttgcttgccagaatgattccggattttgtcttttcttctgcctcatactgctttaatacaactctgtcacccaacggtactaatttcatatctgattcctccttagatagccaaagcggatattcgcaatccgcgtcgctgcttgctcataactgaatagctacttcgcagcttattcagttaaaatttctttcatttttctttattagcactcactagcatcgagtgctaaccaacacagatataatagtgaaattgtgtaaatattgcaacttccgtgaagtctgtatttttcatatttttttcttttttgctcttgttatctcttttttactctgtttttcttatctatccatatttttattcaaattttagccgaacggttatgaggcgacagcgaagcggattgctaatatccgctttgatcccggccagacataaaaactgccgcagaaaaacgattctctcatttctctgcagcagctcatttcctgcacttctgcttccagatgctttgcaggcatttttgctcttttgttttcaacgatgtgctcagatatttttgctctttcggatctccgccagctcatcgaacacaacatcattgagtaccttaatatacgtacctttcataccggaagatctggattcgatcacaccggcactctcaaacttgcgaagcgcattgacaatgacagatctcgtaatccccacgcggtctgcgatcttgctcgccaccagaattccttccgtcccgtcaagctcatcaaaaatatggatgatcgcttccatctcggagaaagaaagtgtactgattgcagacttcacaatctgcaccttgcggttttcttctgcattctcctcgttcacggaacgcatcatctccagtccaactaccgttgtaccgtattcgctcagaataatatcatcgatctcatactggcttccgtacttatacataaatacggtcccgagacgttcgccggcaatgtcgatcggattgataatcgcctgatactttcggacattctccccttcaaacccgagggtctccaggttcacattttcctttgtggaaagtacaccaagaagacgatcgttcagcagcggatcaataaaaccgcccaccttatccacgatcagctcaccgatctcatcaacgccatcgcacaaaccaactcccagcaccttgcccttccggctgatcacaaggatattggaattcaggataccggtaagaacgtcacagatatcgttgaacacgaccttactggtattgttgttatgcaggagctggtttatcttcctggttttatccagtaactgtacactcatgtcaaacctcctctacacacatcagatgcttttctgctattttttatactaacatataattttcagaaaatcaatgtatattgtgtgtattggcaaattttttctgatagttcagccatatgagaaatcaaccggctatttttcctgctcttcttctgttttttcacaaatatagccgcacattttatctgcgcagaccagacgattgcctttttctaccatataaccgccgcactgcgggcatttctttgccacaggtttctgccatgacatgaaatcacagtccggattgccctcgcaaccatagtatcttctcccctttttcgtctttcggattacgatatcttttccacatttcgggcaggctacgccaatcttctccagatacggcttcgtattgcggcagtccgggaatcccgggcaggcgaggaattttccgtgcggtccatatttgatcaccatatttcgtccgcactcctcacagacgacatccgtcacttcgtccgcaatctcgactttctccagatttttttccgcttcctgaaccgcctcatccagatccggataaaagttttccactaccgtcttccagtgaatcttgccctctccgattgaatcaagaagtgactccatattcgcggtaaagttgacatccacgatacttggaaatgcatccttcatgatattgttgaccacttcaccaagctccgtcatgtaaagatttttattttccttcgtgacataccgcctcgcaatgatcgttgtgatcgtcggcgcatacgtacttggacggccgattcccttttcctccagagcccgtaccagggatgcctccgtgtaatgcgccggcggctgtgtaaaatgctggcggctgtcaagttctgagagcttcagttccatgccaggctcaatttttccggtaattacattgttttcttcttttgtatcttcgctttccgtgtacacactccggaatccttcaaatacaagacgcgatgcagatgcattgaaccgataaccggctgctccgatccgtacagcggtcgtctcatagcgtgccggtgtcatccggcttgccgcaaaccgtttccagatcagctgatacaaacggaactgatcccttcccagcgattctttcatctctgcaggagtgcgcgaaagatcggttgggcggattgcctcatgtgcatcctggatcttctttccgtcatttgcagccgcaacacgctctgccacatactccgctccgtactgctcctcaatatacactctcgctgccgcatccgcttcctccgagattcgggtggaatccgtacgcagatacgtgatcagtccgactgtaccacttcccttcagttcaacgccttcatagagctgctgtgcaaggcgcatcgtcttctgagtcgaaaaattcagaacatttgctgcctcctgctgcaaggtacttgtcgtaaacggcgccggcgcttttttcacgcgctcccctttttttacctcttctaccacgtaggatgcatgttccagcgcctttttgagctcatccatctgctccgctgacccgatcgccagcttcttgtcctttccgtaaaactttgcagcaagcggtttcttctcacctggcactgccagcatcgcatccagtgtccagtattcctccggaataaatgcattgatctcatcctcccggtctccgataatacgcagcgcaaccgactgtacacggccggcactcagcccccgctttaccttctgccagagcagcgggctgatccggtagccaaccatgcggtccagaatccttcgtgtctgctgtgcatccaccaggtccatatcaatcggtcttgcatgcttcaaagattccttgaccgcgcttttcgtgatctcgttgaacgtgattctcattttcttcgtctcatccagcttcagcgcctcagccagatgccacgaaattgcctccccctcccggtcagggtccgttgcaagatagactttatctgcttttttctcagccttgcgcagcgcggcgagaatatctccctttcctcttattgtaatatatttcggttcgtaatcatgctcgacatccactccgaggcggctcttcggaagatcccttacgtgtccgtttgaagccagcacttcataattcgatcccagaaattttttaattgtttttaccttcgcaggtgactccacgatcaccagatatttgggcatagcaataacctcctaatgaaacagacaaatccatctttggtctttctctatctcacctttacatagtagtttctttccacttccctgatgagaccccttgcttcaagcgcaagcaggcttccgcttaagtccgcaagagaaagggaagtacattcttccagctcccataggctttttgaatgcaaatcgagactactatacactaatttttctgaaggtgcaagtgctatgtcagacactttattctttttttgctgccgaaaatcgggaaatacctgttctgcaaagctctccggtgacaggataacacctgctccctgtgcaatcagctcattgcatccacggctcagttcatcatccagccgtcccggaaccgccagaaccgttctcccctgctccagcgcataatccgccgtgatcaaggatccgcttccatgctttgcctcaatcaccgtcacaatctcggaaagtccgctgatgatccggttgcgcagcggaaaatgataacgcagcggtttcgtaccgggcggaaactcggaaagcacaccgccttcttcctccaggcggtcatacaggcggtcatttgcacgcggatagcgacagtccacaccgcctcccaccaccgcgaaacttgctccgcccgccgagagggccgcccactgagctgctccgtcgattccatacgcagcgccgctcacaacttcaccgcctgcctgtgcgatctgtccggcgagctgctccgcaaggtgttttccatagtgtgtgcagacacgcgctcccaccaccgcaatctgctttttctcttctgccggaaggcgtcccttataaaaaataccatacgggaaatcccggatcgaccgcagcagcttcggataatctgactgctcacaactggtaaattgtattccaagctgcctgttcttatacacggtttcctgtggatcgctttccttttgatgtgtttccacacagcccacccagtcgcatccatgctcttccaggtgcttccactccccggcttccgcctgccagactccctttgggtctccaaaacagcgcagcaaaatttcccggtgtctgcgataaattccgggaatgctgcaaaaccattcccagtaaaatgactcgatgcagttcgctgctgtttcttctatcctattttgaatctcttctgtattttcactttcaaaagtcataaatgcaaatttcctgattttcggatccctttccgtgacattttttctgaccggccacttttatatattgtaactgttcagagccaagcaaaatttcataaaacaggcgtaaaatgctcgcatttttaagcctgtttttgaaattttatttggcggatacgccacaccgacgaaatgcgtagcattttggaggttggctctgaacagttactatatattttatttttctgtgatctgcagcgcactgcttcacatcagatattcatccggccgatacaaaaatgcctcattcagatgattgaccgttactctttttgcaccttccatatcagcgattgtccgtgccacacgaagcatacggtgatacgctcttgcagtcagatgccttcgttcaaacagatccgccagtcgctccttttctttttgtccgaacatacagtatggctccagggccgaaggtggaatttccgagttgaaacgccatgcttttccctgatagcgctgttgctgcagcctgtgtaccgcttcaacgcgatgccggatgcacgaagaactttcttcctttatctcacttaccagatcctgataacggatctgctccgactgcacatgcagatcaatccggtcaagtagtggccggctgattctcgacagatagcgccgcacatctccctcccggcaggtacagcgttttcggtctggataatacccgcatttacagggattccgcgatgccacaagcatgaaatccgcaggaaatatgtaagttccactgctccttgcgatccgtacctccgcgtcctccagcggctgccgaaggatctccagcgtctctttttgaaattctggaagctcatcaaggtacaaaacgccccgatgcgccagactgatctctccgggatgcggcacgactccgcctcctgcaagagcgctggctgataccgtgtgatgcggcatccgaaacggacggctcgtcagaatcccttccccgggaagtgtccctgccacgctgtgaatcctggaaacctccagcgactcttccagtgtcaaaagcggaaggatcgacggtatacattttgcagtcattgacttgccagaccccggcggtccgctgatcagaaggttatgcattccactcgccgcaatctctgcagcccgcttcacaattttctgcccatggatatctgcaaaatccggtccatcacccgaaactctcttttgaaatttttcttctatattaatagaagttctttgcagcttcgctccgccggtcagatgatctgccagttcacgcagatgcctgattccgtatactgcaatttcaccaaccgcagctgcttccaccgcgtttgcctgcggcaccatacaggcatggcatcccgtgcgcttcgcttccatcaccatacccagaatccctcgaatcccctgtacacttccatccaggctcagctctcccgcaaaaaaaatgccattcagcatcttctgcggcagatatccatatgcggccatcacagcaaccgcaatcggcaaatcaaatcctgcgccaaattttcggatatccccaggcgccaggttcaccgtgatcttcctcggctgcagatgataaccggaattgcgcagcgctgtgcgaacacgatcctgtgcctcccgcacctctgatgccagatagcccaccatggaaaatcccggcaggccgtcgctgacatccgcttccactgctaccatatggctgtcgattcctgtgattgctgctgattttactgttccaaacaaaacggttcgcctcttctttcgtttctgctctgtgttgcttttgctctcttttttgtttttcttcacttcttctgtttttatggatgctacccatttccattttcctgttctttatgcttatcctgcttttataccctgctaatgtagagatccatcatccatctttttagttagttttagatttctttttgttttatattattctctttttatatttaatttccatgtgaatatagattatcacatttctctgttttgtcaagcaaaaagagacatcacaaagaatatttttctctgtaatgtctcttttccgttttcatttcatgttttaccagagtcgggcaaatcccatgcggggaataagaagcagactgcgaataccaataagattattcggtcagcacctttactccatcaaccgccagccctccgtccgcagccatctgcgccgtttctgatagtccggcaggactttttccacttcctgccagaacagcacagagtggttcatctgcttccgatggcacagttcatgtaccactacgtaatcaagcacttccggtggtgcaaggatcagccggaaattataattaagatttccggtgcggctgcagctgccccatcgcgatttctggtcacgaatcgcaatttttccatagcttacgccaaggatccccgcaaaaaacgcagtccgctctgcaaaacgatcccttgcctgttttctacaggcctgcagctgcgcctctgtcgcaccggaaaaaagtcgttcttcttcgccacgcatctgctgcttctcctggtgcagcgtgatccatggtttcttctcccggataaacgtgcgaatcgaggtttccggcatgcgcatcggcgctcttgctaccacagttccatccctttgcagcaaaattgcaaggctcttgcggcggctgcgaatcagtttaaatgaaatcccggcttcttccagccatttttctgtttcagatccatttttccttctctctgccatatcctcgccaaccttagtatacctgcggcagccatgcccacgcaagcggtgatactgcggcgatatcgatccaggaaagatatcctccctccattctccgctcacctgtattttcagggaagaccggaagacgtttttcctccagctccggaagcgatatcagtcctccgtctgcataggccttcagcctttttgctgtactctccatgcggccgctcatgccataatagcggatatcaaggacttcccagccaaatacctttccttcattcatccagagcgtctcacgcagactgtggcaacgccgaactccggcggtaagcgcagggatttctgtctctgcgatgttcttcagaacttctttttcccccttctgataagcttccaggatctgaagtccaaggtccgctttctttgacagaatgcccgcctccatttcatacaggtccaaaatccctttcatctctgtgctccagaagcccgggactgtcctgtgcagtgcttttccgctctccagcttttctgcgatctcccgataatagcttccgtaacgcacgccctctgtctgcccatcataaattccaagcagcaggtcctggaaaaacagtcctttagacggatctgccccgactgctccgtcagacatcttgccggacggaagatcaaattttccaagttccagatacgtctgataatcacagccggtcaggaattcaaactgcccgctgatccgtttttcatccggttcttctccaaatccgtattctgcagcgagaatcaccggtccaagtccggcaaactgaggtgtttccgtaccatcatccgcccacagcgtatagattgcatcccgcagcttttctgcccggcacgcacgaaatgccgcacgcgtcactgcctctgccgtctgcagcgccggagcgattccgcaccacgtccagccaccgcctgcaaaaatcacgcggtcggtcagctggcggtgcagtttgatataattgcggtagtattcctcatccgtatggtaatagtcccagtaaacaagcgacattccttccggcggaagcgcacctgtccgcatatcggtatccggctttacattataataatcttcagtctccgagtgaacgcggaaatacatatctgaccagatcatcggttccagtccttcttctttgcacagttccatcacccggtccatatgctggcggatgatctcccgcttcggcgtatagccatttttaatcagatattttccaaggccaaggctccatgcttcgtccattccaagatggacctttcttgtccggaaacagcgcgatacctgccggatgcaggctcgcagaaaatcataaactttttcatctccgacaagcgcaatatcactcgtatcccgcagatcccgcatcgccggccagcgaagcggctgctgcagatggccaagcgcctcgatacacggtatcagctcaataccaagcatctgcgcgtaatcatccagctctttaaattcttccgctgtatatctgccccggagtgcaccaaaatacggatattccggtacttcatacgtgtcctccgtgtacagcatcatcacattcattccgacacaggcctgcattctcagccatgccttcgccgctgacacgctcatgacacagtttctggaactgtcgaccatgcagccgttgtgatccagccagatttcttcccgctttgcatacggcctctctgtcccatgcgcctccagctgcatcacaagactcatcagtccgcgatacagaaatactggctcaggcgccgtaatcaccgcctgctctttttcataagagatggtaatttcacgttctgtactttctttcaattgtacacgtattcccgacttgcagtcataaccgcgctccaaaagcagttcccggaagccgcgttcgtatttttttgaatcttctgtcaaaatgaaatccataaaaacctccccaaaaatacatttttatcaattctattctacatggcacggtcggcaaatacaatctgtttttcgaaaaatgtaaatctttctattttgcttgacttttctgctttaaagcgttatacttttcgcagattttgcggcagtttaaagcgttggtgagccgcagtattatttctcacacaggaggtacatcactatgaaaaagaatgttatttctgcgctccttgtagctgcagcagtcggggtcatgacggtctgcccggtcggcgctgaggaaagccagacgtacaatgttggtatctgtcagcttgtgcagcatgtcgcactcgacgcagcaacagagggctttaaggacgcgcttaccgacaagctcggcgacgcagttacatttgacgagcagaatgcacagggcgattccaatacgtgttccaccatcatcaacagcttcgtttccaacgatgtggatctgatccttgcaaacgccacacctgcactgcaggccgcagcggcaggcactgatacgatcccgatcctcggtaccgcagttacggaatatggcgtagcactcggccttgatgatttcaacggtactgtcggcggaaatatttccggtacctctgatcttgctccgcttgatcagcaggcagccatgcttcaggagctgtttccggatgcaaaaaatgtaggacttctctactgctccgctgaaccaaattcccagtatcaggtagatactgtaaaggctgcccttgaggatcttggttatacgtgtgaatattacgcattctctgattccaacgatctttcctccgttgtaacaaccgctgtttccgaatcagacgtgatctacgtaccgacggacaacactgttgcttccaacacagagattatcaacaatatctgccttccggaacaggttccggttatcacaggcgaggaaggtatctgttccggatgcggcgtagcgactctttccatcaactactatgaccttggctatgcaaccggcgagatggccgtaaaaatccttgcagacggcgaagacatctctaccatgccgatcgaatatgctccgaaatttaccaaagagtacaacgcagagatctgcgaggagctcggtgtcaccgttccggacgactacgttgcaatcggtgcatctgacgcagaggcccagaccgaagctgtaaccgaataagacgcagaaaaagcagtacgttctgaaaaagactgctctgcttacaaatcggacattcgcagttcgcgaagcgactgcgttcaaacaagccggaaacggactggcgttcttttggcgcagtccttctccggctttcctgtcatctgcgcagtctccctgtcaaaacggatattctcgatttaatctgaactggaggaacttttttatgaatatcatgactcttatcaatgcgctcccgggcgcggtcgcccagggactgatctggggcattatggcgatcggcgtatatcttacgtttcgcattcttgatttcgccgatctgactgttgacggctccatgtgtaccggcggtgcggtctgcattatgatgatgcaggccggttttggtgtctggccatccatgctggcagccacgggcgcaggcatgctcaccggacttgctaccggtatctttcacacctgcatgggaatcccggcaatcctttccggtattctgacccagctttctctttactccgtcaatctgaaaattatgggaaaggcaaatcaggcgatctctgtcggcaaatatgacctgctcgtctccctgcgctacatcaaaggcgtaccattttatcagaacacaatctttgtcgtcgctgtctttatcgtcgttctgattgccgtgctgtactggttcttcggcactgagcttggctgtgcgatccgtgcaaccggctgcaacagcagcatgtcccgcgcacagggcatcaacaccagcttcaataaagtgcttggcctgatggtttcaaacggtcttgtcgctctttccagtgcattgcttgcacagtatcagggctttgcagatatcaatatgggccgcggtgccatcgtcatcggtctggccgctgtcatcatcggagaggctgtattcagcaaaattttccgcaattttgcgctgcgtctcctcggtgttgcacttggttccatcctctactatctcgtattacagaccgtcatctggctcggcattgataccgacctgctgaagcttctttccgcaatcgtcgttgccatcttcctggcaactccgtactggaagggaaaatatttttcaaaacctatgaaacggggaggaaattcaaatgcttgagctgaaaaatatctacaaaacctttaatcctgctactatcaatgaaaaggtagcactcaacggcgtttctctctccttaaatgacggagatttcgtcacagtcatcggcggaaacggagccggaaaatcgactctgctcaatgcggtggccggcacctggtttgtcgacgaaggcagcatcctcatcgacgggaatgatgtcaccaaacttccggaacataagcgtgccgtttatctcgggcgtgttttccaggatccgatgaccggaaccgccgccacaatggaaattcaggaaaatctggcactcgcaaagcgccgtggaaacaggcgttctctccgtcccggtatcacaaagcaggaacgggaggaatacgtttccctgctcgcttccctcggtcttggtcttgaaaaccgtctcacctccaaggtaggacttctctccggcggacagcgccaggctctcacactgcttatggccaccctgaagaagccaaagcttctgctgcttgacgagcacaccgctgcgctcgatccgaaaactgcagccaaggtactctctatcaccgatcagatcgtcaaccgcgaccatctgactactctgatgatcacacacaatatgcgtgatgcgatccttcacggcaaccgcctgatcatgatgagtgagggaaaaatcattctcgacatcagcggagaagaaaagaaaaagctgacggtaaaagatctgcttgagcagtttgaaaaagtcagcggcgaagaatttgcaaacgaccaggcactgcttgggtaactcataacaaacaaaaagtcagaagatatctcattttacaatgatatgatctcttctgacttttttattcctttcaaaaccctgctatgcttctttccctgccgatcgctcctcctcaaagcttcccagacgcctcaagatccgcaccagctccctgctgtcgcgttcgccaagatacgcctgcagctttcggtaccatgcatacagccgttcattcgtccgcaccgcatgctcccggccctgctccgtgatgtatacaatcactcttctgctgtctttcggatcatcccttctcgaaatcagctctttttcttccaggcgctttaatatatccgccattctgccggagccaacatccagctgctctttcaggaaaccagatgacactccatttttcttgtatgcgaggtaatgaagcagtccctcctcgccacttacactggccgtcgcctctttttgcagatgccatctgccaagattggcaaacatgacatacagctcccggctgatcacgtctgccgactcttccgttggctcctgcagctctgaaagaaacggatctgcgctgttttgtacctccggccggcagacagcctcctgtcctttcgctttcccacaccctgctctgttcattgtcactttgcctcagcgctgatctctcggcacatactcacgctctaccatcaggctcttataagccggacggatgatcttctccatgctcaccagctcctcaatccggtgtgcactccagccggtaatacgtgcaatcgcaaacagcggcgtatacagctccatcggaatgccaagcatctcatacacaaaaccactgtagaagtcgatgtttgggctgacgcctttatacatcttgcgctgctttgcgatcagcatcggtgcaatctcctcgatccgctgatacagccccatgtcttcctctctgtttttctgtactgcaagacgctccacaaagctcttcagtacgcgttcacgcggatcagacaccgaatagaccgcatgtcccataccataaatcagtcctttatggtcaaacgtctctttattcaggatcttcgccagataatactcaatctcctcgtcgtccttataatttttcacatgtgcacggatatcatccatcattttcatgaccatcagatttgctccgccatgcttcggtcccttcagagaacagagcgccgctgcaatcgcagaatatgtatctgaacctgacgacgtgacgacacgcgtcgtaaacgtggaattgtttccgccgccatgctccatatgcaggatcagtgcaacctcaagcactttcgcttccagattgttgaactctttgtccggacgcagcattcgcaggaaattttcagcggtggaaagtgacggatccgggcggtgaatgtacatgctttcatctttgtcataatggttgtatgcgtgataagcatataccgccagcatcgaaaaaacgctgatcagcatcatacactgacgcagtacattgtccagatcaagaactgtagcatccttatcatacgatgcaagcgtcagcacacttttcgtcatggaattcatgatgtcggcactcggcgctttcatgataacgtcacgcacaaaatttgtcggaaggtctctgcttagtgcaagcacctccttaaaattcttcatctctgtctcgggcggcagctccccaaacaaaagcaggtatgctgtctcttcaaatccaaacagggaatctccgctgccccggatcagatcttccacattgtatccgcggtaccacagctgtccatcgcagggaacgcgctgtccgtcttcctgtttaaaggcgaccacattggaaatatttgtcagtccggtcaggacgccctgtccgttcaggtcacgcagtccgcgcttcacaccgtatttcaggtacagatccttatcgatcgtatcgacctgctggcacttcttcgcatgctctgcggtaaattcattcatattcatatcagatgccctcccctgttttattagtctctctgatccggcggtcactggtgctttctccatatcgtcaaaaataccctttgcgcaccagatatctcgcactgcgagttattcaaataatatcataaaaaagggagatgtcaacccactttagaaaaacttaatattagctaaaacaactctgcttccagttcctctcgcgtcttatatccgacggattttttcacgatctctccgtctttcatcagtaccagcatcggaattgcggctgctttgaaacgctgtaccagctccatctcttcatctgcattgacctttccaacgatgatctccggatgcgcctcgctgatctcctccacgatcggtgcaagcatctggcacggtccgcaccatacagcccagatatcaatcagcaccggcttgtctgcctttaatactttctcctcaaaattttcttttgttattgtaagtactgccatttttattctccttttccttttttcttcattattcactttttcccgaattctgtcaagtacgaagaagtgaagtcatgcatgagaccccgattgcacttcttctctttttttactataatatacctgaataaatatacctgaatatacctgcctgctcaatgtcaggaaaacttataccgtcatttcattttccacagaaaggagcctcatgaaattacccggctactattcctccggacagtttgcgaaaatggcaagcgtctcggttcgtacaatccgtttttatgataaacagaatatcctgaagccttcctgcgtcacaccgtccggcgcccgtttttatacagattctgattttgccaggctgcagcagatccttctgctcaaataccttggtttctcactcgatgacatccgtgagatgacgatcaatgacctcgactgccacttcatgctcagctctctgaaaatgcagaaaaaactgattcaggaccgcatggaacagcttcagctcgtcgaacacgcaatcgacaacaccatttctgccatcggtgagcaaaagcagatcgactggagccagatgctcgatctgatccacctcactaatatggaaaaaagcctcaaaacgcagtatcaggatgccacaaatatttccgcgcgcatccagctgcaccgcgattattccatcaatcaggaaggctggttcccctggctgtaccggcaaagtactattcactccggcatggaaatacttgaagtcggctgcggcaccggcgcactctggcaggaaaacagagaccgtatcccggaccacatacacattacactctctgatatctcggatggcatgctgcgtgatgccaggcgaaccatcggcgcacaggacaggcgcttttcttttctgacctttgactgctgctccattccgtttccggatgaatcctttgaccttatctttgccaatcacgtcctgttttactgcaatgatctcgcttccgtcttcgaagaaatccgacgcgtcctgcgtcccggcggaactttcatctgcagtacctacggaaagcatcacatgcaggagatcagcgcacttgtccaggattttgatgcccgtatcgtcctctccgcggaaaagctgtacgaccgcttcgggctctcaggaggtgccagtctcctgcagccatatttttcctccgtttccagacgcatgtatgaggatgcgatccgtcttgaccgcccggaaccgctgattgagtacattctttcctgtcacgggaatcaaaatcaattactgctcgaccgctaccatgatttccgcgcctttgtcgagaaaaaagtacagagtggattttctattacaaaggaagccggtattttcctttgccgcagataaattccacctgcccactgcttattgctccgcgcaacctcgcaggggacttacttgattcggttaaaataaaaaatgagcaaaaaagaaaaaaacacttgcaggtgacgttacgtcatcttttataatagctgcatgacagaagaaaccacactcgatacatgaccggtcaatccggtacattatacaaaggagggttatcctatgaagggaatcattctcgccggcggatccggcacacgtttgtatccactcactatggtaacgtcaaaacagcttcttccgatctacgacaagccaatgatctactatcccatgtcggttctgatgaatgccggaatccgtgatatcctgatcatctcaacacctcaggatacgccacgcttccacgaactgctcggtgacggccaccagtttggtgtgcacctgacttacgccgtacagccaagcccggacggactggcacaggcattcatcatcggagaagaatttatcggagatgacaccgtagccatggtactcggcgataatatttttaccggccagggacttcagcagcgccttaaggatgctgttttaaatgcagagaccggcaaaggtgcaaccgtattcggctattatgtcgatgatccggagcgctttggcatcgtcgaattcaatgaggaaggcaaagcagtctccatcgaagaaaaacctgcccatccaaaaagcaattactgcgtcaccggactgtatttctacgataataaagtcgtggaatatgccaaaaatttaaagccaagcgcacgcggcgagctcgaaatcacggatctgaaccgcatctatctggaaaacgggaatctgaatgtcgaactgctcggacagggctttacctggctggataccggcacacacgaaagcctcgttgaagcaaccaacttcgtcaagacgattgaatcgcatcagcatcgaaagatcgcctgcctcgaggaaatcgcttacttaaacggctggatcacagaagaagaagtgctgaaagtttacgaagtattgaaaaaaaatcagtacggacagtatttgaaggatgtactggaccacaaatatatcgatattctgcaccggtaaatttaagtgcttatttaaacatcaaacgcaaaggagattttatcacatatgaacattatcgttaccggcggtgccggatttatcggaagcaactttatttttcacatgcttaaggctcatccggattaccggatcgtctgcctagactgcctgacctacgcgggcaatctttccacgctcgctccggtcatggataagccgaatttccgttttgtaaaagacagcatcacggaccgtgaagccgtttaccgtctctttgaggaagagcatccggacatcgtagtgaacttcgcagctgagtctcacgtagaccgctccatcgaaaacccggaaattttccttgataccaacatcaaaggaaccgctgttctgatggatgcctgccgcaaatacggcatcacccgttatcatcaggtatcaaccgacgaagtgtacggagatcttccgctggaccgcccggatcttttctttacagaggagaccccgatccataccagctccccgtacagttcttccaaggcaggcgcagatcttctcgtcctcgcctaccatcgcacgtatggactcccggtcacgatcagccgctgctccaacaactacgggccttatcattttccggagaaactgatcccactcatgatcgccaatgcattaaacgacaaaccgcttccggtctacggaaaaggagaaaacgtgcgcgactggctgtacgttgaggatcactgccgcgcgatcgatctgatcatccacaaaggacgtgtcggcgaagtctacaacgtcggcggacacaatgaaatgcgcaacatcgatatcgtaaaactcatctgccgcgaactcggcaaaccggaaagcctgatcacctacgtagcagaccgtaagggacatgacatgcgttacgcgatcgatccgaccaagatccacaatgaactcggctggctgccggaaacaaaatttgcagacggaatcaaaaagaccatcgactggtatttaaacaaccgtgaatggtgggaaacgatcatttccggcgaatatcagaattactacaaaaaaatgtacggaaaccgctaaggaggcctcttatgaaagtatttgttaccggagtcggcggacagctcggccatgatgtcatcaatgagctggtaaaacgtggccacgcatgcgtcggatcggatcttgcaccggaatattccggaatttcagacggtactgccgtcaccacagcaccttatgtgcagctggatatcacggacagccaggctgtctcccgcgtcatagaagagacagcacctgatgtcatcatacactgcgctgcctggaccgcggtcgatctcgcagaggacgaggataaaattgcaaaagtacgcgctatcaatgtcgggggcaccgaaaatatcgcccgtgcctgcaggaagatcgatgcaaaaatgatttacctctccacagactacgtctttaacggtcagggcaccacaccatgggaaccggactgcaaagattatcagccgctgaatgtatatggaaagacaaagctggacggagaactcgccgtctcctccctgcttgaaaagtattttattgtccgtatcgcatgggtattcggagcgaacggaaataacttcatcaagaccatgttaaacgtcggaaaaacacacggcacgctccgcgtagtcaatgaccagatcggtacccctacctatacatttgacctcgcggtactgctctgtgatatggcagaaagcagcaaatacggttactatcacgcgacaaacgagggcggctacatcagctggtatgattttacgaaagaaatcttccgccaggcagtggagctgggccataccgaatactcagaggaccgtctcacagtgctcccggttacaactgccgaatacggtctttccaaagcagccagaccgttcaacagccggcttgacaagagcaaacttgctgcaaacggtttctctccgcttcccacctggcaggatgcacttcaccgctatctcatgcaatatccgttttgacccactcaggtgcagcgtggtggattacaaagatccattttgaacactttaaacaaagaaaaagcgctctcagatcagatcatgacagcctgatttgaagcgcttctgacagaatatttcaggagattaacaatgggacagattaaagttgaaaaaaatgcaggcggcatcgaaggactctgcacgattaccccaaccgtgcatggcgatgcccgtggatattttgtagaaacctacaatcagaatgatatgaaagaagccggactgaccatggaattcgtccaggacaaccagtccagttccataaaaggcgtcctgcgcggccttcattatcagaaagagcatccgcagggaaaactggtacgtgttatccgcggttctgtctttgacgtggctgtggacctgcgcaaagacagcaaaacctacggcaaatggtacggaattgaacttaccgaggaaaaccataaacagttctatattccgcagggcttcgcgcatggatttcttgtgctcagcgatatcgccgaattctgctataaatgcacggacttctatcgtccgggtgacgaaggcggcatggcctggaatgatccggagcttggcatcgtatggccgcaggtagtcggcacttaccatggcactccttcggcagagggttatacgctggcagacggcacgccgctgaatttaagtgataaagatcagaaatggcttggatttaaggacacatttactttctgacctgtttcagccaaattatagtactcacatttctttccaggttacagcctttcgtaaccgggatttttcagcaaataaaaaagtctgggaaatccatttttctgatttctcaggcttcttttcctaaatttctttttgcggttttaaaaatccggtcagaaaacttctgtattattctttcctactacgatataagcatccgcgttattcgcattctctaccgtacccggcaattcgatctcgctttttacttcatccattccagattcatacacattggaatttgggaaaatagaccggagatcctcgcctaattccgcattctttgtgtagatcgttgtgccttcctccttatgagaatagcttccaacagaaatcgtcttgtatccgccctttttcagcacttctttccacatcgaagcagcaccttctttgccgcttgcattcagcactacgatcttgatcgaacgcagtttttggggcaaagcagtttttgtttcttcactttctgattctgattcggattccgtctctgtttcactttctgtttcagcagaaagttctgtctcactctcggattctgtactttctgcagcgtcagttttgtccgtttctgattctgactcgctttccgtctcagtctcgcctttcggggaatcagtcatattttttccagactgcttcttttccgtctgtttctctgtctgcttttccgtttctgtctcactcatacgctctgcacggacatactcagtctcacctgatgccatctgctcgatctcctcacggtaagccgcctttctctgccgattttcataaaaaaggaaaccaatgcagccgatcagtgccagcacaatcagtatatatagaaccactttgaatggatttctttcagattcaggatttctgtttttcgccatattctgcactcctattacagtaataatgtaatcaacataaccgattaatcaacgaattgatatttatttgtgcatccccgtataaaatataatgtgaaagtgaggatatacacaattgaatcagggaacttgcctgattcagtcaagtaaaatacctgcaatacacatgcacagatacagaacggggctcctttcgaagactccgtcctgcctgttcacttcattgcgatgtgaaaatctactgagctgctgcctctgtagccacctcagttgcggcttctgttacagctgcttctgtagctgcctcagtcgctgcttccgtcacaaccgcttccgttgctgcctccgttacagcctgagctgccaccggagccttcagagcttcttccggattctctgtgtagagaatcatgatcgggccaaggcacgggaacgttgctgtaatctcaccggtctctgcaacatagtcgtccagttcgatgaaatatggatctgctgtaaacgggtcaatctgcataattgcaagattctccagcttcaggtcttttgccggctctactttcatagaagccttgattccctctggtgcttcctccgcaacagtcacctcagtctgggcttctgtctcaagagcagcctcagtctgggcctctacactatcctcatcagctgccttgtaagctacctctgtaccatttgtgattacaagatcaacaaacggtgtgagcgccttatacagcgtcggatcaatcacattacctttggtggttttgatctcctgagtcagatcaactccaagtgcttccagcacatccacaactgtagtaactgtaagatcatcatcgtcattataacggctgacgatatcttttacagtttcatcttcatacttatcaggatcagcattggtaactgtcagccaccagccatctctgatctcgcctgataacagtgtcggtgcttccggaatcagttctccgatgctcggtgcggcaagtgcgctggcagacatgccgagtgccatcgttgccgcgcagaaaaatgcggtaaacttcttcatgttcactcctcctttcctgaaaatttgtccggcggaaacccgccgatttatgttcaaacttattgctaagtttaaaccagatttaatttcggtctcagacctcttcataaaacagatcgatgaccagctgccgcagtgcatcttcgtcgacataaaactcatcgtgcagttcaccggcggaatcctttcctgtcggcctgtaataatccgcatcagtaaaagataccttctccagaagtctcgccagggacagatatttattcttcgtaatgctcgtctgaagatagtcattcatctgaccaatctcctgccagagctgatccggttcactggcaagccggtctttcagcaggtcgacataagctgtcacatacgcctgctggcgctcaatacggccttcgttgctgaaatctgcggccgtgtctctgtgctgcagaaaatctttgacattggaatcatccagtgtcacgacagcgccctttttcagttcaggatacatcgctgcaaggtcatcattcggaacagtcactgtcacaccgccgaccagatcattgatcgaagtgatcgaggactgatttgtgacagcatattcatcaatcgagatgccgagaagcttctccactgcttccttcagatcctcgcagcttacctctccgccgtctccatagctgtacgcatatccgagatggctgacgtaagtccccatgtcctctcccgtcctcgtgtatcgtctgatctctgtcattgtatcacggttcagggcaagaatgctcatttttttcttttttttatccaatattaccaccgaaacactgtcagcacgtgctttgttgctgtaggtctctgatgctttcagagggtctgtcgagtccagtccggcgtacagaatagtcgtgatcagcgaattatactgatagtctttgtctttccaggtaatcgtccggtatccgcccttcatatcgacagaattcccggccgtcacgtggagacggctctgctctttctgggaatgcagaagaaaaaatccgcctgcagacaaaaccacgatgcaaagcaaagctgcagctgctgcaaactttttattatgccgcatccatcggcgcatccgataccagataccatggtggtgatggtgatgtccttttccggaactgtgactgctcattttttctctgccctcttattttcgatttcttttcttcttttcttttgcttcttttccataaccataaccgtagccgtaaccgtagccatagccatatccatatccgtagccataacccttcttctccgctccgatgcggttcagaacggctccaagaagcttaatcccgccgtactccagctggcgcttcgcatgaacggcctgcgcacgctccgtcactccgttttcaatgacaagcaccgtaccgtcacatttctttgcgatcagcgctccgtcgatgaccgggttgaccggcggcgtatccacgataatatagtcataccgcttccgcatttcttccagaagcagggtaaacagcttgcctgaaacgagttcactcgggttcggtgcaatcgcaccggtaaagattatatccatataccggtcatccgtccgatagataatctcattcatcaccgcttctccgcagagaaactcactgagtccccttacctcttcccgaatgtcatatcttgccattgtggaagaatttcggatatcgcagtccagataaagcgtccgcttcttcagtgcggaaaaactctttgcaagccggaacgcaatcgttgattttccctcattcgccattgcgcttgtcacggcgatcaccttcaggtcaaaaccgctcagctgaatgtttccgcgcaggacattcaaagcttccctcgccgaaaacggcagatcttttatatccggaatcacccgtctgctgcccggcaattctcttctgtaattctgctcttccatctgctgtgcctcactttctgttcacttcattgatatatggcactgcggccagtaccggaagctgcagatacttctccacatcttcctcccccttgattgtcgaatccataagcattctcaggatcacaattccgcatacg

SEQ ID NO: 486 - DNA, 32759 bp, Unknown
  16S sequences of unknown bacteria
cctttctttctgcgcgccgcaccggccgctttgccggtccgccgcggcgcgcccccaggagggagaccagccgcctaaggacgggaatgcgtccgcgccggccccccgccgtcccgccccgcgccccgcgcagccgggcaggcggcctgcgcccgctcaaggccagcagcctgcgccgcagggccagaggcccgcgcagccgggcagacggcccgcacccgcgcagcggcccccgcagcagcgccccgcgccgcagggtcagcggcccgcccagcaggcggccatgcctccggtcggacagcgcatggctcaggcggaaatggaaggcggcgccatgccgcgccgccaggccggcccgcgccagcagcccgcccggcccgcggacgagccgttccgccgccccaccgcgtcggtggacaggccccgctatgattttgaagaagacgaggactatgcgtcccaggagccggagcgccgccgcggcggcgtgctgctgcccatcgtgatcgccctgctggtggtcggcgcactgctggccggcatctgcctgcccgactgggaaggcatgggcggcggcatcggaagcgcgatcgctccggtcaagtccacgctggtgggcgcctttaccagcgtgaaaaacatgatcgtgcctgaagaggaccccatcaagagcttcagcgccgccgcagcggacagcgccgcgcccacgcaggtgatcttcgccgtgcagaccgccaagtccgtcatgggcctgcgcatcgtggacgatctgggtaacaccgtctacgacggcaattactccaccgataaggaagccagcggcgaggtgatctccaacagcaacgtgctgctgtggaagccctcctgcaccatcgaggatgcgtacagcggcggcttcacggcctatgcccgcaggcaggacggcgtggagagcgagggcttccccgtatccgccccggtgaccatctccgcgccccgcgtggtggcggagcccatgcagggcttcacatgcgacacgtccatctccggcgtgccggcgcggctgacctttacgctcaccacctccaccgatgtgactgccgtgcgcgtggtggacagctacaacacccccgtcgtcagcatgtacctgaccgacccgcagagcgaggacgccacggtgaccgaaaccggcgatcagcgcatctggacgctgggcgcggaagtaaccaccgcctattccggcgagtatgacgcgcagtatcagctggacggagagctcaactttaccccctccggcatgagcgtggacgtgcaactgggcagcgagcccgttgaggagacgaatgaggacgaggaggaagagcagccggcagagcctacgcccagcccgacgccctctcccacgcccagccccagccccacccccagcccgacgccctctcccacgccggtgcccaccacctcgcccctgcctgatctgagcgcggaggcggcgcccgcggccctgcctgaggagctgaccctgaaggccacgatctacagcggcaccaagaccatcgacacctttacccgcgagcgcaccatcaacatgctcaacgccttcaccaccaccgtgggcggcagcgattacgcgggctggcggcaggcgggtgtgctcaccttccgcagcggtccgctgcgccagaacgcggcctacggcacggtggatgtgcagtccgccaagctcagcgaggtatggacccagcccgtcggttccatgaagaccaacgaaagcaccgtctacggcgtgacggctccgggtcagcccgtgatcgtcaagtggcccacggagctgcgccagcgcatgggcatcaacgaagagatgaaggaagtcaccgccctcaaggaggtcattgtggccgggcaggacggatttgtctacttctacaacctgctcaccggcgaggccacccgcgatcccatcgagctgggcgcgcccagccgcggcggcctgtccgtggccaccaacggcacccccattctgggcgtgggccagttcaacagccgcctggccaacaagacggtcaagaacggctaccacatcctcaacctcgtcaccaacgagaagcagcgcctcatcgccggagacggcaaggacaaaaacagcaattacagcggtttccttggctcggccctctttgacagcggcaccggcaccatgatcgtcggcggccagaacggcgtgctctacaccgccgagttcggcccggtcaaggatacctacaactaccaggccaacgagatcaccctttccgagaccatccagggctacaagacccaggtcaaggggcaggaccgcaccgataccaacatcaacgccagcgtagccgtatacaataactacgtctactacggcgatatcggcggtatcctgcagtgcgtggacctcaacaccctcacccccgtctgggccgtggataccggcgacagcatcgaatccacgcccgcgctggatgtggaggacggctccgtggtggcgctctacaccgccaacgccatcgtcaacggcggcaagaacggcgtgtgcaccatccgccgcatcaacgccctcaccggcgcggaggaatgggcctacgaggtcccggatctggtctatgccagcaagcgcgacatcggcgtatacgccagccccgtcgtgggtcagggcgccatccgcgacctggtcatcttcaccgccaccaacgacgaggcgggcgccaaggtgatcgcgctgagcaaggccgacggcaaggtggtctggcagaccgcgctggaaagcgccaccctctccagccccgtggccgtctacaacgaggacggcgacgcctggctgattcaggccgagagcaacggcaagatccacctcatggacgccacggacggctccattctggatacgctgaccctcaccggcggcgagggcgaggaaagcacgctggccattgagggatcgcccgccgtgtacggcaacctgatgatcatcggcaccacgggcaaggatgccggcggcgtatactgcatcaagatcgagtaacacaagaggagcgtatcggcaatgaagatttatttggacgcgatgggcggcgacaacgcgcctcaggcccccgccgagggggccagggaggcgctggagcgctacgaggggctggaaatcgagctggccggtcccatcgagcaggtgaaggccgcggtggacgccgcctttcagggcgcggaccccgcgctgcgcgcccgcctcgtcctgaccgactgccccgaagtcatcaccaactgtgaagcgccggtcatggccgtgcgcagaaagaagcagagcgccatcgtcgacggcatgctcaagctccgcgacggcaaggtggacgccttcgtatccgccggatcgacgggcgcggtgctctccggcggcatgttccgcctgggccgcctgcgcggcatcgaccgcccggcccttgcgccgctgctgcccaacggcaagggctacttcctgctcatcgactgcggggcgaatgtggactgccgccccgaatacctgcaccagttcgccatgatgggcagcgcctacatgcagggcatgcgcggcattcaaaacccgcgcatcggcctggtcaacaacggcgcggaggccgaaaagggctgcgccctgaccaaggaagcctacgcgctgctggcggccgataagcgcctcaacttcgtgggcaacgtggaggcgcgcgaaatcacccatgaccaggccgacgtgatcgtgtgcgacggcttcgtgggcaacgtgattctcaagttcatggagggcgtggccggaactttgatgggcatcatcaaaaaggagctgctcagcgatacccgcagcaagctgggcgcgctcctggccaagcccgcctttggccgtgtgaaaaaggccatggattacagcgaggtgggcggcgcgccgcttctgggcgtgcgcggcagcgtggtcaaggcgcacggctcctccaacgggcatgcgctggcctgcgccatcgggcaggcggtgcagatgatccgcggcggcgtggtggagaagatcgaagcgcttctgccccaaggcggagagcagcccgccgaataacgttctgcgcgggagcgccgctcccgaaccagataaggcgtatcccgccatgattttgattggacgaacaggaggaaacaaccatggtttttgaaaaagtgcgcgacatgatcgcttcccagctgcaggtggacgcgtccaccatcaccccggaaagccgcctggtggaggacctcaaggccgacagcgccaatgtgatggtgatgattctggagctggaaagcgagttcggcatcgaggtggaggacgaagtcatcctgaccctcaagaccgttggcgacgttgtggactacatcgaaaagcaccagtaacgcccccggcattcaggcgcccccagcggcacacccgttgggggcgcagccatcccgtaaaaaaaaggagcatcgtcaatatgcagcgtttgcagcaagccctgggctatgccttccgggacccgtcccacctgcgcctggcgctgacgcatccctccacaaagctgccggacaaccagcgcctggaatttctgggcgacgcggtgctggagttttgcgtcagcgacatgctgtaccagaaataccccgacctgcacgagggcgaactgaccgcccgccgcgccgcgctggtgtgcgaacgcacgctcagcgtgattgcccgctcgctggacctgggcagatatctgctgatgggccatggcgaggagcagaccggcggccgcgagaagcccagcattctggccgacgccatggaggccgtgctggcggcggtctatgtggatggaggctatgaagcggcgcggggggtgatccgcgtgctgtttcaggaagaggaacgcctgaccgcccggcgcggccaggatgacaagagcgccctgcaggaatacacccaggccaacggcctggacctgcccgcctatgagatcgtggcgcagagcggcccggatcacgaccggcgctttaccgcgcaggtcagcgtgcagggacgggccgtggccacgggcgagggcaacagcaagaaggccgccgagcaggccgccgccaaggcggcgctcaaagcctatcggggagaagcatgatgcgccttaccagactggagatatacggattcaaatcctttgccaagcgcacggagatcgtctttccgcagaatgtaacgggcatcgtgggccctaacggcagcggcaaaagcaacattggcgacgcggtgcgctgggtgctgggcgagcagagcgccaagatgctgcgcggcaacagcatggccgacgtcatcttcaacggcaccgaaaagcgaaagcccctcaactactgcgaagtgaccctggtctttgacaacaccgaccatcagcttcaggcccccttcgacgaggtgagcatcacccgccgcgtctaccgcagcggcgacagcgaatacctcatgaacgggtccaactgccgcctgaaggacatcgtggacctgttccgcgatacgggcgtgggcaaggaaggctattccatcatcggtcagggccgcatcgacgatattctcagccagcgcagcgaggaccggcgcgccatcttcgaggaggcggcgggcatcagccgcttccgctcgcgcaaggaggaggccgagggccgcctcaagcgggcggacgagaacctggtgcgcgtggtggacgtgctggacgagctggaaagccacctcaccccgctcaaaaagcaggccgacacggcgcgtgaatacctgaccctgaccgatacgctcaaggagctggacgtgcgcctgtttttgctgcgccacggacggctgaccgagaaggagagcgtggcggagcaggcgcttttgcaggtgagcgacgcggtgaaggaggccgagcggacgcttgcggagctgacggaaaagcgcgaggcgggcgagcagcggcaggaggaattgcagcgcgggctgagccgggcgcatgagtcgctgctggcacaaaacgaggcgctgcaccaggcgcgggaggcgctgaccgccgtagagaaccgcctgaagagcggagaggaggcgctggagcgcctctccggcgaggaggggagcctgcgcgcgcgcctgaggctgatcgaggccaccatgacccagagcgacggggggctcagcgaggccgaaaagctgctctcgcaggcgcgcgaggcgctggacgcgcgcaaggcggcccatgcggccgcgaccgaaagcgcgcagaagctggaggacgagctcagcgcgcacaaggcgcagatcatggagcgcctgagccgcatgcagaacgtgcgcacctcgcaggcgcgccagagcgccatgcagcagcagatgaacacccgccgcgccgagatcaccgcccagctggccgaggaggagcaaaaggagcaggagctctccgccgcgcttgagcaggccggcgccaacctcaagggggagcaggaccggctcacgggcctcagggaagggctggagaccttcgagcagagcacaaagcagctgctggccgatattctggcaaagcagaagcaggcgcaggaggatttgcagagcgtgcgcgccatggacacgcgcctcaagacgctcaaggaattgcaggacggctacgagggataccagtacgccgtgcgaaacgcgttaacctatgcgcggcgcagcggcctgaagggcgtgcacgacgtggtggcgatgctcttgcaggtgccgcgcgaatacgaaaccgccatggacatggccctgggcggcgcgatgcagaacatcgtgaccgaaaccgagcaggacgccaaggtcctgattgactacctgcgcaaaaaccggctgggccgcgccacgtttctgccgctgagcaccgtgcgggggcgcaccctcagcgcgcgcgagcgcgaggtgctttccatgcccggctgtatcggcgtggccagcgagctgtgcggctacgacccgatataccgcggcgtggtggaaagcctgctggggcgcaccgtggtggccaaagacctggacagcggcatcgccatcatgcgcgcgggcggacatgccttccggctggtgacgctggagggcgacgtgatgcactccggcggcagcatgaccggcggcagcattcagcagaaggcgcaaaacctgctgggccgcgagcgcgagatgaaggagctggccgcgcagctggaggaagtgagcgcgcgggcgcaggccgcccaggagcaggtggcccagatggaaagccgccgcgcgggcgaaaaggaacgccgcgagcgcgcccagtacgagctgcaccagcaggagatcgccgtggcgcgcgataccgagcgcctcaaggcggcccaggcggattacgacgcgcacaccacgcgtctggacaccatgcgcgcggccatcgcccagctggacgaaagccttgcgcagatcgcgcgggagcttcagcgcatcgaggcgcagggcgcgcaggaggagggcgacaccgacgagatgaacgcccgcaccgagacgctttccgccgcgctggacagggcccggcgcgagcgcgaggccgcgcaggaggcgctgaccgacgccatgctcaccctgcagaacgccgagcatgacgtggatcgcatccaacgcgaccggaagcgtctggccggcgacagcgaaagctgccgcggagagctggacgcgatcgcaaagaagcgcgagcgcacccgacaggagatggacacggcccgacaggatgaaaccgcggcgcaggacgccatcgccgcccgcgagggggatgtggaggccgcgcgcgcgcacgtggccgagatggaacagcgccgcgacgcgcagcagcgcgaccttagggacctgcagggcgacatcgacgcggcgcagcagctgtcctcgcatgaaacggagcgcctgcaccgtcaggagctggcgctggggcgcatccgcgcggatctgagccagctcagcgaccggctgtggaacacctacgagctcagctacgccggagcggaggaagcgctcagggagtatgacgcgcgcaaggcaggggaaagcgccccggacggcgaacccttatccgcgccctttgacgaaaacgccgccgacgaggaggcgcgccgcatccgcgaccgcgtgcgccagatgggctcggtcaacgtgggcgctatcgaggaatacgcgcagatgtacgagcgcttcaccgatctgagcgcgcagcgcacggacctcgaacgcgccaagaaggacctgagcgcgctgatcgcccagctgctggagcagatggagacggtgttcgtccggcagttctccacgctgcaggagtatttctccgaaacctttacccgccttttcggcggcggccggggtgaaatcagcatgagcgacccgtccgacccgctggggtgcggcatcgacatcatcgtgcagccgccgggcaagaagcgccagctgctcagcctgttttcgggcggcgagcgcgcgctgacggccatcgctctgctctttgccatgctcaagctcaagcccacgccgttttgcatcctcgacgagatcgaggccgcgctggacgacgccaatatcagctattttgccgattacctgaaggaattcagcaaggacacgcagttcatcgtcgtcacccaccgcaagggcaccatggagcgctgcgacaccctttttggcgtagccatggaggagcggggcgtgagcagcatggtcagcgtaaacctgaccgattacgaataagcaagggaggcgctttgccatgaccgaaaaaaagagcctgttttcccgcctgagggaagggctgttcaaaagccgcgagcatatgtccgtggcgatggaggccgccgttcaggacgatcgccccatcgacgaggatttctacgacgatctgctggacgcgctgattctcagcgatatgggcgcgacctgcgccaccgaggccatcgaccgcctgcgcgagcgcgtcaaggcggagcacctgcgctacgcgccgcaggccagggacgccctcaagggcattctggtggagatgctggaggtggaaaagcccgccctgcactggcccatggtgacgctcatggtgggtgtcaacggcgtgggcaaaaccaccaccatcggcaagctcgccctgcgctttcagggccttggccgcacgatcatcctctgcgcggccgacaccttccgcgccgccgccgccgagcagctgcaggtgtgggccgaccgcgcgcgctgccccatcgtgcgccacaaggagggcgcggaccccgccggcgtggtgttcgacggcattcaggccgccaaggcccgcaatgccgacctgctcatcgtcgatacggcgggccgcctgcacaacaaaaagaacctcatggacgagatggaaaagatgcgccgcgtcatcgaccgcgaataccccgaggccacggtgcgctgcctcctggtggtggacgccaccaccggccagaacggcctggcgcaggcgcgcgccttccgcgaggccgcgggcatcaacggcatcgtgctgaccaagctggacggcacggccaagggcggcatcgccttctccatcgtaagggagctgggcgtgccggtgatgtacgtgggcgtgggcgagggcatcgaggatttgcagtccttcaacgcccgggaatttgtggacgccctgtttgaatgaccgggcgcaagggaggatcggcgcatggttctgggatcgttttattttaagcaggaagcgcgccgggcgctgcgcggcaactggcagcccgcgctggtggtcacgttcttttccggcattttccttacgctttccagcgttttgcaggctctgtgggtgccggaccccgtgctctatgccagctacggcctgttcgagcggttctggcaggagctggccgccgtgtcccaggccgaatgggcggggctgattgtggtcaatttcctgtcgctgctgctgtccccggcgctggcgctgggctgtaaccgctatttcctcaagctgctcgacggcaaggaaagcggcgtgcgggagggcctgctgggccgcatgcgcatatggcccaaggcgctgtggctgtacgtacagatgggcgtgcgcgtgttcctgtggtcgcttttgctggtggtaccgggcattctggcggccatccgctacagcatggcgccctatttcatggcgcaggacccctccgtcagcgcctcggaggccatcgaacagagcaagcacgccatgaaggagatgaagatggcgtacttttcgctcatcatcagcttcatcggctggtcgctgctggccaacgtggcgcagatgtttctgatgagctttggcgtggtgatcgcgctggtggccgcgcagttcatgcaggtggccatttcagcgtatatgaacgccgcgtgcgcctcctttttcctgaccgtttccagcgaaaacggcatgagcagcgcccggcggcagatgcgcgaccggcttcggcaaatgggcatggatgacagcgccattgaccgcgcgggctttggcgaaaatccgccgcacggggacgacacccccggtgacggggagggagacgggtcatgaggctgtttggaaagcggaaagtcagcctgaacgccgcgccgccgctcctgcagaccccgcggctggtgctgcgcggctttgaccccagcgacgcggtagacgtgctcgcccgcgcacggggcgaggcggcgggcgcgatggcctccgctccgccatgccagtcccatgaggagagccggcgcacggtggaggggttcatccgtggcggcagcacctgggccgtcgtggagaagcgcagcggccatgtgatcggcgcggtggcgctggcgcccgattccggccgggaggtggaaggcgcgctggcgctgggctacacgctgggcgagcaataccgcgatcagggctatgccgtggaggcatgcgcggccgtgctggcctatgcctttgacgagctggacagcccggtggtgagcgcgggacatgagctgaccaaccagcgcagccgccgcgtgttcaagaagctgggctttacctgcgagggcacggcgcgccgcgcgcgcatgctgtcgggcggcgagtatgccgatgaaatccgctacagcctgctgcgtgaggaataccggccgcagcccgcgcccaaatgaggaagggagaggctccatgcccccgctgaaatcctacgattccgatttgtcctacagctacgcgccgggggtgttccccgcgctggagctgatgaaaaacgcaccccggcgcgcccgccgcctgctgctgagcgagcgcgcccagggtgagggcgtcgaaaagctgcgccgcctgtgccgggagcacggcgtgcgcgaggaaaccgccgacagggcgctttcgcgcatcagcggcaagcagaactgtttcgccgccgtggtgtttgacaagtggcagagcgacctggaagcgcaggcgccgcatgtggtgctgcatcatcccatggacgagggcaacctgggcaccattcagcgcacgctgctggggctgggcattctggacctggcagtgatccgtccggcggcggacccgtttgacccccgcgtggtgagggccaccatgggcgcgattttctccctgcgggtcaagcagtacgacagctttgaggcctaccgggccgagcatccctcgcacgcgctgtatccgttcatgctggacgggtcgaagctgctggacgaggcatgccgtcacgttcgcacgccctacgccctggtctttggcaacgagggcagcggcctgccgccggaatttgccggcctggggcaggcggtgcgcatcccccacagcgaccgcatcgactcgctcaacctgtcggtggcggtcgcaatcggcgcgtatgcctttacccggccccatgtgggcctgaattgcgacgagagaaaggagcttatctgatgaacgaggcgtatcgggaagcggcggcccagctggaaaaggacattcgctatctggcgaaggcggcgggcctgaagcctggcgcgaccatggtgctgggctgctccaccagcgaggtggcgggcggccacatcgggaaaaacagcgtgccggagctgggcgacgccctggcggaaacgatgatcgccgtgtgcggcgagctgggcttgcaccccgtgtttcagtgctgcgagcatctcaaccgcgccctggtgatggaacaggcgctgctggaccgccttaacctgacgcaggtcaacgtgatgccggtgcccaaggcgggcggcagcacgggcgcggcggcctaccagcgctttgagcaccccgccgtggcgcagttcattcaggcggacgcggccattgatgtgggcgatacgctggtgggcatgcatgtacgcccggtggcggtgcccgtgcgcatggaggggagcgacgtgggccaggcccatgtcacgatggcgtattcgcgcctgccctatatcggcggcagccgggcgcagtatcccaacggctgatgcgtcaaaggaccataacaaaaccgggggcggacaggcatcgcttgtccgccccccggtttgtgtatggcatgcgccgcgctccccgcgctattcaggccggctgcgcgcggcggcgcgggccttcgtgccgccgcgcaggtgggtgagaatcgtggcggccgcaccgataatcagaaagagataataggtcataaagcgccataccaggagcgccaggcctgccgtgccctgggtgaacagcccccggtaatagagcaggaagccgccctcctgtgcgccgctggcgccgggcaggggggtatagctggcgctgagaaagagcaggaacgaaatggtcagcagctggtaccagggggtgcccgactccccaaaggcgcgatacacaaacaggatgaccgacatcagccccagcacgctcagggcggagaggcccagctggatgaggatctggcggggatggcggctcaggcgcaggacgctggcatggtagctgtccagcgcggtattcacgcgcagggcggctacttcggggtccttgaccaggcgcatacggtgtcccagccggatgaaaaaggcggccatgcgctgcaccagcggccggtgaaaggccaccagcagaatcaggggcacggcggcgaagttgatcagccagccgatgatcaccacccagcgcgccccggcgagctgccggtccacaaaggacgcattccacagccacagggcggaggccatcagcacggtcatcagctggttggagatgaacttcatggaaatgccggaggtgccaatgccgatgggcacgccctttttgttcatgtaatagatctgcatgggctgtccgccgctggcgccgggggtgatgttgctatagtagaagcccatcagggaaatatagagcgcaaaggacagtttgaccccatacccctgcttgcgcagaaaatagtggtaacccagcgcgtcaaagaacagataggaaaaccagcaccccgccgcgcccagcagccaccagggatccagcgtgaagagggcctcccaggcgttttccaggtcgctgttgccaaaggcgaggatacacaccagcgcgatggtcacgccgatgaagagaaagttgataagcttgcggataccgggcttcatgcggggctcctttcagcgtgccgcgcgatcaagcgccggtaacgctccaatacctgttccatcagcaaggcccacgggatgggaatggtgtcgcgggcgcgcgcgcctgcgcgggccgcgcgggggagcgcctccatgattcccgaagcgatgctggcgggatcagcctcgcacagaaagccgttgtccccatgcgtcacgccctcggccgagcagctgccgcgcaccagcagggcgggcgtacccatggccgcggcctcgcgcaccaccatgggcgcattgtcatataccgagggaaagaccagcagatcggcccggcggtagagcgagaggatctcctcccggtcgcccacaaagccggtaaaaagcacgcggtcctgaaggttcagggaggcggccagggccttgagccgctccagatcctgccccgcgcccgccatgacaagctggaaatcctccccctgatcgcgcagcagcgcacaggcgcgcagaatcagatgcgggtttttcttgaaatccatctgccccacgaacaaaagggtgctgacgccgtcgcgcagggaccagcgcgccagtacgcgacggtacgtctcgtcgctgacggactgcgggtcggtgccgttgggcatggtaatgaccggcccccggtagccgtactggcgcagaacgtccgcggttttgtcattgacggcccacacctcgtcgcaggtgttgtagaacgacaccacgtatttcagcgcccacagcgacaggcggcgggaatgggtgacgcggtaaaaatcctcgtaatacttgctgtgaaaggtcgcgaccagcggaatcctgcgcctgcgcgcgatgcggcgcgccgcgcgtccggccagaaagggggtatgggcatggaccacgtcaaagggcacgctgcgcgcggcgcggcgaaaatcccggcccagcgccgggatgcccacccggtagggttcgcccggaatgggcatgctgggatagagcagcgtttccaggccgggaaccgacgtggcggcggcatcgcggggggcgatatacaggcaccggtgccccatgcgggacaacgtctggcaataggccagcatcacccggcccacgccgtccagcgccgggggataggtttcgcagaattggccgatgatcacaggggcctcctaaaatcgcaaggaataagccgcaaaaagggcggcacgccagcattatagcagaagcgcggggcgggcgcaaggcggacgggttgcgccgcagcccgcgcagggatatactgggaaggtgcacaatgccggaggaggacaggatagcttatgcccaacatccaggatcatgccttggcgacaggcggttatacactggcgcagcgcccgtttgacgcgctggacagcctggtgctgacccagctggtttacatgcccatggaaggactgatggaccggggccagcggcccacggtagcacaggcctgggcctacatccgcgagcatgtggactatgagcggctggacacgtttcagaaaaagcgctaccggctgttcgaatgctgcgcgggtctgaagcggtaccgcgacttgcccatgcacgattatgtgaacatgatcgacggcgcgatggagatgcagttttgcgcctgcacatgggatctgtcgcgcggagagtgctacatcgcctttcggggaacggacctgaccatcgccggatggaaggaggacctgaacatgtccttcatgaccgtcccttcgcagaaggaggcggtcgcctataccgagcggatggcccgccgcggcgtggccctgcggctgggcggacacagcaagggcggcaatctggcggtatatgcgggcgcacgcgtggccccctccgtacaggagcgcatcctgcgggtgtacagcttcgacgggccgggcgtggatgaggagacgctgggctgtcagggatacgagcgcatcagtgcccgcatcgaaagctacattccccagagcagcgtggtggggatgcttctgcactatcatccccggtacacggtggtgcgatccacatcccttggcattctgcagcacgacgccatgacctggcaggtggaaaacggcgacttcgtgcgtcaggacgatctggacatgagcggcaaaatcaccgacgaggccattcatacctggcttcagggcatggacatggaccagcggcgcgaactggtggatacgctttaccacgtggtagacgcgtcgcaggccgagcttgtgaccgacctggtggacgactggcgggacagcgccgtgaaggcgctggaggcgattcgggaactggatccgcagaccaaggccaatgtgcggcggatgctgcgctccctgttttcgtcgggcgcgggcggggcggtgcgcacggtgctctcgcacctggcggggccggcgaagcacggggacggcgagcggtagggatgcgcggagggagtgttcagcagcaaacgggcgtgcttttgcatccacccggccatgctgcgaaatggattccctgacgggctgcggcggcttggccccgcggttgtccgagggtgtcggaaaagcccgcttccggcggactgagcgcccggcggccttcgccgccggacctcctgcatgtttgcgccgggcgggagggtccggcctgcgcatcgggcgaaatcccttgcttttccgcaattttttggaagaaaaacattgacttttttgttgacaccgtgctattatggtatggttgtccgcagtatgcgtttttcgcatgccctttttgcgcgagaaaggcgcgaaaatcaggcggcgcaaggcgcacagccgcggaccggacttacgcggctttgaacgcagaaggaggcgtggctcaaatggaagaagcgctgctcaagcaggccggcaggcgcgtggtgggcaccaagcaggtgctgcgcgcggtcgaggaggaccgggccgcgcgcgtctttctgggcaaggacgcagacggcttcatctaccacaggctcaatgccctgtgcgaggagaagcatgtgccggtcaccgtggtggacagcatgcaggagctgggaaagctctgccaggtggacgtgaaggcggcgtccgccgccgtgctcaagtaaggcgcggcattccccattcaactataaagacgccagggttgcggcggtttttatagcacatcaattcggaggtgtttccatgcccacgatcaatcagttgatccgcaagggacggaaaaaggtcgaaaacaggtctacggctcctatcctgcagggctgcccgcagaagcgcggcgtgtgcctcagcgtgaagaccacgacccccaaaaagcccaattccgccctgcgtaagatcgcccgtatccgtctgaccaatcagatcgaaggtacgtgctacattccgggtattggccacaacctgcaggagcacagcgtggtgctcatccgcggcggccgtgtacgcgacctgcccggcgtgcgttaccacatcatccgcggcgctctggatacggccggcgtggccaagcggatgcaggcgcgttccctgtacggtgccaagcggcccaagaagtaagacgttttcctgcgctgcgtttgcagcccctttcggagtgggcgcaggcgttcgctcccccgcccgtgagaatcgaagcgaggcggaggacgggcacaccgcgtgactttcccgtaggtcgggagcggtcgatgctgaaggccgtcagaaacctgtatgcaggcgcgctttgaaaacgcattcccgggaccccaaatcttacgctgtgccacaggcacattgcggcgatgcaatcgccacaacgaaggaggaaatcaaatgccccgtcgtggatttattcccaagcgcgaggtgctgcccgatcccgtttacgggaccaccgtggtcaccaagctcatcaaccagatcatgctggatggcaagcgcggcaccgcgcagcgcatctgctattccgcgtttgacaccatcaaggaaaagaccggcaaggacgccactgaggtgtttaccgctgcccttggcaacgtgtcgccccagctggaggtcaaggcccgccgtgtgggcggcgccacctatcaggtgcctatcgagatccgtccggagcgccgccagacgctggccctgcgctggctggtggaattcagccgcaagcgcggtgaaaagaccatggccgagcgccttgccgccgaagtgatggacgccgccaacaacaccggcgccgccgtcaagcgcaaggaagaaatgcaccgcatggccgaggccaacaaggccttcgcgcactaccgctggtaatgcgcaggggcgcgggcggggcgcccgcgcctggaagaagaatgagagaaagccgaatttgaaaggagaccctctgatatgcctagaagtcacccgttggaaaaggtgcgcaatatcggcatcatggcccacatcgacgccggtaagaccaccacgaccgagcgcatcctgttctataccgggcgcgttcaccgtctgggtgagacacacgagggcgcggccaccatggactggatggcgcaggagcaggagcgtggtatcaccatcacctccgctgcgaccacctgctattggaaaggccaccgcatcaacatcatcgacacccccggccacgtggacttcaccgtggaggtggagcgcagcctgcgcgtgctggacggcgccgtgagcgtgttctgcgccaagggcggcgtggagccgcagagcgaaaccgtatggcgccaggccaacaagtatcatgtgccccgcatggcctatgtcaacaagatggatatcatgggcgcggatttcttccgcgtggtggacatgatgaaggaccggctgggagccaacgccgtgcccatccagcttcccatcggcaaagagggagatttcaagggcatcatcgacctggtgcgcatgcgtgcggaagtctattatgacgatgaaggcaaggatgtgcgcgatgaggatattcccgccgagctgcttgagcaggccgaggagtatcatcagaagctcatcgaaagcgtggccgagagcgacgaagccctgatggagaagttcttcgagggtgaggagctcaccgtggaggaaatcaacgcggccattcgcaaggccaccatcaactgcacgatgaaccccgtgctctgcggtacgtcctatcgcaacaagggcgtgcagcccctgctggacgccgtggtggagtacatgccctccccgctggacatccccgccatcaagggtgtggaccccgatgatcccgaaaaggaactggtacgccatccctccgatgacgagcccttctccgcactggccttcaagatcatgaccgacccgttcgtgggcaagctggccttctgccgcgtgtattccggcgtgctggaaagcggcagctacgcctataactccagcaagcgcaagcgcgagcgcgtgggccgtctggtgatgatgcacgccaaccaccgcgaggaggttgaaacggtttacaccggcgatatctgcggcatcgtgggcctcaaggacaccaccaccgccgataccctgtgcgacgagaagaacccgatcatcctggagtccatggagttcccggacccggtgattcaggtggctatcgagcccaagaccaaggccggtcaggacaagatgaccatggcgctggtcaagctggccgaggaggaccccaccttcaagacctacaccgatcagcagacgggccagaccatcatcgccggcatgggcgaattgcatctggagatcatcgtggaccgcctgatgcgcgagttcaaggtggaggccaccgtgggcaagccccaggttgcctaccgcgagaccatccgcaaggccgccaaggccgagggacgctatgtgcgtcagaccggcggtcatggccagttcggtcactgctggatcgagatcgaacccgtcaagcccggcgaaggctactcctttgagaacaagatcgtcggcggcgtgattcccaaggaattcatcgcccccatcgacgccggtatccgcgaagctgctcaaagcggcattctcggcggcttcgaggtggtggacttcaaggccaccgtgtacgacggcagctatcacgatgtcgactcctcggagatggccttcaagatcgccggttccatggcgttcaaggaagcgcttgcgaaagcggacccctgcctgctggagccgatgatgaaggtggaagtcatcatccccgaacagtacatgggcgacgtcatcggcgatatctccagccgtcgcggccgcatcgagggcatggatgcccgcatgggcgagcagaccgtgcacgcctatgtgccgctgagcgaaatgttcggttatgcgaccgacctgcgcagccgcacccagggccgtggactgttcaccatgcagttcgaccactatgaggaagtacccaagtcgattgccgaaaaggtaaccggctcgcgcaagagcgaatgacctgaaccaaagcacactggtgcttgaaagcatattcccaacaaccgttcccggatattgtaaggaggaaacaactcatggccaaggcgaaatttgaacgcaccaagccgcatgtaaacatcggcacgatcggtcacgtagaccacggcaagacgacgctgacggcggcgatcacgatgacgctggcgcagctgggcgaagctcaggcgatgaagtacgaggacatcgacaaggcgcctgaagagaaagcgcgcggaatcacaatcaacacggcgcacgtggagtatgagaccgagaagcgccactacgcgcacgtggactgcccgggccacgcggactacgtcaagaacatgatcaccggcgctgcgcagatggacggcgcgatgctggtggtatccgctcccgacggcccgatgccgcagacccgtgagcacattctgctggcccgtcaggtaggcgtgccctacatcgtggtgttcctgaacaagacggacatgatggacgatccggagctgctggagctggtggagatggaaatccgcgagctgctgagccagtacgacttcccgggcgacgagattccgatcatcaagggcagcgcgctgcaggctctggagtacgtgcagaacggcggcaccgacgtgcgcaacgccaaggagacgcagtgcatcttcgagctgatggacgcggtggacaactacattcctgctccgcagcgtgcgacggaccagccgttcctgatgcctgttgaggacgtgttctccatcaccggccgtggcacggttgcgacgggccgtgtggagcgcggcgtggtgaagctgagcgacacggtggagatcgtgggtctgatggacaagccgcgccaggtggttgtgacgggcgttgagatgttccgcaagctcctggatctggcggaagcgggcgacaacatcggcctgctgcttcgcggcgtgcagcgcaacgagatcgagcgcggccaggtgctggccaagcccggcacgattcatccgcacacccacttcatcggccaggtgtacgtgctgaccaaggaagagggcggccgccacaccccgttcttcaacggctatcgtccgcagttctacttccgcacgacggacgtgacgggcaacatcaagctgcccgagggcgttgagatggtgatgcccggcgacaacatcgacatggaaatcactttgattacccccatcgccatcgagcagggcctgcgcttcgctatccgcgagggcggccgcacggttggctccggcgtcgtgtccaaggtgatcgagtaatccacagccgctttgcgacggcggtcctttgggccgccggctgcaagcgggcaatagatatctgtcggccccttcgcccgtcagcgggcgggcgaaggcgccttttcccacatcgacgaggaggtggcgaacgtggcaagcgttgcccgcaacaaagtgatgctcgcctgcaccgagtgcaagcagcggaactacaattccatgaagaacaagaaaaacacccccgaccgcattgagctgaacaagtattgccgtttctgcaaaaagcacaccgtgcaccgcgagaccaagtaagccggaaacgtcaacttgcgaatggagtgaaaaccatgacggaaaagaagaccaagggcgcgaagccgaacttcttcgttcgcttcgggcatggattcgttggcttcttcaagcgcgtcggcctggcgttcaaaaacatgtggcatgagcttcgcaaggtcacatggcccacgcgcgagaagctggtcaactattcggtgatcgtggttctcttcatgctgttcatgatggtcatcatcggcctgctggataccggcgcgacgcagcttgtgaacctcatcatgagcgcgtaaggagacagccatggctgaaaacagcaaagagccgtgctggtatgtggtgcatacctattccggctatgagaacaaggtcaaggataacatcgaaaagtccgttgagaacaaccccgagatgcagcgcctgatcttcgacgtgcgcgtgcccgtggaggacgtggtggagatcaaggggaacaagcgcgtgaaatctcagcggaaggtctatcccggctacgtgctggtgcatatgatcgaaaccagcgaaagctggtacctggtgcgcaacacgcgcggcgtgaccggctttgtcggccccgactccaagcctgtcgccctcacccccgccgaggtggacatgatgctctccacgcagcagaacagcgtggagttcggcatcgccatcggcgaggaagtgcgcatcctctccggcccgctggagaatttcaccggcgtggtggaggacgtggacaccgtgcgccagaagctgaccgtgaaggtcaaaatgttcctggggcgcgaaatgcccgttgaggtggacctgcaggacgttgaaaaggtccagcccaaataaggcgcctgcgcgccgcaaagctccccccggggagctgtgggaggaacggaacagccgttccgccatgaccacatcgaaggaggtgccattcccatggcaaagaaagtcaaatccatgattaagcttcaggttcccgccgccaaggcgacccccgcgccgccgatcggtcccgcgctgggccagcacggcgtgaacatccccggtttctgcaaggagttcaatgagcgcacccagaaggacgcgggcatgatcatccccgtggtcatcacggtgtacactgacaacaccttctccttcatcaccaagacgccgccggttcccgtgctcatcaagaaggagctgaacctgcagaccgcctccggccgccccaaccgcgacaaggttggcaagctcacccaggagcaggtccgcaagatcgccgagatcaagaagcccgatgtcaacgccaccgatatcgaggccatcatgagcatgatcaagggtaccgcccgctccatgggcatcacggttgaggaataagacgaccatttgtgggaggacattgtgccgttagcaccacaggaaggacagtagcatgaaacacggaaagaaatatgtggacagcgcgaagctgatcgaccatctcaacgcctacgaccccgccgaggcctgcgagctggcctgcaagaccagcaaggccaagtttgacgaaaccatcgagatttccgttcgcctgggcgtcgatccccgccatgccgaccagcaggtccgcggcgcggtggttctgcctcacggcaccggccgcaccgtgcgcgtgctggtggtcaccaagggcgacaaggtcaaggaagccgaggccgcgggcgcggatatcgtcggcggcgaggaaatgatccacaagatccagaccgaaaactggtttggcttcgatgtgatgatcgccacccctgacatgatgggcgtcgtcggccgcatcggccgcatcctgggccccaagggcctcatgcccaaccccaagagcggcaccgtgaccatggacgtggccaaggccatcaccgacatcaaagccggtaaggtcgagtaccgcgtggacaagacctccattgttcactgccccatcggaaaggcctctttcggccccgaaaagctgggtgagaacctgcaggtcctcatggacgccatcaacaaggccaagcccagcgccgcaaagggcacctacgttcgcagcgtgtacctcagcgccaccatgggccccgccatcaaggtcaaccccctgaagttctaagggctgcccgtcatcatcaggcccccgctccgcatgccggaacgggggcctgtttctgcaatgagagcggcgccggggcggaaagcgtgcgccgccctttgcctcgcccgcgaagatatgctatactagaaaacagcggccgggaggtgagcgcggtgtttcagcgggattacatcctgcgcatgatcgaaatgatgggcgatctgatgcggcgcgtcaaggagctgatggacgagcttgcccggatgcgcctgctggaggaggtctgccgcaggcaatgcggcctgccgctttcagcgctggagacgctcagcaccgaaagcctgacggaactgctgtcgcccacgccgcgcctgtttgccagcgagcttatctaccttcgcgccacggcctcgccggccctctgggaagagggccgcatgctcaggctcaagagcctgcgcctgctgcttacgctggcgcaggaagggccgctctgcgagctgcgcgcagcgcgcgtgcaggcgctcaagctggagctgatggacctgcttttgccggaggatctgatggcctgcgccgcattcctcaggcagggcggagcctatgcagatatggaggatgcgctgtttgaagcggcggagcggtgcgcgccgcaggagcgggcggcgtgcgtgcgcgaagggggatgcatgctgcgcgaggcggcgcgcgcgccggcagaggatctggcgtttggccgcacgtccgcgcatgagctgcgcctgtccgcgcgcgagctggaggcgcgctgggcggcggatgattcacagcaaccggatagaggggaagaaacccgatgattttgatctcggcacaggatgtgcaaaagagcttcggcacccatgaggtgctcaagggggtcagcttcagcctgcaaaagggcgagaagatgggcctggtaggcgtcaacggctgcggcaagaccacgctgatgcgcatcatcagcggcgaggccgaagcggacggcggcatggtgcacaaaaaccgcgacctgcgcatcggctatctcaggcaggtggatgacatcgccctgaccgatacggtctgggaagcgctcctgcgcgtgtttgagccggtcatcgccatggagaggcgtctgcgcgagctggaagcgcagatggagcagaacgccgatccccagacggccctgcgcctgacgggggagtatcaacgcctgctggaccgctacaacgaggcggagggctatgcctatgagggggagatgctgggcgtgctaaacggcctgggcctcaagcccgacatgcacgggcgcaaggtgggcaccctctccggcggtgagcgcacgcggctttcgctggccaagctgcttttgcaaaagcccgacgtgatcctcatggacgagcccaccaaccatctggacctggaggccatcgaatggctgcagggctacctgacggaatacaaggggtctctcttgctcatcagccacgaccggtattttctggatcacgtctgcaccacgatgggtgaaatcctcggcggccgcatgatcaaattcaccggcaactacaccgagtacatgcgcaagcgcaccgcggactttgaaaaccgcatgaaggcctacaacctgcagcagaaggaaatcgagcgggaaaaggccatcatcgagcgctaccgcagcttcaaccgcgaaaagagcatcaaggccgccgaaagccgccaaaagcgcctggacaagctggaacggctggaaaagcccgtcgaggaggggcatgtgcgcttcagctttgaggcgcgccgccgcagcggcgaggaggcgctggaggtcaaggggctgtgcaagtcctacgacggccagcccgtctttgaaaacgtgagcttcaagctgcgcacgggcgatcgtgtggccctgatcggccccaatggcgtgggcaagagcacgctgttcaaaattttgacccatcagctcacgcccgaccggggcagcgtgaagtacggcgtcaatattgacatcgggtattacgaccagcaccagcaaaacctcaaccccgccaacaccgtgctggacgaggtctggaacagcttcccctcgatggagcagagcaaggtgcgcggcgcgctgggcctgttcctctttacgggcgacgacgtgttcgacaccattgggagcctctccggcggcgagcgggggcgcgtggcgctgacgaagctgatgctgcgcaaggacaacctgctcctgctggacgagcccaccaaccacctcgacatggacagccgcgaggtgctggaggacgccctgcaggacttccccggcacgattctcgccatcagccatgaccggtatttcatcaaccggttcgccgaccgcgtgatggtgatgaattccgacggtgtgacggaatatctgggcaactttgacgactacgtggagaagcgcgaccgtccccagccgcccgcccccgccgccgaaggcgaggtgacgcgcacggccgccacgcgggagcgcaagcgcgaccgccagcaggcggcccgtgcccgcgagctgcaggcgcaggtgaagcgggcggaagaggcgatcgaagaaaacgaacggctccttcgtgagctggaggcgaagctggccgacccggccacctatgccgacgcggaggccgcgcgggagctgggcgagcgctaccgcgccgagcaggcgcgcagcgaagcgctctacgaggcgctggaggccgccgaagcggaggcggaagcggcggaataatccctgctacgcatgttgcaggcaatgcagcaggtttttgcggtattgggaaggcgaaaccaaaaacgccttcttgaactgcgtgctgaaataaaatagatcatacccgatggcggcggccacatcgctgatggacagttcgggatttttcagcagcatttgcgcgtgacgcagcttatagcggatcacaagctgctgggtggagcagttcatgacatggcggctgcaacggtacaggtggctttgcgaaacatgcagagccgcgcagagccggtccacatgaacgggctggttcagatgcgcttccagatactcaaagagccgagaaatgacgtactgctcgcgggagctgttttcggcgggaagcgcgggcgtgttttgcaggcggatcagccggatcagcagaagatgcagcagcgcgcgaagctgggcatagcagccgggcctgcacgcccggacatcctcgtagcaggacatcagggccgcggtatccgcaggggtcaggatctgcggaaagtgcaaaatgcgcgtgaaaccgaattgctgcaaaaacccgtgctcacgggcataaggatgcaaattgaagaaaatttcataggaatccacatgatcgaaggtggaggcgctgtagacggaatagggcgggatgaacatcacgctgccgggagcgagcaggaaatgctcgttctgagcagtaaggtccgccctgccctgtgtttgcagcaccagcttgatgcgcgtgctgaccaggttttgcagggttttgaaatcctgctgcggccaatgcgtaaaatagtcgacctcgatacggaaatcggccagataggcggacagcgggtccgcgtccgcgcgaaaggggttgaaccgctcggtcagcttcatgcatttcctccgttggactgataaacacaaatatgaaatgggtatgatataggaaatcgatcgttaaaagtatatcatagaacagcggcattgggaacggaacaaaaatcgtccggacttgcacaatcaggaaaacaacagctacaggaggaaacggaaatgaaaactggcaggaaaaagctgctcagccgtgtgcttgtactggcgcttgtgatggcgctgacgctgggcacggcgcttgctcccgtgagcgccatggcggaggccaccctgacggatggcacctacaccggcgcagccaacggcatgggcggcgcggtgaacgtaaccgtgaccgtggaaggcggaaagatcaccagcgttgaggtcggcgacaatcaggagacgcccggcatcagcgatccggcgatcgagcagatcccggcggccatcgtcgaggcgcagagcaccgacgtggacggcgtggccggcgcaaccgtcacgtccgacgccatcaaggccgccgtggacgccgcgctcagcggcgaggcccccgaagaggacaagccgctggaaatcaccgttcagccggacgtgatcgtggtgggcgcgggcatggcaggcctggtggccagcgtgcacgcggccgagctgggcgcgaatgtgctggtgctggagcagaactaccgcgtgggcggttccgcgaacaccgcgggcggctccatcagcggcgccggctacaagatccagaaggaagccggcattgaggacagcgccgaggctttctataacgacttcgtcaccatgggcggcggcgaggagaacatgaacaccgagatcgccaaggtgcacgccgagcgcagcggcgaggccatcgactggctgcaggactatgtgggcgtggagttctccgatcaggtggacagcggcggatacctgaccatgaacacctaccgcgtgacctacaccgcgggcggcgcgtcttccggcggcggctcctactttgtgagcgccctgatggaaaagctgcagggcttcatcgacgcgggccaggcccagctgtgcctggatacgctggtcaccgacctcatgtttgacgacaacggcgacgtggtcggcgtcaaggtggacgatgtggagattcccgctcccagcaccatcatcgccaccggcggctatggctactgcgagcgctggctcaaggagtacaacttcaccaacatcacctccaatgaccccgtcaccgccatcggcagcggctacgacttcgcccgcagcgctggcgcggcctttgacaacatggactactgctcctgctacggcggttccgtgccggtcagcggcttccaggcgtcgcttcgctgcaacatcaactacaacggcgccatctgggtcaacaccgccggcgagcgcgtctttaacgagcctgccgccacctccatggacaagcggaccgtgtggcgcaccgccgaccagaacatcatctacatcgttctggccgagaacatgctgtcggatgacagcgcgctctttaccggcatgatgagcaactccgcgcccttcaccaacgaggagaagatcgccgagctgctggatgagggctacatgttcaaggccgacaccatcgaggaactgggcgagatgatcggcgcggagaagctggccgagaccgtcgccaagtacaacgaggatgtcgccgcgggcgaggacaccgtctttggccgcacggacaacctgctcgcctttgaggagggccccttctacgccgtgtacaccgttccctacctgatgatgaccgcgggcggaccgcgcatcaacggcgatgcccagctcgtgcgtgaggacggcacgctggtaggcggcgcgtacctggcgggcgagatcatcggctcggccaacatcgccggccacaacaccatcggcggcatcggccatggcctgtgcgccacgtggggccgcatctccgccgagagcgcggtgaagaacgccggcaagtaagcccgcagacccgttcccgcattccgccgaaaaacagccggcccgcaggggagcgaaagctccctcgcgggccggttttgtctgtattggaattttcagcgtttgatgagcaccacggacaggtcgttgacgttggtgccggtgggaccggtgacgatcagcccgtcgatcgccttcagcgcatgataggcatcgttgtcctgcagcaccttgtgcagatccagcccggcggcggtcaggcgcgcggcggagccttcgtccacaatgccgcccgccgcatccgtgggaccgtcggacccgtcggagccgaaggagaacacgcacgtatcgcggcatccggcgatgccctcggctgcgcccagcgcgatttcctgattgcggccgcccatgcccttgccggtcagatggaccacggtttcacctccggcgaggaaggccagcgagcgctccgtgtcctgatggtcgcgggcgatagccgccaggaaggagccggcctcgcgcgcctcgcaggagagactcgcggtgagaaacaccggctcgtagcccagctcccggcaggtggccgccgcagtgcggcacagctggcgcacgctgccggtgacgaaggtcgtgacgttggtcagttccttgggggtttcctgagccagcaggccgcgcgcggcatcggacaggcgcaggccgtagcggtccgcaatttccagcgcctgcgcgcaggtggaagcatccggatacgccggaccggaggcgatcatgtccagcgggtcgccgatgatgtcgctgaggaccacggcgtagacatgcgcgggcatgcaccgcagcgcaaaacgtccgcccttgacggtggagaggcgcttgcgcagcgtgttgatctccacgatgttggcgccgcaggccagcagctggcgcgtgatatcggccagctcgtcggcggggatgaggggctgctcaaagagcgccgagccgccgccggaaagcaggaaaagcacgctgtccgcttccgtcaggcccgataccacctccagcgcacgggcggtggcgcggtagctgttttcatcggggacgggatggcccgcctcgtagatctccaggcggcccagagggccgcgtgagtaatcgtacttggtcacaacgacgcccgcgtcgatgcgcccgcccagccgctcgtgggctgcgcgggccatttcccaggccgccttgcctgccgccaccagaatcagccgccctccgggctgaaagacgatctgatccaaagcctgtcccacggccgcgcccggaagcgcatcgcgcagcgcggcgtcgagaatgtgttttgcatcttggttcatttcggtagcctccattgcgagaaacagaatgcgggccgcggcgggggaccgcggcccggaggggacgccgccttagaagatggcggagacgatcagcacgttgatgatggccgcgatgccgataatcagcgtgcccagcgtctgcgtcttgtagccgtcctggggctccatctcaccaaagttggtgaccacccagaagtagctgtcgttggcatgggagacggtcatggcgcccgcgccgatggccacgacgaccagcgccgcgtccagcggagtggtaaagcccagcgtcatcatcagcggagcgataatgcccgcgctggtggtgatggcaaccgtcgagctgccctgcgccgtcttgaggatggcggccagcaggaaggggaagagcaggcccaggctctccagcgtggcggcatgggcggtgatgaagttgaccagatcggtggtggcgatcaccttgcccagcacgccgcccgcggcggtcacgaacaggatgggtccgacggtcttgagggtatcgtccgtgagggcatagaattcgcccatcttgccggactgggccatgaggatgacgcccaggatcaggcccacggccagcgcgatgatgggcttgcccaggaacacgatgatcgcgggattggagccggccatgctgaacgcgctggccacgcccatcaggatgatcggcaccacgatgggggcgaaggacatgaaggcgcccgggagcttgccgtagctggccaccagctcctcgtaggtctgtccgatggcctcggcgttggtgggctcatccttggccttgacctttttgccgatgaagagcgcgaagatgtagccggcgatcagcggcaggatggagcacaccgcgccgatggccatgaccagcaggaggttgacgtccgtgcccaggccacccacgccaaacagcgtgttcgccgccgcgatggggccgggggtaggcgggatgaagcagtgggaaatgtacaggcccatcgaaagcgccacggtgcaggccacggaggacttgcgggtgcgctgcaccagcgccttgcggatggggttgaggatgacgaagccgctgtcgcagaacacggggatggacacgatccagcccatgatgatcatggcggcctcggggtgcttcttgcccacgagcttaacgacgcagtcggccatcttgagcgccgcgcccgtcttttccagcagggtgccgaccatcgcgcccagaatgatgacgatgccgatggaggtaaacgtgccgctgaagcccgcgccgatcacgtccgcgatctgcgcaaggtcaatgccggcgacgatggccagcagcagggacacgctcatgatggagaggaacggatggatcttccatttggagatcgcgacgatcatgaggatgattgcgatgacgaatgcaattaccagtgggataccagtcatgcgaggacacctcctgaaagatatggatgttttaccatgacagaggcgtgggcgcgcctctggtcggtttgaagtgtttcgcagccctgcggagactccgcgaagaaagcggtcggatcatgttgacaatgccgccgggcgcgtgtccaatggcaatcctataaattgggacgaagctctaaaactgattgccattgtaacatagattacgaaaaagcacaaggggttatgaacaggcttgcaaaatacttagcggactcttgacatccggcgcgcacggggttatcatctccatgtacgatttcgtacatggagggagagagcacgtatgccgcgcgacatgcggtggaagcagctgatgcacatccttggcgagattaacggggcgtatcatgatgcgtcggtcaaaatgggcctggcggacagcgagatgcagattctctattccgtacacatggcggaggggaagctgtacccctcggagatcgcgcggctgtgcggcatgagccgccagacggtcgcttccgccctgcgttccctggagagggaggggatcttgtatctggaaacaggcgcgggccgcagccgtcccgtgcgcctgacgcaggcgggggaggagctgtgcc

SEQ ID NO: 487 - DNA, 5336 bp, Unknown
  16S sequences of unknown bacteria
gtttcaaacacacgcagcattgatgtttcgggattatccgaggaagatatagctgcgcttcaaaaattagtggataatatacgaaacaaataataaaagcctgattatttgtgatatgtgtccaggattctaggtacatatcaggaaagcgctgttgctttaaatgcagtatcttctatatagaagatactaattttaatgttccaagtaacagtaaataaataggcgcgatatttttaataattctgcaatctgaatctgtaactgccgcataaataagtgcagaaagtatcaaacataaagccatcatatatctgtcctcatatttctgcttttaacacgaatcggaaattcacattttgcattaaaaaaacatcatcagagaatataaacttttgtcaaattttatcatacttatgaaacgtgatttgccgcccggacagatttacggtataatgattttaataccaaaatacggaggatatgattatgataaaagaaagggtagaaaagctgagagcgcttatggcgcagaaaaatatagacgcatacgttatcccgacggacgattttcacggatcagaggatgtcggagagtatttcagatgcagagcctttatatcgggatttaccggctctgccggtaccgtgatagtgacgaaggacaaggcgggactttggacagacggcaggtattttttacagggcgcagcgcagcttgcggggagcggaatagatctttataaaatgggtgaaccgggagtactgacgattgaggaatttctgcttgaagagctcaaaagcggatctgtaatcggttttgacgggcgcactatggtttactctgcggcaagcaggctggaaaaattgctggcggaaaaagatataaaaatcgcttatgaagaggatctcgtgggaatgatatgggatgacaggcctccgctttcaaaaaatccggcgtggctgctttcggtagaatatgcgggagcttcgagagaagaacgaattgcactcatcaggaatgaaatgaaaaataagagcgtggacgtatttgtgctgacatcgctcgatgatatcgcctggcttctcaatttccgaggcagcgatgtgaactgcaatacagtggtgcttgcgtacgcagttattacggcagccgacgtgattctttttaccgacgaatcgaagtttgcaagcgacgctaagatagagctgactgcggcgggtgttactttcagggaatatgatagcgtatacgagtatgtaaaaacagtaaaaggcagggtatttgcagatccgaacaaggcaaattacaagctcgtaaagagtattcttgctgccgatgcggactcagtggtgcttggaacaaatctgacgctgcttcctaaggcggttaagaatgaagttgaaatagataatatgcggaagactcatattaaggacggcgctgcgattacgaagctgatgtattttctcaagcattgggaggaaaaagataagcttacggaaatggatatcgtagacaagatagaagaactgcgcggcgagcaggagggctacataaagccgagcttcgatacaatagcaggctacgctgaaaacggcgccatagtgcactatggcgttacggaggaaagcaacaaaactctcaaaaataaaggtttgattctgattgatactggcggcacatatatgggcggtacgactgatatcacaaggacgatagcgctcggacctcttacagatacggaaaagaaacactatacggcagtgctcaaaggcaacctcgaccttggctcgacgcaatttcctcgcggtacgcgcggacttaatctcgatgcgattgcaagacggccgatatgggaaatcggctgtgattacaatcacggtacggggcacggtatcggctatatgctcaatgttcacgaaggtccaaactcgataagaaagacggttatggacagcataacggaaagcgcggagcttgaaccgggaatgataacatcaaacgaaccgggtatatatatagaaaacagccacggcataagacttgaaacgctcgtgctctgctgcgaaaagcttgtatgcggcggcatatcggaaaagccgatgctgtattttgagacgctgacgctggtgccgtttgatctcgatgctgttatacctgagatgctgacgccaaagcagaaagaggttctgaacgaataccatgcgcgcgtttatgatactgtagcgcctcttcttacagaggaagaggcagagtggttaaagcacgcgacaagaagtatttagtttttcttagtcaaagatagtcctgaattcaaaaacttaaagattataaacgatacatttagatttattgaatgtatcgttttttactttgatttttaaaatgccaatttaccgttttttaagcgtatagacaaaaatctgtttgttgggaagcctatagaaaaaaacttgcagaatataaaaaatttttttaaattttaaactgtgttgctgcatcaggcaattatttcaatattataaaccacagaaaaatcaataataaatgaaaaaattaccgcatgaattaaattgcgaaaaaagtcaatactaaaaacgaagaaaagagaggagattcagagatgaaatcaaaaatttttctttgtcttttattgattgttactatgtttgcatttgtcgcttgcagcaataatggagacggagacaccggaatgcttagaaatggtatagacgatgtcgaaaacggcgtggaccgcgtcattgacgatatggatggaaatgatgattatggtacaggcacgacaggaaacggaagaagctggaacgacagcagcatcaaaaatgatggccgcggaagcgactacggaacttcagacggagctctttcaaacgatattctttaaaggtcaataaaagcaggtagcaaggggcggcagatgctgctccttttgcattttattttgcagcctgctctatgcggcttcgcgccggaaattttgtaattgcagttaggcgtttcggtcgccgggattaaatacggacgcagaagcaggcaaagtaatagtaaaattttaacaattagcttgcgccaatattgcagtacaaggtataatatacatagacaaattaaggaaagaaggaatatatgaaaaaaacgaaagcaagtaaaatagacagcaggataaaaaatgaagaaaagaattccggaggcaagagaggaaatagcaagagcggtgcaaataaaaaaagcacagcaataagaagtgcggataaaggcgcagcgaacgctaaaagcaaaaataaaaagagagcgagagccgggcgcaaaaagccagtggttgtaattggcgtgataagaaaatatgaaaaaggcttcggttttattgaaatacgtgaggacagagagcggctgtttaaagatggcgacaatagagatatatttgtagccggcaagaatatgaaagacgcgatggacggagacgctgtttcggcggagctcctgccgcgtcatttgtggcgcggtacacgaccggaagcgcgcgtgcgaaaaatcgtgacacgctgcactacagaagtggcaggtactttttatgaagaaggcagctttagctttgtacgtcctgaagggcctaaaaaacgcggcgacatattcatatcggcccgcaatacaaacggcgccgaggacggggatatggtagtatgcaaaatccttatgtacccaatggatgggcagagagccgaaggtgaaattacggagattatcgccaggaaaggtgaacccggcggtgacataaggactatcgtccgtgcgcacggatttgcggaaaaatttccggcagaggtcgaaaaccaggcaaacgctatacgcgcgcgcattcccaagataaaggagggcgaaagaaaggatctgagggagaagatgacggtcacgatagacggtgaatattccaaggactttgacgatgcagtttcggtggaaatactgccaaacggaagctatttgctcggagtgcacatagctgatgtcagtcactatgttgaggagggaacgccgcttgacagggaggcgcttaaacgcggtacgagcatctatcctgtaaatcaggtagtgccgatgctgccggaaaaattatcgaacaatatttgcagcctgcgccctaacagagaccgttttacactcacggtcgatatggaaataacgaaaagcggagaaatagtgaattacgacatttatgaaagcgtcataaaatccaaagagcggcttgtctatggtgcagtatcaaagataatagaaggtgatcttgtaaaatacgaggaaattcacccgcatctttaccgcacaatcatgaatatgagagacctcgcggcgctgctcgccaaaaaaagagaggagcgcggcagcatcaactttgacttgccggaagctgaaatagaaatcgatgaaaccggcgctgctgtaaatgtaaaacgagcagagcgaggccttgcccataatataatagaggaatttatgctcgcagccaacgagacggtggctgaacattttaactttatgcaggtaccgttcgtatacagagtacatgaaaaaccggacaccgccaaactggaagagctgcggcgattcctttacggctttggcataaatcttaaagcaaatgcggacagcgtgcatccgcagattcttgccggaatattaaaggaagtaaaaggcaagccttacgaaaatgctgtcagtacagctatgctgaggacgatgcagcgtgcggaatacgatacggaatgtcttggacatttcggtctttcactgaaatattactgccattttacatcgccgataagaaggtatccggatcttatcattcacagaataataaaggaaaccctgcacggctatccatcaagtgagcgcctaaaggaactcaccaaaaaagtgcgcatcgcagccgatatgtcatcggtaaatgaaagaaaggcgatagaagttgaacgagacgccgaaagcctcaaaaaaaccgaatatatggagcgccatgtaggcgaaatatttgagggtacagtgagcagcataaaaagctttggtatgtatgtcgagctgcctaacacgataaggggacttgtgaaaattgaaagccttgaaaatgatgattattcttatcaggaagaccggcagagcctcatagggacgcacacaggagacacatacagcataggcaggaaagtgacggtaaaggtcgtgcgggctgacaaagatacgcgcgaaatcgactttattatcgtgaatacaaatcgcttggaaacccaaagaggtcaaactcgaataattaaacgaa

SEQ ID NO: 488 - DNA, 16689 bp, Unknown
  16S sequences of unknown bacteria
tgtagcacagcccttggagaggggctctaataactactactctataatacaaggatgaacgattgggtgttttggtatcttccataagcatacttcctcataaaaataccgcccggagatttctcttcggacggcgatttgcgtaatgtgatagatattatttttgcattttccttgatttccaagggttccagccactttcctaatatcatcgccccgactgggcctaccggtctcactggagcgactggccccactgggcctaccgggcctactgggcccactggaccgactggtcctactggtcctactggtcctactggccccagcggagaaaccggaaccgctgccacactgtctgtgggcaatgtcaccactggcaatcctggtacacaggctgtcgtgaccaatgtgggatctccgcaaaaagccattttagactttacgattccccaaggtgccaacggtgtaccagctacttccagcgctctgtgggccacaaatccctcggtgacgctgaacgccaaacaggccgtccccctgactgtgagctacaactcccccagcagtggtatcaccgtcagcggtactactgtaaccctgccggtgggcacctatctagtaaattactccgtgaattctgagtccggaggaactggttccggttccactgcaactaccacattggcagcccaaaccaatggaaccacgatccccacttctcagtctgtggccctgcaggaacggggagacattatgcctttgtcctctactttcctggtcaatgccactagccccactcccctgcagttggtcaacgatacgaccaacatctatcctaccaactataccaatctgaatctcaccgttgtaaagctttcttagctgtttgacaaaaagtgcccccgtttctgcacgggggcacttttcttatttcaaaaacaggagcagatacccaaagcagtttagacctctacatccccttccagccgcaggccagaagcgcaccggtcgctccgcagacccactgagagggcagaccttccggcaagcggatttctccgatgggctgcgcgccgccggaaacatccataatttccctttgttgggataccattcctcccccttctgtggaggacagggagagtgtacttttttcggtgccataggttatcaccgtctgggcctgcaaacaatgagacagacgggcagcatcttttccataagccaccagagcatatgtgcagcagtcgggcacttctgctttcgctgccatcggcccggccaaaaccacatcatataccccgcctttttccaaaggcacctgttccaagcaaatgccttgctgggctgccagctcctgtaaatatcgcgctgctttcccttttccttctccgatcactgcaattctcattctttctcccccagtaccgtctagtgtaaacaaacccaggggaaatatgcaaaaatatgccgcggaatctcttccgcgacatgagcgtgtcgaaaaagtggcttaggccactttttcgagtttttgcaaggggctgtatgcacgcctttggcgcacacttgccccttgagaagtgcaaaaagccacgcacaggtcgcggctttttgcggattgataggggtagggcggacgacccttttcgttatataggtttttcgacagtctgatgccgcggaatctcttccgcggcatataaaaaatgggggattggaatgtcttatttatgaaacagtttcttggtctgataattgggctcgcaagtgagattgacacccagattgcggaacacattgtcatccacctgtgccaggatcaccgtagagtgagcctcacaacctctgagcttgcccaactgcttgatggccagctcggccaccgggttggtggcagcactgatggtcagggcaatcagcacttcatcggtgtgcagacgggggtttttattgcccagatacccggtcttcaaccgctgaatgggctcaataatagtgggggacagcagatggatatcagaattgatgccacccaaatgcttcagcgcattgatcagcatagcggaagaggcgcccagcaaggcggatgtcttgccggtgacgatggtgccatccggcagttccatagccgcagcaggctctccggtctcctcggctttgtcaatggccggctggatcaccaggcgcatggaaggatcgacgcccgcctgggtcattacgctttccaccttgtgtaccgcttcctcgctcacccggcccacacgataatcgcacatcaccttatagtaccggcgaacgatctccattttagctgcttcccgtaccgcttcatcatcggttacgcagaaaccggccatattgacacccatatcggtgggagatttgtaggggctttctccggcaatggtctcaaacatggcattgagcaccgggaacacttcgatatcccggttgtaattgaccgcagtcttgccataggcctccagatgataggggtcgatcatgttcacatcgttgagatctgcggtggccgcttcataggccagattcaccgggtgcttcagaggcagattccacacagggaaagtttcaaacttggcatatcctgcactgatgccccgcttgtactcatgatacagctgggacagacacacagccattttgccgctgcccgggccgggagccgtcaccaccaccaggggacgagtggtctccacatattcgtttttgccatacccttcgtcgctgacaatcaggggcacattggtgggatagccgggaatgggataatggaggtagaccttcagtcccaggtgctccagcttggttttaaactggtcggcagcagcttgtccgttgtaacgagtgatcaccacactgccaacataaagcccgatgctgcggaatgcgtcgataagacgcagcacatcggcatcgtaagtgatgcccaaatcgccccggactttgtttttctcaatgtcggcagcgttgatggccatcaccacctcggccttgtctgccaaggtctgaagcatacgcaccttgctgtcaggcgcaaaaccaggcagtacccgggatgcgtgaaaatcatcaaagagcttgccgccgaactccagatagagtttgccgccaaactgcttgatcctctccaggatatgctgggactgcatactcagatattgctcattgtcaaaacctgttcgaaccatagatcatacccccatattcattttattacaacaatgttctacattatagcactgcccccaccatttttcaatgtcttttcttacaaaagcgcactgcgcaaagcggtctccactttctcccggctggccgcgccctcgtgcatcttcactccgcctacaaaatagcaaggcacataataatagtcataggaatcggccagggccgcttccttcctctcatccaccacacggatggggattttttgcaattccggatattcctgcatcagtttctcctgccaccggagagcctccacacaataagggcagtttttcagcacaaacagcatgacttccttcaagatgttccctcctttttctttctattatggctcgaatttggctcccaatgcccgggccatgtcaatggcctgctgcacatcgattcgggctccacggaaatcggcgcccagaatatctgtggcccccagattgctgtcccgcaggtccgattgccggaaactggcgccgctgatcatggccccttcaaaatcgcagtttttgatccggcatttctccagtttggcccggttcaaatcggctccccggaaattgatgttctccagttccattttgtagaaattcatttcccgcagatcggtataggaccagtcgccgccgatgatctgaatggatgctgtattggcccccacaaacaccgtccccgtcagcttgcactcttcaaataccgctgcaaaaagcccggcatactgaaaggtgcagttgacaatggagcaatgctcaaaacggcaggcgcccaatcgggccccggtaaagcggcatttttcaaaactgcagtttttgaacaccgattcggaaaaatccccaccgtcaaaacgacaatcatgaaatttcagctcttccacctgctgttccggttctttgagccctgcaaagtcctggccatcgtactccttttgttcaaacatcctcattcccccaaaatttaagatggcggagaagtttcttctccgccatttcttttgaatataaaattattttactgcatcaaggaatcattgtaaagggcaacatggaaaatatccaatcaatgggcatgggcatggcctacgctcaaagcaaaggccagggccaggcccaaaagcagccacagcaaacaaagttttcccttctttgtctccggctgactcaactcaaaacctgcggcaaagaccatggaaccggctgccaaagacaggcacagggaaagcagtccctccggcatggctccggccaaggtccccagaaccgatcccaccaccaagggcaaaccgcataccaccgacaaaagaagcactttactccgggcaaatcccccctggagcagcggaaaggccatggccattcctccgggcacattgtgcaaagcgatcaggccggctctttcccaagcatgagctcccacagctgcgccgatgacaaagccttccggcaggttgtgcagcatcaaagcggccagcatcatcaagccggcggaaaccatccgcccttgcttttccccattctgtccggcctcagccttctcggcgatccacaccagcagaccgcctcccaaaagccccagggccaccacccacagggcgccatgagccaccgcttcggggagaagatcaaaaaaggccatgcccaacataattcccgctgtaaaatacaatagcccctgtatgggcaatgattttttgccccataacacggcgatcaggccgcccaatccagtgccgcccatcccggccagcgctgccaataaaattccttgctccattgaaatgacctcttttctccattggcgcttctgctgcttttgctttgtttcccaatatggatattgttttgtgcgtcaagatattctataataattataccaccatagatggatttttccacatggcaatcataaggaggagatcgggatgaacacaaaattcaacgaaaagacccatgctaccctcattggtttgttttacaaacacctgaaagcggcctatggctgcgccggtgtcggctgctttgtcaagtgctcccaaaagatggctgaacagcggggaacccgtatggctctgcgcgctctgcgggatggacatcagctgaatttcaagtcctacatggcctatggggaatggacctccaccttccctcgccgttcggaagaagtgggtgtgtatcccgataaggaaacccgcagctttttgtgtgcctggcgagacacctttgaagaaatgggcctggtggaatgtggcaaggtctattgcaaagagatcgaccggggcattgtccgcggcttcaatcccgatctgacttttgagctgaaaagctatctccatgacagcccttgctgtgatatggtcttcaaagacgccgctctgggagaagatgtgccccagaactcccaggccaaaatgccctgggagtatcactgcggccatgtgtataaaacataccgggaaaatgttctggccatctatccggaagaaggccaaaaggtcgtcgataaagtggatgaggattttatccaggccttcggagaggaagccatgaacaccgtccgctcttacctgtccaccgattttaacaccatcggatgagcaactcccaagacaatcttcttttggccgtccccgccccgctgctccactggtatgaccagggggcccgggtgctgccctggcgcagccagcccactccctaccgtgtatgggtatcggagatcatgctgcagcaaacccgggtagaagccgcccttccctatttcacccgatttatggaggctcttcccaccattgaaagcctggctcaggctccggaagagcagcttctcaagctgtgggaaggattggggtattacagccgtgtgcgcaatctgcaaaaagccgccaggatggtgctggaagagtttgacggacagctgccttccgatccccttttgctgcaaaagctgccgggcatcggggactattcttcgggggccattgcttccatcgcttatggtcaacctgttccagccgtggacggcaatgtgctgcgtgtgatctcccgccttctggccagctttgactgcgtctccgataccgctgtgaaaaaaagactgcggcaacaggtggctcaggtgatccctccggaccggcctggtgatttcaaccaggctctgatggaactgggggccaccgtctgcctgcccaatgggcagcctctgtgtctcacctgtccccttctttccctgtgtcgcagccgggcccaaggagtggaaatgtctctaccggtaaaagcggccaaaaagccccgtcgtaaggtggagcggaccgtattgctcctgtgggatgggcagcaggtgctggtgcgcaaacggccggccaaaggcctgctctcctctctgtgggaatttcccggcgtggatgaggtcctttctgcggaacagatccaggaaaacctatcccagcggggaattgtgcccctggccttggaagccattggacaacacacccatactttttcccatgtggaatggcagatgactggctgggaagtgaattgcaaatccttctccccacccaaagactgcacctggatcacaccacaccagctggccggtgattatgctctgccctcggctttccgcccctttacccaatggatcttgaaaaaaagtgactgaaagcaaaatcataaccactagtaaactagtggtttgctcagaccccataggggtcagtacttgctgacccctataaggggtactgagggtttgttatcgcatcacaatttcaggcagccactaacagtggctgtcttttttgccttatttcaccctgtcacccgtaaacgggtctctgtactctttgatcgacacatgcttctgcctctatgatttctacattcatctctttgcaaagtttgcggaatatctctcctatatcctttcgcagctctttgtaaatgactcgacggcggtatttgggggcaaatactatgtgatactcacaccgataactggaatgtgctgtatgttttatctcgttcttcattttgtttaaaacctccatgttctttctgtgatgcggtcgccaaaccattcacagcgtaacatggaggttttattttaccaaggtattttatttacccctggtagaaccaggggttttattaagcctaaaggcaccaaccaaaagccgccggggccttacaaccccggcggctttttcctatttttatcgggttttcacaccagcaggccgatttccagcccgccaaaagcagtatccacatgaacaccgctgcctgtgccgtcccacaccagctcctgggcaaccaccggcggtttgatatcgcattgcagcccacgctctgtaagggccgtggccgtatttccgcaggaaatgttggtcagctcacaaagggcggactgcaccagttcgtctatttccgtcaattccatccctgtcatggtctggagcaagtgaagggccagctctctggagaatccgaacaccgcttctcccttcacatcgcccaccagttggattttgacaaacacatctccctggggcttgcgagcatccaccttttcctgcgtggtgctgctgcgatccagacccgccatggcctccatcacatccagggcatggtgggaaaacagatccgcatattggctgaactgcttttcctgggccgaagcttttttccccgacaggatcttctgatcggtgtccaccacatggtagatcaaccaggccgtcactgtgccggccagatccttcatggtcttttcttcaaagccattttccgtcaaacgcttttcgtattgctgcactgtctgggtgaactgccggtgttctgcctgatgggccgccaatccctcatactgaatggaggcctgataggcttcttcatcccgaaagtgatagatcacataatcctttaaaaattccagggctttctggtattccgtcaccgaagcccctctttgcacggcgtttaccaaatcttccgtcatgcggaacagttctttatgctgttcatcaatgcgctctacgccaaggcgatagctgtctttccacatcatcagtcatggatccctcttttgcagcaaaatttcatattgatttatcttatcacccttgggagcaaaaaacaaggaataccccatgaacaaaacgaaatagcccgcctgctttatttctccatggcccacagatcggccggggcaaattccacagtatgccgtcctctttttccgtcagtagaaagacacattcctgtcagttccaccgtctcatccttttcctgccagtgataaactttttgccggtacagcaggtttccggtgccgaaaacgggaaacaccagaatggcctggcccactttttcccctttgcagaaaatttctgctttgatggagccatctgcaatggccggcttgccaaacactttcaggccttcatcggccgtgaccttgacccggactgtcaccgtgccggtctctgaaacctccacctggggatcggcaaaatgcaaatgggagaacactttgtcgccgtcttcatccagcagcagtgtgctggcccgatccttgaagctttccatccgctttgcaatggctgcactgtccgcattactcaaagcggcagactgaatcaaagcagagttgatctggtcgatctgtgcattggtctgccggatccgggcattcttttccccggtgcgggccagagaagccgccgccggaagaattccgcccagtccataggccgtaccggcggccagcatcccgtcggactctttttgtttggggatcatagccgggggagtcatcatggtttcgctgatgcgatttttcagaaggagcagctcatggctgagcatgacctgggttttatccgtcccatggtaccgggcatattgcgaaagttccacctgctgatgccgttcttctgcccgctttttctccagttcctgctgccgggcctcctcctttttctgctgctcgaccgcatattcctgcttcccttcttccagaatggcaagcaattccttctgatccagatgttccagatgatgtttttttgcgatcaactggaagcgctgcttcttctccggagaccttaggtcgttttccgaaaatattttaaaattccggcagtctttgcaaaaatccttccggtcctgggcggcctgctcgatttcctgctgacggcgccgttcctggttttgtttttccccctgcttccatttgcggaggttgtccagctgcaccacaaggccagtgagcaaagccaccagaattccggcggaaatggcgatagcgggaggcagttcgaacatcacaagcagcaccgggatcaaaatgacggctggaatccatcccataagcaaagatgcaagcagccaaagtttcacattcattttcatcttccataccacctttgcccaagtattttcgtattttcttccattatagcatgaaggataccacttcggccaggtggcccggtttttgcataaaaaaatcggagcaagtggtttatcacttactccgagatggttgcgggggcaggatttgaacctacgaccttcgggttatgagcccgacgagctaccgaactgctccaccccgcgatattctgtttgtttggtactcgattagtatagcataagaagcgtcctctgtcaagagatatttttccttccccctggccgtgaaaatgctactaataagagtaacaaagggtaacccccttgttactcttatttttttatgaaaaacggaggtgaaaggaccatgagcaacaaatatttgggacccgcggatcggcagctgattgcggagaagtgggccgcttatgcgtcggtgcgggagatcgcggcgctggtgggcgtggcgcctaaaaccatctatcaggaattgcgccgcgggaacaacggcaccctggacaagaacagccgccagtcatacaaccccgatctggcccagcgtcgtttccaggaaagcctccgccggcgcggaaagcccctgaacagggcgcgggccgccagtgaatgagtgaccccaccgtcatggaggcggataaatgcaaaggaggaaaaaacaatggcaaccatgatcaaacagacgaaagaggaaatcagctgggaggagatcgccagggccagagagatgggtgtgctggacaagctgctggcggagcgggatgtgatccgcttcaacctgcggagcggcaccgaggtggccatcatggtggaaaaggtggaaccgggccgggcgtggatgggctttgtggacggcgtggcagagcgtcccatgtatgagcgcctgctggtgcgcccggtgtcctggaaagagagcgacgcacggaagtggtgcaacaccgatctggtccaggatctcccggaggacctggtgtccatcattacaccccggaccattcggcagacggtagaggacaaggagctggtaaccacggatctgctgtggctacatagcgcaacggagtttttcgggcgtcggccctgggcctctggcgacgatcccacggaggagcaactgccagtctacaagaccgagcgggaccgcgtgaagatgtggaacgggcggacatggccgcattacacccggtccgtcaatgcgtcgtacagctacagtttctgccttgtctatacggacggcacggccaccggcatcaacgccgacttttcatgggccgtggcccccggcttttggatctaatcgaacaatccagaaaaatcaagccccgcaaggggcggagaaaggagccggacatggcaaaacgaaaggaaatcaagtggcggtgggaagcccgcggcaccatgatcggacggcagaacgggatcatttttcggatttatcacccgtgggacatgccggagcgggaacacaccgtaagctgctacgacacaaagggatccgcaagaacgatcagcacggcgggttacagaaaattcacctgggaggaggccgtggagttctgccaggcaatcgcagccggagagattgacctggaggacctgcgggcggagttcgccgcgatagaggcagaacgggaacggcaggcgctccgcaaagccgtggaagaggccaaggagttccggggccacctggaggcggcgggaatttcatacaacaccctgctggaactggaggcgctgcggggaaacctgggaagcctgggacacaacgcgctcctgggatttgaacgcggggagggctggccggatgggacctgacgggaaaggcaccgccaaggcggcggtctacatagacggacagccggtgcaatacgccggagaaatcacgctgccggagattgtcgcggtgccggagcaggtggagagcatggaggaaccgccgctccttgcgtcaatgggctttacgatggaacagttcaatgaaacggcccgctttatggcggaagcgttcggtattttctgcgacaagctggcggaggccaccagagcgatggtagacgcatgggaggcgatccgggcggcagaggagttccgcaaggccctgcggtgggcggaggcggccaacaggccgctggccgcccgctaccaccacaccaaaaagaagcggatccgcaagaagtacgccaagcggatcctggcctggtatcgggaggagatcctgtaatgctacgactgaaagccacaaaaaccagtttgtacaagctggtggcggaatttgtgccgaacctgcctcctatgcggagcgggaccagcttcatcaaatatccgagaaccccggactatgccctggactggatcacgcaggaatgggacaccgcacatgcctttttctccacctgcatgggccgcccgctcctgtccattgagatcaagagcggagaaaccggaaagacggtgaaccgcaccacacacgccctgaacctccgggatctccgggagcggggcatggtggaggaatttgtgacggcggcggagcgccgacggatggaaaggagtgccgacaatggcggactttctcccgctacctgaaagggaatacagcgtaatttatgcggatcccccgtggcagtatcgacagcacgggaccacgggaaagagcagaggcacggcgctgaaacagtacccgaccatggcaaccgaggatatatgcaatctgccggtgcggaaaatctgcgggggggggcagcctgttttctatgggcaactttcccaaacattgccgaggggatcaaggtcctggaggcatgggggtttcagtataagaccgcggcttttgtgtgggtgaaaaaatacgccaggagcgggaccaacttttggggcatgggagcctacacccgcgccaatgcagaggtgtgcctgctgggggtgtcacctgggtttaaggcaaaagagcggatccgcagccacaaggtacaccagatcattgaggccccttttgaggggcacagcaaaaagccggatgaaacgcgacggcggatcgtggaactgctgggggatgtgccccgcctggaaatgttcgcccgccagagggcggagggctgggacgcctggggaaacgaggtgccgccggaagaaaggacgatcaaataaatgaccgagcgggaaagactgctggagaagctgggaaaggtcaaggccctggcggatcgcggagagggcggggagaaagagagcgcggagcgcaccctggccgcccttatgaaaaggtacgggatcaccgaggaggacctggaggacacaaaggccaccattcactggatccgctacaaaacggactgggagcgcagactgctgggacagctggcttatatgcacctgggcacgggccattctttcgggtgcgtgggtcaatacacgggaagatcccgaaaaaaagtggggatcaagtgtacagcggcccaatacatcgagatagaggcagattttgccttttataacgaggccatgaaagaggaaatggagctgttttacagcgcgtttctccagaaaaacaggcttttcccgccgccggagctggccgcggaaccaacagaggcggaaaaagaggaatgggaagatatggaacggatgtggaagatccactccatgatgaacgggatggaccggcacacgcgacacaaggccctggaggccgcagaataggagcagaccatggacaaaagacaggggcgcccggccaggctggagatcggaatggtggtggtgcggacgccgcagacaatattcgaggaggagcacggaaaggagatccggcggcccaggcaggggcgggtggactatatccacccattgggccggtttcacattgtggcctttcgtgttcgcgggaaaatcatcaaggaaacctttcagggtgtggaggtatcacaatgaattttttggaaatgaacggactgcaaacggcgcagacccatttcaaggacatttttcaaaacaatatccaccgggactatgcggacgccatgctggactggctggagcaggaaacagactttttcacggccccgtcctccacgaagtaccacggggcacaccccggcggcctgcttgcacatagcctgaatgtgtactaccgcctgcggaatattgcgatccgcgatctggcggacaaggaggatccggggaaatgccgcctttcggaagaacaggaggaaacggtggcggtcattgccctgctgcatgatgtgtgcaaggtgggctgctatcacatggaaaccaagcggcggaagaacccggaaactggccgctgggaggattatgagggatatacatacaaagaccccatccccctgggccacggagagaaaagcctgtacctgatccagcgccacatggtcctgctgccggaggaggcgctggccattcggtggcacatgggcgcatacgatgacgcggccaagacggacagccgcgccatgtcggcggccatggcggcctccccgtgggtatggcgcttgcaggaagcggacatgtgtgccgcctggatcgacgaacgggaggccgggcaatgaaaaaggagctttgcaagccatgtgccattgcactggagaaccgcggaaaaaccgtaaaggccgccggtgggcggtgtgagaaaatcacctgcgcagaatgtggacgccggcgttttgggtacacctacgaggtgacgggctggccgacccacagaaaaaaggaggacaaactgacatgagccagagaaaggccaaggaataccgccgcgccatggaacagtacaccggagtggccgaagatgtggacgatctgaaacgccgtgtcggagcattggaggccagacactaccgggaggaccgcgacaaggccgtggacatgatccagcgccgtgcggcggcaaaaaagtgggaggaaacggtaaaggcaagagctatgaaaaaagcggagcatgagctaaaaacacgggcagaggaacgccggcggcggatcgcaaggcggaggttgatcaccctggccctgggcgcgcttgcggtggtcatgctcctggcctccgtgatcatgaccatcacggccaagccggcggcggaagccgcagaggcagagatcaccggcgccgccgttacttccccgccggtaaccctggtgaccgcagagccggacatgtgggacggcgagggagaggatccgctggaggcggagaaaatcgaggaggccctgctggcctccgggtatttctccgtggcggtgcctatgtgctacgaataccaggactacatgcggacctactgcgcggcctatgagtgcccctatcccctggccctggccgtggcagaggttgaaagccactttgatatggacgcggtgggcgccgccggagaggtggggatcatgcagctgaaccccggcccggagaatacatactggatcaacctggaggccgaaacagagctggaccccaccacaccctccgggaacattgccgctgggtgctacctgctgggaaagtacatgcaggaatacggggacgcaaacaaggcggctatggcgtacaacatgggagtgagcggagcggaaaatgcctgggcggagggtatcacctccaccgactactccaccgccgtggtggaagccatggagcggtgggaggtcacagtgaacgcatggaatgggatataagccgggcaggaatacgggccgcggcagagcggagggcacggatccaccgctggcaggcaccgggccgcgccagagtggtacacccggcccgcgggtccgtagtggtcccgcacagttcaaacctggcggcgatcctgaacgcagcggaggtatggggttgcgactggacagagatccgggacgcaaaggtgtgggcggcccctggagaaaaggcggtcccaatgcctacattatataaataaggaggcggagcgaaatgctgatcaacgaaagcggcctggtgcgctgtatcaagcgggcgtataggtccgccgggtacgcggtggtgacccaggacgatagcatggcaatctacacggagcaatggtatgtccagtgcaagcgggcggccctgccccgcaaggtgctggccacaatcgtggaacacatgggcatgataccggacacggcgcccatgtccatcataaaggacggggatccgcagctgatcatgccggatgtggccatggacgaaacttcccactggagaaccggggaacgcacagacacggtgaccatggccaccgtgatcatgcagggttaccagatattccagccggagggcggcggtgcctgctatggcgtgagcctgtccgacctggagatcatggagcgggaaattgcagagcatgggcaggcaaccgtggtagacggggaccgcctgctatggtgcggggacaacgaagtggtggccctggacaccgtgagaaaggcccggtcaagctgggcaaaggaatgggagcgggccgtgtggaacgccctggagggcgtagatctccataaagaggaggcgtgacaatgccgcagacgaattttgaccggatcacagcctccccggaggtgctggccgctttcctggcctccctcccctgcctggacgccccatgggatgacgctttccaccgggttttctgcgacaactgcccaacaacggactgcccgcaggtatgcccgcatgaagcggagcggaacagcccggcgtggtggctgaaactggaggccacaaaataatggaagtaactgtaaatatgagcgccgaggagttcctggagttcatggcctggcaaaaggacagaaaccactacaacgcggaaatggccgcgcagaatagaaagtgggaaatgctggcaaataaagcctgctgggccatcgagaaagacccaaaacggcccggaaaggtcaagatcgtggatcaggaacacgcggcggagctgctggagctggcaaatgactacctatcataaaaagaaaaccacctgcgcccggtgctgacaacacggcgcaggtggac

SEQ ID NO: 489 - DNA, 13186 bp, Unknown
  16S sequences of unknown bacteria
aaacgagacgcttcccgtctcggagaggctgtcttgctgcctgcagaccttgtggagcgtgccatcgtcgcgcgagacggcgagataggttccgttgcccgagtcgtcaacgtcggacagcgcgacgacgccgctgtgcgagggagtgccgatcggcagctgcgtcttcacagtgcccgtctcggaatcgatgagcttcacgttgcccgtgtcgtcggcaatcagcagatcgccgccgctcggggcaccagctgcccagtagtacccgctcgactccccctctcccgcagtttccgtcgtcgtccagacgggctgtttggaagagccgctgcgctgcggtgtcgcgtccacgcagaccatcgtccccgccttgctcacgttggcagcgcccacgaccgtaaagcaggcgatcaggcgattgcccacgatgctcagcgacgagagagactggtactggcccgcctcgttctcgggcagggcgtcggtgcaccacaccaaatcgagcgtgttcgcgttgaaggccgcgatccgtccgtcgtttgccgcggcaaagatcatgccgttggcgtagacgggacggcagaagtagaaggcaggcgagaggcccgtcggcttcgagagcttctccttgcccgtctcggtgtcgaccttgtagatcttgctgcctgcgatgaggtagacatcgccgttgacgatgagaggatcggagacgccctctgtcgccatcgagccagtggagccggcagaaagcgggtcgaacgtccaggcggcgctcgccgcgtccgtcggcgtcagcgtcccgtcctgcgaagtcacgaccgcgccgtccttcttgcccatgccgaactgcggccactgcgcctggtagtccggcaggtccgtggcgggatcgacgaccgggtcgacgctcggcacgccctcaccgtctttcgagtaggaccaggaaactgcgtcgccagccttcagaacaatctgatcggccatcttgttggccgccttgccgttcacgaacagctgccagaacttgccagtgctctcgtcccagccgagcttgctgccgtcaaagggagacgtgatgctgctcaggtagaagccgtatgcggtatccgtgtagtctgcgttcaacccggacttcgagatgagcgccttggtcacgtcggcggcagtgctgccctgcgccacggatatcgtcgtctggggcgcccacgcggcactcgtaccggatgcatccgggccgtatatcgcgcagctggcctcgagcgtcgcgctcggggcggactcgccgtctgcaacgtatgcccattcgatgctgtcgccttgctcgagcgtgacctggtcggccgatctgtcagatgcctccccgttgacgaacagctgccaacgcttgcccgtcagcgcgtccgcgccgagcgtgcgcccgccgctgggcgaggtaaccgagttcaggacaaatccctgcgcgtcgttcgcgtagtctgccgaaagcccggatgccgtgagcagctctttcgtggcgtcagctgccgtggagcccggggcaagcgagtaggagcggaccgaagaccaggtctcgggggcgcctgtcgtgtcgatgcccacgagcgaggcggtcgcggtcaccgtgggagcgtctttgcccgtcgtccccatgacggtgaacgtcgcggaaactgccgtgcccgcgagtttcttgaaggtcgcatcgtcggggtagcgttcggcatagcggccgtacttctcagacctcaggtacgagtcaaccgtcaccttggtattgaactcgggcttgccctgaaacacgaggttctcgtgcttgatgatgtcgggcttgctggaacggaacctgttccagccgagcacgcccatatcgtctgcgccggggatcgtcgcgggaacgatgccgtcgccggcagccgaggcgctggagctgtcgtagctccagacgacactgccgtccgctccaagcgtcgccttctggaacgcatggaggctgcctgtcacgtccgtggagtcctgcccgttcgagatgccgttccagtacccggcgacggcggcgtccatgagtgccgcctcgcggtcgatgtcggccttgtcgagcggctcgatggcaaagctcagggtcttgctcgccgttatctcgggcgtgtctttcgaagtgatggtgcaggtgatatcggtcgacccctcctgtgccccaacggcagggcggtagatattcgcccggtagccgttgatgacggcggaatcgttgctggcagcgtaggtgaccttgtagtacttcccgtcgatgcccaagtcgcgcgtacgcgggagctgcacgtcatcagtcagggcgccgtctcccaccggcgcgccactcgaagagtacgaaagcttctcttttgtgaaggcggcgtcgagctccgtcgccagcttctccttctcctgggcaaccttctcggggtcgcctttgaccgtgagggggaaggcaacatcacaagagcggctctgcagggagtcgtcgctcgagtcgaggttcttcgcgctgatgcgcgccgtcaaggtgaccggggtatcggcagccgaacgtgccacctttccggagtagtcgtcccaaccgtatcccgagactgtgaccgcctcattagagctggtccacgtgaccgggaacgtggtcgcatagtagccgcttccaacctttacctgatagggcaacgtcaggttctgcgtgacagagtccttgtcgtcgccgctcgcgtagccgaccgagaccttgtcctgcatgccggcgagcagcgcgtcgaccttgtcgaggtcccaggggagctgcgggacatgggaaagcgtcgccgtctgtgtatcgccgtcgcgctcgagctcgaacgtgacgtcaagctggcgcaacgtcgaatagctcgtgtagccggtcttggtgctcgggtcgtcgaagaagtacgtgatggcgccgttattcgcctctccggtttcgattccgccggtcgtcccggtgcgtcctgccgcacccttgagagacgcggacgtcgtcttcaccttgatgcccgagaacccaagctgggccagatacgcctccgcgcattcgtttgcgttcgtgtcggagccgaacttcggcgtgaagcgccagtcggcgagcttgagcgccgctgcctggagcgagtcggcggcgatgaccttgcggccatcggatttggagacagaagaggagccactcgtcgccttgaccatgagataggaacctgccgcgccggaaggaacctcgagcgtcgcggcagttgcgcccgggatggacgtccacgtcgactcgtcggcatctgccgtcggggcggtataccactgcagggagactttgtccgtgacatcgtcgccgatggtggaaccgcccaagcgcttcgcctgcaccgttgccgagaggctatcgcccgtgaacagcgagcccgaagcgggggcgactgtgacgcgcagcaggctgtattcgtctgcgcccaccacggtgcccgcaagctccgaaacggtattgtcgagcgcgctcgcctcgaccttgagctggtatccgaccaggtccttcgtcagcgcgagcttgcccgtcttggaatcatagccgctcgtaatctgctcgtaggcatcggtgccgtctgccgccttgtaccaggtgtacgaaagatctgcatcacccggcgcgtcctgatcgttgtatacgttcttgctgacctttgccgtcggggtaagcagcgcgccgacctgcatgccctgcttgctcgacgagatagataccgacgagagcgtgtactgcccaggccgcatgacgggaccgacggggttcaccgattcggtgccgtaatacgagggcttcgaggtcgagaccacggtattgttgctcgtcgccttgacacgcaggtacgctccgaccagcgacgtgccgtctgcaagtgtcgacggcacttcgtacgtcggagacgtcgcgccggcgatgtcggtgaagtttgcgtccgccgtcgtcgaagacgtggcatattgccactggtacgacacggtatccgtcgcgtcgactgcggggtgattccagctcgagctccccttcttcgtgacggttgcacgcagggtatccccgacatggagcacgtttgccccgctggggccgtgacatcgtagagatcgactgccccggcgatgccaaccacgcctgctgcctgggtcgtcttcccgtagccgccatcggcagagacgtacaggtgctttccgagatacgaggcatcttgcgggaccgtgaaagacgaagaggtcgcgtcggcgatcgcgtcctcctcgctcttttcggatgcgtagtctgccgtgctcgcgtaccaggcccaagacaccttgtccgaaatgtccttgccgttcgagtcgagagcggtcgccgtcaatgccgcgccgggcgtcgccttggtcgacgacgtgacaggcgccccatccatgacaacggacacgccgttgaccttcacagaccccctgcgcgcgaccgcattggtcgcgcggctcgacttgtcgtccgcgccgccgttgaccgtgcagcggatgcacttgcccacgtactcgtcagcaatggtgtaggtggcggatgtcgcaccatcgattggcgtgaagtcgccatctgtcgagtccccgtactcccacttgtacgtgagcttgtcggagggcaccagttgcttgtcggtgtctttcgcctcgacgctcaaggtgtcgcccagcgatgcgtcgtatcccgacactccgttgaccttgaggccggcgaagtacaggtcgtaggtaccggccttcttgaacgggccaacggcactccagtcgccgagcttcttctcgcccgcggcatttttcgctgtgaacgctatccacttgccagccatgtcatcggtgacggtataggtgctgccggtaaccggctttcccgtagcatcgacgatgtcgttccacgtgatcgttccgcccgtcggaccggtcgaggaataacgccaggtaaacgtcacgccgtccgtgatttcctcgcccggctgatagtatgcccccgccttgtatgcatgggccttgagcgtgtccccgacgttatgcgggccacttgtcggctcgatcctgacggtatcgattgtgtctgcagttgccgatgcggcgggagtggaggaagaggaacccgtcgtccccgacccgctcgtgtccccggagtcgtcatcgtccccggagtcgtcatcgtcccagtagtcgtcgtcatcatcaccccaggagccctcgtcatcggatgaggaagcgacgttggcgcgtgccgttacgctggcattcgcgtctgctgccttccccgcgtcagatgccgccgtcgtgctttgctgcacgcccgtggactgttgctgggcgtcgccttcggagccgcccgcaaatgcggcaacgggggtcatggacgccacgagggcgcaggacgcgagcaaagcgagcgctctgcgcccaaacgtgcgcatcgtcatgagaagacgcttgtctgaggggggattcggacgcgagcttttcgcgtgcggagtatcttgcgtcgtgcgaaacgacaggtgcatagtgcatacctccaggaccgcttgcggatggtaggcattccgactctgcatgacggcaagacagcatcgtgctattagatgctcgtcaagaacatgcacatacggttactggtatagcgcgggattctcacccgcattcccctcgggcgccatctgcgtccggcatcgattcgatgcatccatcccagtcaatacaacaggggaattgtagcatcgacgtggtggcaccgctgcacgaaaacgggaagtgccatttgtgcactgctgcccaaccccgtactgctgcgcgtcgtaccggcttgtggcctgtgcatgtgctgagttttcggatgccgtcaagcgggtatcatggagtcagttcactgataccggggcagcgtgccccgcgcggcaatagaaggagagcgtgatgatcgtcgaccgcatcgagggagagctcgccgtcgtcgaactcgacaagggcaaattcgtggacattcccatggagaagatttcgggtcgcgtgcgcgacggcgccgtgctcgtgaaaggcgtatcgggacgatatcgggtcgacgagaaggagaccgcccggcgggcacgccatgccgcatcgctcctcgactcgctgttcgggaacgagcgccactgagcgttggcactgccagggatttctggcgccgggcggcctctcgccatccaactctggcagtgccagggatttctggcttcatgccgcgtttttctggcactgccggggatccctggcttcgggcgggccctcgccacccaacaatggcagtgccagggattcccggcatcccccggttctccctggcaccacctgcactcagctagcttcagcccccgggttatagggtcgtcagctcttgcctgcggaatcatccttctcgaagaccagatcggtcccactctccgagagcgtgagcttaccatccttcagcgttgcaggcaccgtgtcgccctcgacggtgaacgaggcctcggtcgcgctcttcgcctcccacgtgcccttctgcgattcgccgaagtacatcaattcaaaattgccatcttcggaaacagtcaggctgacggtcattccaaacgcctccatcatcgccatgtcgtcttggcttatcgcctcgccgttctcggtcatccccgtcagcttccacgagcctacatatgccttcttcgcatcggcggatgaccccccgcatgcgaacagcccaaggcacagcaccgcgatggcgcacgccaggacaataagacctgccatccttctcttcgtcgtcctcatggtaatcatcccccctactcgcaatcggctggttctatgcgcccatggcaccgccgcagtattcgcagcgcccgctcgcatccggaatggtggtcgccccacagaaggggcaggtctgtgcgacctttggctttgccgcctctgctgccgcatcgcgcacgctctggcgcaccgcggtcaaggcgtcgcggatctcgcccgcctggcgctccgcctcgcggaattccacggacatgcgctcttcgatgcggtagtcgttaatcttgaaggtgatctcgtcgaagtacggcgtattcacgtgaatcgtgaggtacatgtcgtagtcgacgtcgtagcgcggcggctcgtaggaatgctcctcgccgtcgtcgtcagtccagtgcagctcgcttctcgactcgcggatctcggtatcgcatccggtcacctgcgagaagtcgagcacgtcgggattggcgtcgcgccagcgcccgcccgttgtgacgaggaagcgctgagcatcttcgtcgagcaggaccttcgtgtcgttgccgagcgtgcgcgtcacgttgaactgcgcgacgcgctccttgtttgcctcgcgccaggcgagctggtcggagatttccgccaccgtgctgtgccttcgctcgctgaagaacggcgaaagcttcgacgcgcattccttgcagaggttgccatcctcgagcttgcggttgcccagcagtccaatctcgcccccgcagacagagcacgcctttttctcgaacatcttcccgaacaagcccatgatcgacctccctttgcctcgaaggtgtgttttcgcaccttcattgtggcggggaagccctttgggcttaagctacctgcgtcccatttggcagcgccgcagtgtgccatgtggctcaccggagcgcggcaccgtgcgccacctgttctttcgggcgggccgtcggggcgtcgtctctactctcgcgatgccaccgccaagcaggggtcaggacgtggcggacccgcccggctcgggaggctcgtcgggcgcgagctgggggacgatgagaccgtcggccacggcatgcaccgccagacgcagaatactgtcgtagccggtcttcgccaagatctcggagatatgccgcttgatggtcccctcgctcatgtacaggtcgcgggcgatttccttgcgcgatttgccctcgcacacgcagcgcagtatggcaatctcggtatctgagagcttggcggctcccgagaacatgctcgagcgtgtgcgtgggaatgtcgagtacccgtcggcggtcgacgtgatgatggccgcgagctcggacgtgcccacgttcttgtacacgaagctgtcggcaccggcgctttttgcctggtcgatgaaggtgatttcgggcattcccgtcatgaccacgaccctgacgtcggggaactccttcttgatgacgcgcgtggcagagatgccgttggcgtcgttttccgtgcacacgtccatcagcacaacatcgacatcatgcgtgcgcacggccgccgccgcgagctcggcgttgccgatgctgcacacgacgtgcatatcgggcagggcgtcgagcgctgcagagagcgactcgcgcaagatgacctggtcttcaacgatgagaatgcgaatcatgggaatcctcctttgcatcgggggaacaatcgtgcgcttcgtgtggagcaagcggcaggcgcgcctgcagggaaaacggcgcggcggagacgacctcgagcgagccacccgcctcctgcgcggccgcgcgcatccctggcaagccgagcccttccaccaggcgagccggagcgggagctccgttgttcgagacggtgagcgtgcattcatctcctgcacaggcgatcgcgacgtcgacgcgcgccgcctgcccatgtttgacggcgttggtcgccgcctcgcggatgatgctgacgcatgccgctgcggctgcctgctcctgcggtagcgatccgtccacgacgattgcgcagcccacgagcgagaacgcgtcggcgatggaagcgagctcggcggacgggcccacctcgtctgcgacggcgatgtcttgggtaatcccgtgcagcagctccttcacgcgggcgagctcctcggccgtggggtcgtccttttccaagtagcggtgcaggatggagagcttctggccgatggtatcgtgcacgcgcgagcgcatcttgcgcagggcgtccgcccgggcaaccgcgcgcacgtccgcgagcgattcccccagctcgcgatttgccgccgaaatcagactgttcgtgcgcgcgatggcgttgttgagcgcctcttcttccgttacgtcggcggcgatgatgcaacggcagtgcctggcgcgcagcatgacatggcagacgtcgaacagcagcgtcgagccgtccggcatgacgacgcgcagctgacgcagcgcctcgtagggatcctccggctccgcatcctgctcgctgccgggagccccgcgtcccgcctgcacgaggaacgcggctatctcgtcggcagacgagaggtcggcaggtgcccccaagccgttcagacaagatcgcatgcgattgttcatgaacacgacgcgtccgcgcatgtccgcatacagcacgccctcgggcagcacgtcgagcgcatcgacacaggagagcggcgagggctggcgacggagcacgacccggtcgaccgccaggttgctcaccgtgcggaacagaacgtagccgcactccacgatgatcaggaacacgtaggaatcgtcgagcgcagacacgaacggcggggtgaagcagagaagcagcaccgcttccacgctctccccgacgcggcggcagcgcaccgccacgaagaccgcgagcagcgcgcacggcacgctcacgtacagcagcagatcggcgggaaccttgaacgcgaagaggtgcacgaacccgctcacgttgccagtcaccgacagctggacgagcgcaacgcagacaaagagctgcacgaccagggaaaactcgtacgcgcatcgcagcggcgacgaatcggcgcgcttggtgcacagcagggcatgcgcaagttgcccgcacacgagcaggaacaggcacgcgtagagcgcatgggcaacagggatgtgcaccgacagaacgttcacgagcctgcctcctcccgcacgagcagctcgacgcgcgcggctgcgtcctcgagggaaaccgaggccgactgccccgcttcatccggcgactccagcagccggcacgccttccccaacgcctccacgcacgcctccgcgcactggagcacgccgcggatgcggacatcgtccggggcaggcgcctgctgcacatagagcatcacgatggcatcgtcgaggccgcacgcaacgtctgcgagctcgtacaggcaatcgtagaccgcgcttgcagcgtgcgtcgagaccggtcgggcaacatcgacaagcgtgccgcattcgatgccgaccccgcgcatatcgcttgcaatctggcccaagccgagccgcaggctctctggggtaactgcagagccctccttgcctccaagcgcgagcgccccctgctgcttgcaccagctcacgagcaacttggcttgggcgagttgaccgcgcgccagggccgggtcgtccggcagcgcgtcgagcaggctgtcgatgcgcgcgaccttttctgccagagtctcggtgatgtcgtctgcaatccgcgcttcctcgcgctggcgcgcgagcgtgcgttcgagctcgctttgatgggaaagcgcccggttgcgacgcttgagctgggcgcgctggcgttcgagctgggcgcgctgctccacaagcgacgagacgtcctttctggcgagcgcgtatccgcccagcaccgcatacaccgtatagctggacctcggcgtcttggaaaggtgcagcgtcacggggccgtcggaatgccccgctacacggacagcacgtgcggcaaggtgctcgggcagaggctttgccgcatccgactgcgcgcagatgcgccccttcccgtcgagcacgcgcacgtcgtagggcacggtctcgaacagcgctccgtaccatgtgtacgaggggagtattccaagctcgagcgcgcactccatcccgattatgacgagcagggactgcacaacggtcaagttgagcggaaagctcgccccaagcacatagagaatgctgtaggccgcgccaacgaccaagaagaaccccaccactgccagcgtcttgcgcaggtccttgtgtgcgttgacgaaggcgatgacgagaaagcccaggtactggacgataatccagatgtagacgacgacatacgcgggggcataggcatacgcagatctccactcggggtcggaaaagtcaaagtcgaagaccgcatggtggagattgtttgtgagcacaagcacgaggaacatgccgtcgatggcaaagcacgccacccgcgcccagcgcgcccgtggagaagagccccatctggtctgggggacgatggaaaacagcacgaacgtggggacggccagcatcggaaggtagaacaggtaccacatgatgcttacggcgatgctgctctggacattccactttgcgacggtgagcgcgagccagaagaagagcagcgtcgcaacggcaagcaggcagtgcatcgtctctgcagaggagcagcgcaagcggactgagtagccccacccggtcacggcaagcgcgcataggaccatgacgagctccctgttgatgctgccgtccgtgggataccggggctcgacctgggacggtggcgtcgccacctggagaatgcacagcacgacgaccagcacgacggcgcacgaagcggcggccaggcgaatgatgcggatgcgcttggcagccgtctgcggcgtcacgccggcaaggccgcgtgtttggtatgcgctccgcctctccaccagcctgccgcctttcgtccgaaacgacctgcattgaagtatacgcgacacctgagacggaataatcggcagggcagccgccgggcggcacacggctgggacatgcggctctcttttcacgcgagagctggccagatgtctcagcgaaatgcaggcaagcggggcgcgggggtgtctttttcgagaggactactagctatgatttacgttgagcacgattgcaacactctcggaaaggagcctgccatgggacttcttaaagccggaataggcgcagcgggtgacgttttggccgattcgtggcgcgagtttttctactgcagctcgctcgacgcgcagacactcgtcgcaaaaggagaaaagcgcacgtcagagcgcagctcgaacgtgcatggtgaggaaaacatcatctcggacgggtcgataatcgccgtgaacgaaggccagttcatgatcatcgtcgagcagggcgcgattgtcgaggcctgcggcgagcccggagagttcgtcttcgattcctccaccgagccgagccttttcttcggcgagtcgggatcgctgggcgagcgcctgcgccagaccttcgagcgcatgggcgcgcgattttccttcggcggcgacaccggcaaggaccagcgggtctacttcttcaacacaaaagaaatcgtcgacaacaagtacggcacggcgtcccccgtgcccttccgcgtcgtcgatgccaacatcgggctcgacgtggacatctccgtgcgctgtaacggctcgtactcctaccgcatcgtcaatccgctgctcttctacaaaaacgtgtgcggcaacgtcgatgagccgcaccgacgcgagcagatcgacgggcagcttaaaagcgagctgctgaccgctttgcagccggcgtttgcgcgaatctcggcgatgggcgtgcgctacagcgccgtgcccgcgcacacaaaagagctcgcccaggcgctcaacgaggagctttcggacacctggtccgacctgcgcggtatcgaggtggcgtcgttcggggtgaactcgattgccgcatcgcccgaagacgaggacatgatcaagcagctccagaaggcagcggtcatgcgcgaccccaccatggcggcggcaaacttggcggcggcacagagcgatgcaatgcgcgcggcggcgtccaacgaggcgggagctgccgtgggcttcatgggcatgggaatggcaggcgccatgggcggcatgaacggtgccgacctctacggacgcgggggcgccggaaacggcgcggcgcagcaatccgcctaccagcaggctccgggcgggggctttggaggcgccgctggtgcgggtgtcgccgcaggggttggagctgcagcagataccgcgggggccggtggaggtgccggagccggcggctggacgtgccctgcgtgcggg

SEQ ID NO: 490 - DNA, 32759 bp, Unknown
  16S sequences of unknown bacteria
gtcgttcaagccgacagcggcgggatttctttttgttaagccgccgtaaaggcaggcttaaaattaactccttttgtgtacggattttttataagacacaatatatggaaaacggcaaaaaaaaattatgtaaacgcgaaaaaacacttgatttttactcaaaaaggctttataatacaatcatagtggtgtaaagtggagtgaaaatccattgaagtgcatcgaagtggagaaaacggaggtgaaaatcatgcttttcggaggctatcaacacaatatagataaaaagggcagggttttcattccggcaaagctccgcgaagagctcggcagcggctttatgatatgccgcggcatttacggcaagcgttgcctttgcgtttactccgccgcggaatgggacaagctggttgaaaagatcggcacgctcccgagcaccaaatcgagcgccgtaaagcgctttctttacgacggtgccttcagtgttgattttgattcgcagggcagaatacttattccgccggttttgcgtgaatatgcaaatcttgagggcgaagcgcacataataggaatggacaccaatcttgaaatatggaacaccgagctttggaatgaggagaacgcgcagtacactccggaatcggttgctgcgattatggaggagcttaatttctgatggaatttcttcataaatcggtattgctcgacgaagccgtgtcggcgctgaatataaaacccgacggcatttatattgacggaaccgcaggcggcgcggggcattcacttgaaattgcgaaaaggcttaagggcggtatgctgtatgcgcttgaccgcgatccggatgccgttaaaaccgcgacggacaggctaacgggctataacgctaaggtgatacagtcctgcttcagccgaatggacgatgtaatgcaaagcgaaggcgtacatggtgttgacggcatacttttggatttgggcgtttcgtctttccagcttgataatgccgacaggggcttttcctaccataaggacgcaccgctcgatatgcggatgagcaaaagcgggctgaccgctgcggatattgtggcaagctattccgtatcggagcttacaagaattttcagagattacggggaagaaaaattcgcctataaaatcgctctgcgaattgctgacgagcgagaaaagcagccaatcgtgagtaccttgcagctatcggatataatcgcctccgccgtacccgcaaaggcacggcgcgacggtcaccccgcgagaaaatgctttcaggcgataagaattgccgttaacggtgagctggacgagcttgccgctgctttagataaggctttcgggctgcttaataaggacggcgctttggcaataataacctttcattcgcttgaggacagaatggtgaagcagaaattccgtgaatattgcactggctgcacctgcccgccggatttcccggtgtgcgtttgcggcaagaccccggcagggcatttgctcactaaaaagccgatagagccgagtgaagaggaattaaacgaaaatccgcgcagcagaagcgcaaagctgagggtaattataaagaattaagaggggatacgcgttatgaacaacataaaatattataatgacagcttagcatacgattttgaaatgtttatgccgaaaaccgccgaaaccgaggaaaggcgcgataatatagttgcaatgccgagaatggcggagcgcacaaaaaatcgcagacgtgccgcggctaaaagcctttcatcacccgcagcctttattttggcggcaacctttattttggcgggtctttgcggaaatattatgatgcgcattaaaataaacgaggtaaattccgaaataggcgaggtaagagccgccataaccgagcttgagagtgaaaagacaagccttgaggttgaaatgcagcgcagaatttcgtttgcgaatttagagcttgaagcgacccagctcggaatgaggaagatggaaaaaagcaatgttaagtatataagggtcaacgataaggataaggcggtcagggccgatggaagcgaagtaaccgcgaagtaataaaatcgagggtaacagtaatatattatcagtgtgagatacgagagttgtttttgccgactctcgtattcggatattatcggaaacgaggtgacggttatgactgtaaagccgaataaaatgatgcttacaagaattttagcggtgatgctggtgcttataatcgcactttcggtcgtatctacgggaagtcttgtcaacattatgatcataaagggcgaaaaatatcagaaagatgcgtcggagcagcagctttacgacagccttgtgaccgcaccgcgcggagatatttacgaccgcaatatgcagaagcttgccacaagctcgcccgcatggacggtatatattaccccgaacggaataaaaagtctgaaaaaagagagtgatgccgaggcggtaagaaaaaaaattgccgaaggactctccgaaatacttgaaatggattacaatacggtgtatgattatacaggcaagaagtcatactatgttatcgttaaaaagaaggttgaaaagacagttgccgataaggtgcggcaatttatactcgataataaggatcttgagctttcgcagtatatcgggcttgattcaaccaccaaaaggtattacccgaacggaaatttggcgtcggtggttttgggctttgtgggctctgacgatcagggactttcggggcttgaaagctactacgataacgagcttaccggcactgccgggcgcgttgttgcggcgaagaacgccatgggaacgaatatgcccttttcttatgagaaggttgagaatgcggtaaagggcggctcgcttgtgctgacactcgataactatgttcagtacacggcggataaataccttgaatcggcgattgaggaacatcagattgccgagcgcggcgcagcggtggttatgaatgttaacaccggcgctatacttgcaatgtcggtcaagggcgattttgacccgaacgagccgttcacactgtcgtctgccgatcagaaaaaggtcagcgaaacggcggatgaggaggaaaagaaaaagctgcaaagcgagcttttaaaccgccagtggcgaaacaaggcggtttcggatacctatgagcccggctctgttttcaaggcggtgaccgcggctatagcgcttgaagaaaatcttgtaaacaaaaattcaagctttttctgcaacggccatgcaacggtggcggggcagtcataccactgccacaaaacgacaggtcacggctcgcagaccctaatgcaggcaatatcgaattcctgcaaccctgcgtttataacgataggtcagctagtgggcgtaagcaccttttcaaaatatttcaaggccttcggatttaccgaaaaaaccgggatagatttgccgggcgaggcatcttctacctaccataaggaagaaaaaatgggtcctgttgagctggcttcctcttcattcggtcagaccttcaacgtaacgcccatgcagcttatctgcgcaatttccgcaacggtgaacggcgggtatcttgttcagccgcatatggttgagaaaatactcgatgaaaacaacaaggttaaaaaaacggttgcctcttcaacaaagcggcaggtaatttccgaaagcacctccgccacaatgcgggagcttttaaactttgtttccgaaaacggcgctaaaaactcgcttgttgcgggttataatatcggcgctaaaacgggaacctcgcaaaaggtttccaaaatactgcaaacgggcgataagcggctgtatataggctcctgcgccacggtcgcaccgatagaaaagcccgaaatcgcggtttttgttatgcttgacgagcctaagggcgaaaagtattacggcggtgctatttcagcccccgtaaactcaaagataatggcggatattctgccttatctcggctatgagccgagctacaccgacgatgaattgaaaaagctttcaataaccgttcccgataccgtgggaagcacggttgcggacgccaagggaaagcttaccacccaaaagcttgaatacaaggttgtgggcagcggtgaaaaggttgtaaagcagctgcctgcggcgggaagtaaggtgatgaccggcggtgtggttatactttataccgaggacggcgcggcaagcaaagcaacggtgccgaactttaagggactcagcgctacggaggtcaattccgccgcggcaagagcgggcgttaatgttgaattctcgggcaacacaaccaccggaggcctaaaggcttacaggcaaagtgttgaggcgggaaaagaggttgacgccggtacggttgtaacggtatatttcagtgatgacaatgtagttgacggataggagaaaaaatgaagcttaaatatctgacaaaggtagacggagacttggcaaatacggaaattacgggtattacctgcgattcaaggcaggtaaagccgggatatctgtttgtctgcataaagggcgccgcttcagacggccacgattatgcggctgcggctgtggaaaatggtgcggcggcggttgtagccgagcgtgatacgggtgaaaaaaatcagattttggtagagaacacccacgcggcatatgccgatatatgcgctaaatggttcgggaacccggcggacagtctgcacctgctcggcgtaaccggcacaaacggcaagacctctgtaacctatatgcttaaatgcatacttgaaaaggccggctataaggttgggcttatcggcacgatacagaacatgataggcgatgaaataattgccgcgcacaacacaacaccgaacgcctatgagctgaattccctttttgctctcatgaaggcaaagggctgcacacatgtcattatggaggtttcctcccacgcactcgatcagtgccgtgtttacaggcttaatttcgacgcggcaatgttcaccaatttaacacaggatcatcttgattatcataagacaatggagaattatcttgcggcgaagaaaaagcttttcaagatgtgcaaaacagctattataaataaggacgacagctacgccgatgagattatgaaggggcttgactgtagggttgtaacatactcgacgggagacaactcaacctacagcgcaaagggcataaacttcaagcctgcgtcggttgagtatgaatttttgagcgacagcgttatcagccatatcaaggtcaataccggcgggcactttacggtctacaattcgctttgcgccgcagtctgcgcggtggaaataggtataccgataacaacggtcgcagcggcattatccgaaatgaacggcgttaagggcagggcggagaccgtgcctacgggcagagatttccatattataatcgactacgcccacacgcccgacggacttaaaaacatactttccaccttccgcgagtgcgaaaagaacaggcttattgcggtgttcggctgcgggggagacagggataagacaaaacgcccgattatgggcagtatagccgagcattttgccgatttcgttatagtcacaagcgataatccgcgcagcgaagacccgcgcgcgataatagacgatatacttgtcggcatgcgcgacagcagaacgccgtataaggtcatagaaaaccgaatcgaagctattaaatatgcggtatcgattgcacagccgggggatataatcgttttggcaggcaaggggcatgagacctatcagatactgaaggacggcacgattcatcttgatgagcgcgaggttgtggcagaggcgcttaaaagtataaaataataacaggcggagacggggaaaatgaaagatttaacatctgttatagcggcggcggttgcgtttgcggttactgcgggctcgggatattttgtaattccgtatttaaaaaagcttaaattcgggcaaactatattggatatagggcccaagtggcacaagggcaagcagggcacacccacaatgggcggagttatgataatcgccggcgtgcttttatcgcttttggtggcattcggctattcggcggcggtttcgggtcggtttgcgtccgagctgcatgacagttatcgcttatcggtctttctttcgggaatttttttggcgctcggaatgtccgccatagggtttatggacgactatataaaggtagttaaaaagcgcaatctgggacttaccgcacggcagaagacctttttgcagctgcttgttgccgcggcgtatttgatttcactctgcctttcggggatgaagactaccacgataccctttatcggggatatcaacatagtaaagggtgcgggtttgcttttctggccgattgcccttatgtttatttacggctttacaaatgcggtgaaccttaccgacggcattgacgggcttgcctcttctgttacgcttgtggtggcatgcgcgtttatgctggcttccggatttctttatcaattcggcataaacgctttgtccgccgcgcttgcgggcgcctgctgcggctttattgtgtggaatgcaaagcccgcaaaggtgtttatgggcgacaccggctcaatgttcttgggcggagcggtggtagcaatctcgttcggcacggaaagacccgtgcttctgctgcttgcgggaatcacctattttgccgaggcgctttcggatatattgcaggttgcgcattataagcgcacaaaaaagcgcctattcaaaatggctcccttacatcatcactttgagatgtgcggctggtcggagcaaaaaatagttcttgtgttttcaggcgttgcggcgctcggctcactgcttgcgctgctgccagtaatcttcaacaaataattcaaccggaggaataaataatggcggcagctaaaaagaagcccgaggcaggtaaaaggcttgatttgacctttttatcctttgtattaatattgcttactaccgggcttgtaatgctgttttcggcaagctacgcttattcctacgaatattacggcaacagctataaatttataacccgccaggcagcgtttgccgcggcgggcgttgctcttatgctgataatttcaaaaatcgattatcatttttggcgcagatttgcatggatagtatatgttctcgcaatcggtatgctggcggtgctgcttgcgctcccgcccatggtaaagggtatggacgttaagcggtggatagttttaggccctataaactttcagccgtccgaggttgcaaaatttgcaattatactgctgttttcttcgctcattgccggcaattcaaagcaaatgaaaagctttaaatttatatttttccttgtggtgcttttaggtcttacttgcgggcttgtggtgcttgagccgcatttttccgcgactatacttatttttaccataggcatagtgctgctcattgtaggcggacttcccaagcgatacattatcggcggcggacttttaggagtgggcggcggcgttttggcggtcgctacgggaattataggctacggctccgaccgaataaaatactggctcgacccgtgggcggacgccaagggcaagggctttcagacaatacagtcgctgttagcaattggctcgggcggaattttaggccgcggtataggtcagtcaaggcagaaatatctgtggctgcccgaaccccataacgattttattttcgcaatagtctgcgaggaattaggtcttataggcgcggttattataataatccttttctgcctgctggtgtggcgcgggtttacaatagcaatgcgtgcgcaggataaattcggctcgcttttggcgctgggtcttacttttcaggtaggtcttcaggcaatgctcaatatatgggttgttaccaacacaataccgaatacgggcatcagccttccgtttttcagctacggcggaacctcgcttttaatactgcttgccgaaatgggtattgtgctttcggtttcgcgcagcgcaaatatagagaaatcataatattttagggggataattactgtgaaaatactgtttgcgggcggcggcaccgcggggcatataaatcccgcgcttgcggttgcgggttatattaaggagcaccgccccgacgcggaaatatcatatatcggcaccgccgaaaagcttgaagcgaagcttgtgccggcggcgggatatgattttcatacaattgaggttgccggctttcagcgcaaaatttcctttaaaagcacgattaaaaatatcaaagcggcaaggcttgcggtaacggcttccatcgactccaaaaagcttttaaggcagctgcagcccgatttggttgtcggcaccggcggctatgtgagcggcccggtgcttaaagaggcgcagcgtttgggctttaaaaccgccattcacgagcaaaacgcatacccgggtgttacaaccaaaatgctggcgcctaaagccgaccgtgtaatgcttgccatgccggaggctgaaaaatacttaaaatgcggtaagaaacctatcataaccggcaatcccgtgcgaggcgagctgcttaaaatgagcagggaggaagcaagagagaggctcggcatcggggataagccgctgcttttatcgttcggcgggtcactgggcgcgcgccgcataaacgaggcggtaacggagcttataaagaggctgggctcatcgggcgatttttaccatatacatgcagcgggcagcgccggatacaagtcaatgcttgaagcgctcggcgatacaaagctttccgaatataccgatgtccgcgaatatataaacaatatggatgtctgtatggcggcggccgatcttgttatctgccgtgctggggctataaccttgagcgagctttgctgctgcggaaagccctcggtgctgataccttcaccctatgttgccgaaaatcaccagtaccacaacgcaatgacccttaaaaaggcgggtgctgcgcagctgcttgaagaaaaggatttaagcggagaaagccttataaatgcggtcgaggggcttatatgcaacaagccgctgcttgaaaaaatgggagaggctgcactgaaacacgcaattcccgacgcaaacaagcgaatttatgaggttttaatggacttatataccttacaaaaataagcgcgagcaaggcggtaaaagacagcgagcgaaactgtaatgagttcggctctcatcagcctatacaccgaggcgtgacacttttcgcactttcgcatagtatgaactgtgagaacagtttttattgcgagagggtgacgggatgtcagaaataataataaacggcggaaaaaggctttccggcagggtgagtgttcagggtgcgaaaaacagcgttttgccggtgcttgcgggcacggtgctctgcggtggggaaagcatagtacataactgcccgatgctgtcggatgttgaaacctcgcttaaaattcttgagcatttggggtgtaaatgccgaagagagggcggcgccgttattgttgatagctccggtgtttcagagtatgatattcccgacggccttatgcgtgaaatgcgctcgtccgttgtgtttttgggcgcggtcataggcagaatgggcagggcggtaataagcagcccgggaggttgtgaattgggaccgagacctattgatctgcacctgtcggcgctggaaagaatgggcgttacaataaccgaggaacacggctatttaaagtgcactgccgaaaacggattgcacggcgcggaaatacatttgggatttccgagcgttggggctaccgaaaatattattttagccgctgctacggcagagggcactaccgttattcacaacgccgcaaaagagcccgagataagcgaccttgccgattttctaaacagcgcgggcgcgcggatttgcggctgcgggtcggataccgtgcggatagagggtgtaaagcggctcggcggcacagagcatactataataccggaccgcatagtcgccgcaacatatatggcgtgcgccgcggtgaccggcggggaaatagagcttgaaaatgtcatgccgccgcatatggtgtcgctgctttggagctttcgcgagtgcgggtgcgatatttcggtgagcggaaagggcttgcgcttatctgcccccgaacgccttcgcagaattcctaccctgagaagccttgtctatcccggctttccgactgatgccggccctgttgcggtcgcaatgctggcttctgccgagggcacatcggttttcgtggagaacatttttgaaaaccgttacagatatatagatgagttaaaccgtttcggcacaaaaatcaagacagagggcaagaccgccgtaatagagggcgtaggcgagctttcgggagcgcatgccaaggcaacggatctgcgcgggggagctgcgcttgtggtggcggcgcttaaagcgcacggagcatccgaaataggaaatacgcaccacattgagcgcggatatgaaaaaatcaccgagcgtttgtcatcactcggggcggatataagctataagaggtgaaatttttttgaataccgaaaacagggatgatgaatttttaagaaaaagaaaagcacggcaaagaaaaatacgaaggcgcagaattaagatttttcttgttttattgctgcttttggctgtcggagcaggagttatactttcacttaccgttttcttcaaaatagaaagtatttccgcctccggcagcagtaaatattccgcagaggagataatcgccgcgtccggtataaaaaagggcgataatctgtttgtttcctccgttaacgatgaaaagcttaaacgcaagctgccgtatatcgaaaaaataaccgtaaagcgcagcctgcctgcgacattcacaataaaggtgaccgacgcagaggaatatgtctgctatttatcggggaataaatattaccccgtgagcagatcgggacgggtgctttcgaaaaccgatgaaaagcccgagggaatacccgagatcagcgcgggcgggcttaccttaaaggtcggcagaaagcttgcctttgccaaggaaaaaaccgaaaatacattaaacgaaatatttgaaaacgccgaaaagacagagatccgcatcacacgggtcgatattacggacgagcttgctattacattaggcgttgacggaagatttaccgtaaatctcggaacatcgaattacatagataaaaaattcgcgcatttatcgggcatgataaaaaatatggacgcttcggctgcgggcaaaataaatttgagcatgtggacgccgtcaaacaccgagggaagctttgtttcgtcggcttcgggaggataattttgaacaaattaaaaaaaattacaggaatgtaataaaaagtgttgaaatttgaaatcagatatgttattatctttaagtgagtgagtataatttccattttacataaagacggaggaattcaaaatgccatttgaagtagcagaagatcaagagaatgtagttcagattaaagtcgtaggcgtaggcggcggcggcggaaacgcagttaaccgcatggtagacgcaggcgttcgcggcgttgagtttatcgctatcaataccgataaagccgctcttattaaatcaaaagccaatcagaaaattcagataggtgaaaaaaccacatcaggtatgggtgcgggcggcaaccccgataacggcagagctgctgctgaagaatcccgcgatgaaatcaccgcggctattcgcactgccgatatgattttcataaccgcaggcatgggcggcggaaccggtacgggagctgctcccgttgtggcttccattgccaaggagctcggaatactgactgtaggtatcgtaacaaagcctttcggatttgagggcaaaaagcgaatgatgcaggccgaatccggcattgccgctttaagggaatgtgttgacagcttggtggttatccccaatgagcgtcttaaattcgtttccgagcagaagattacctttaagaatgctttcgacattgccgatgatgttctccgtcagggcgttcagagcatttccgagcttattaatgttaccgcgcttgttaaccttgactttgcggatgttaagtccattatgtcggatgccggctatgctcacatgggcgtcggcgttgctaccggccgcgataaggcggagcaggcagcacgcgcggctatcagcagcccgcttatcgaaacctctatggaaaatgcgcgcggcgtaatcatcagcattaccggttccgatgatatcggtcttgaagaggttgagcttgcttcctccatcatttccgatatggctcacccggacgctaccattatctggggcgcgcagcttgacgatacactggaggatactatccgtgttaccgttgttgcaacaggtctcggtgacgataagaaagaggaaaagaacaacgatttggcttctctcctcggcaacagctctgccgatgatgacgagagctacagcgatgtaatcaatttcttcaaaaaggattaattttaattagcttaaggcgcagtgtttcactgtgccttttgtttgcgtcagatcctcaaaatgccgcttgacaagattgacgccgatatgatataatcaagtcatacgaaaaaggcttttcggaactgacggataagtggagcaccacatgaaccgaaaagcttgaatgccgaccgtctgggcacacttatcatttggtgggtaagtgtgccctttttgatttcggaggggataaaatgaagaaaatagctataattatgggaagcgacagcgatttgccgattgtaagaaaagcggcggataccctgtcggcgttcggagtgccgtttgaaatacacgttttctcggctcaccgcacgcccgaggaggcagcacacttcagcaaggcagcgcgcgaaaacggcttcggtgccgttatagctgcagcgggtatggcggcgcatttggcaggggctattgccgcaaatactacactgccggtaataggcatacccataaaatcgggtaatttaggcggtattgatgcactgctttcaaccgtgcagatgccttcgggtattcccgtagccacggttgcaatcgacggcgcggtcaatgccgctttgttatgcatagaaattttaagcatatccgacagtgctcttgccgaaaaacttgccgcaaagcgcaaagccgatgcagaaaaggtgcttgaaaaaaataaagcaatagaaaacgattttaattaacggaggaatttaaaatggaaaaaacaacacagctgtatgagggcaaggcaaaaaaggtttttgctacaaacgaccccgatttggtgatagtatcttataaagacgatgccaccgcgcttgacgggcttaaaaaaggcacaataaccggcaagggtgttattaataacagaatgtcaaattatctttgccgcctgcttgaaagccgtggtgttccaacccactatgttgaggagcttaacgaccgcgaaacggtggttaaaaaggtatcaatcgttccgcttgaggttataatccgcaatatttcggcaggctcctttgcaaagcgctacggcgtggaggagggaattgttttcgcggagcctaccattgagttttcttataaaaacgatgatctgcacgacccgcttataaattcttaccacgctttggctttggggcttgcgaccaaaaaggaaattgaagaaataaaggctatggcctttaaggtcaatgatattcttaaagaatatttttcgtcgcttaatgtaaagcttgtggactttaagcttgagttcggcagactgaaggacggtacaattgttttggctgatgaaatatcgcccgatacctgccgcttttgggacgccgacacaaacgaaaagcttgataaagaccgtttccgccgcgatatgggcggagtagaagacgcatacaacgaaatgatgaaaagagttttcggcaactgatacttggaggcataaatgagcagtttaagagaagaatgcggagtattcggagtatactcgggggagacaagcgacgttgcaagcactgcgtattacggcttgttcgctctccagcaccgcgggcaggaatccagcggaatagttgtgaacgacgacggtgttttcaacgattttaaggatacgggacttgtaaacgatgtttttacacccgaaattatagaacaattgggtgaaggcaacattgcagtaggtcatgtgcgctacggtactaccggctcaaacgaccgcagcaacgcgcagccaattgtggttaatcacataaaggggaaaatggcgctggctcacaacggcaatctgataaattcaggtgagcttcgccgcgaattagagcttgaaggctcgattttccacaccacaagcgatacggaagtaatatcctatattataacaaaggagcgccttaccgcgccctcgatagagcaggcgataaacgccgcaatgaaccgcatcaagggtgcgtattcgctggttataatgtcgccctcaaagcttattgctgtgcgcgatgaaaacggcttccgcccgctttgctacggtaagacacaggacggaagatatatcgtagcctccgaaagctgcgcgcttgacgcggtgggggcggaatttatacgcgatgtaaagcccggcgaaatagttgtgtttgacaaaaacggggtcagaaccatcgaagaccactgcaaaaaagcgccctgttcgctttgtgtttttgagtatatttattttgcgcgccccgattcggtaatagacggctgctcggtgcataccgcaagacaaagggcgggcgcgtttttagcgcttgagcaccccgtgcaggcagatgtggtaataggcgttcccgattccggactggacgcggcgctcggttactcaaagcaatcgggcataccctatgaaataggctttataaaaaataaatacataggcagaacctttatagccccggggcagaaaagccgcgaggacaaggttaaaattaagctgaaccccatagccgaggtggctcgcggcaagcgaatcgttatgatagacgattcaatcgtcagaggcacaacaagcgccagaatagtaaagcttctgcgcgaggcgggcgctaaggaaatacatatgcgcgtgtccgcaccgccgtttatgaacccctgctattacggaacggatattgactccagagaaaacctgatagcctgcaagcactcggtcgatgaaattgcaaggcttatcggcgttgattccctcggatatttaagcgttgaaagtgtaaaacagattgcaaagggcgttcacggcacgggctactgcaccgcctgttttgacggaaaatacccgaccgaaataccgtcagcgcccatgaaaaacagatttgaaaccaaaatttccgaaaataaggagaacggcaatgaataattcacagtcaaaatcatacgccgccgccggcgttgatataaccgcagggtataggtcggttgagcttatgaaaagccacattgcaagaacaaaaacatccggctgccttgacgatgtgggcggcttcggaggttgcttcgggcttgaccttaagggcattgaagagcccgttttggtttcgggaacagacggcgtaggcacaaaaatcaagcttgccatgctgcttgaccgccacaatacaatcggcatagattgcgttgcaatgtgcgttaacgatataatctgctgcggggcaaagccgcttttctttctggattatattgcctgcggaaaaaatcatcccgaaaaaatagccgaaatagtaagcggcgtggctgagggctgcgtgagggcaggctgcgcgcttataggcggcgagactgccgagcacccgggacttatgcccgaagatgattacgaccttgcaggctactgcacgggaatagttgataaaaagaaaatgctgcaaaaaaacacggttaaagagggcgacgcggtaatagcgcttgcgtcctccggcgttcattcaaacggcttttcgcttgtgcggcgggtgtttgatattgaaaactgcgagcttaactctccgcttaaagagcttggcggcaaaacgctcggcgatacgcttttagagcctaccaaaatctatgttaaatcaatgcttgcactttttgaaaaagtgaacgtaaaagcagtttcgcatataacgggcggcggattttacgaaaatatcccgcgtgcactgcccgagggttactcggttaaggttgataaagcttcgcttaaaattccgccgatattccgccttattgaagaaaagggcaatattcccgagcgagatatgttcaacacctttaatatgggtgtcggtatgagcgtgaccgtagcggacgaggataaggaaaaagctgtggaaattctcaaagcaaacggcgaggacgcttatattataggctcggttattaaatccgatgagggtgttataattgaataataaagtaaatcttgcggtgctggtatcgggcggcggaacgaatttgcaggcgctgataaacgcccaaaaaagcggaattatagcaagcggcgaaataaagcttgtggtttcaagcaataaaaacgcctatgcccttaaaagggcggaaaatgcgggaattaaaactgcggtttgcgaaagaaagggaatttcgcaaaaggaatttgaagaaagcattttaaacgcgctggaaaaagaaaaaatcgaggttattgtgcttgcgggctttatgagtattttaagtgcggattttgtaaatcgctaccccgacaggataataaacgtgcatccgtcgcttataccgtcgttttgcggcgagggtttttacgggcttagggttcacaaggcggcgcttgattacggcgttaaggtgacgggcgccacggtgcattttgttaacgaaatacccgacggcggcagaattataatgcagaaggcggttgaaattaaagaaaacgacacgcccgaaattctgcaaaagcgggttatggaaaacgccgaatggataatactgcctgcggctgccgaaaagatttgcaaagaaattaaggagcagaaaaatgaacgtatataaatcctacgatatatctacccttttaaaagacaacgagtatgcggggcgcggaatagttataggaacctcgcccgataggaaaaatgcggtgtgcgcgtattttattatgggcaggagcgaaaacagccgcaaccgcgtgtttgtaaagacaggcgaaacgcttaaaaccgaaccctttgatatttcaaaggtcagtgacccttcgcttataatttacaatgccgtccgcaaaacggaaaacagccttattgttacaaacggcgaccaaacggacacgatctatgatctgatgagtaagggcaaaagctttaaggaagcgcttgaaacccgtgaatttgagcccgacgcgccgaattttacccccagaataagcggtatactttattttgaaaacggctttaaatacgaaatgagtatattaaaaagtatagacgaaaacggctcggactgctgccgttatacctattcttatccgtcggttgcggggcttgggcactttatacacacctataaccgcaacggcgacccgctgcccacatttacgggcgagccgcacagggtaaatattaaggctgatattgaagaatttgcaaatgaaatttgggaaagcctgaatggggacaacaaaatttcgctttatgtgcgttataccgatattgaaacaggtaagtacaccgataagataataaataaaaacgggagataaaaaatgaaagagtttgaactgaaatacggctgcaacccaaaccaaaagcccgccaaaatatttatggaaaacggcgcagagctgcctattaaaattcttaacggcaagcccggctacataaattttcttgacgcgtttaattcctggcagcttgtaaaggagctgaaagaggcgttaggcctgcccgccgttacctcctttaaacatgtaagtcccacaagcgccgcggtgggtattccgctgcccgataaacttaaaaaggcttgctttgtagatgatatagaagggcttgatgattctccgcttgcctgcgcgtacgccagagccaggggaaccgaccgtatgtgctctttcggcgattgggttgcactttccgatgtgtgcgacaaaaagaccgccgagcttataaagcgcgaggtgtccgacggcgttatagcccccggctatgagcccgaagcgcttgaaattttaaaatcaaagcgcaagggcggctacaatatagttgaaatagaccccgaatatatccccgacccgacagagcgcaagcagattttcggcataacctttgaacagggcagaaataattttaaaattgataattcactgcttaataatattgtaacggagaataaaaatattcccgaaagcgcccgccgtgaccttataatttcgcttataacccttaaatacacccagtcgaattcggtctgctttgcgtttgaaggtcaggcgataggcgtgggcgcgggtcagcagtcgcgtgtgcattgcacccgccttgcaggctcaaaggctaatacctggtttttgcggcagtatgaccgcgtgcttgagctgccgtttaaggacgacataagacgccccgaccgcgataatattatagacggcttcataaatcgcaacgaagaggatgtttgtgccgacggaatatggcagaaatactttaagacccgtcccgagccgttgaccgatgaggaaataaagaattatttatcgggcatttcgggcgtggctttaggatctgacgcatttttcccgtttgatgataatatagagcgcgcgcataaaagcggcgtttcctatattgcagagccgggcggctcaattcgtgacgacattgtaattgattgctgcaataaatacggcattgcaatggcgtttacgggcatgaggcttttccaccactgataaggagtttttcaaatgaaggtaatggttataggaggcggcgggagagagcacgccattattaaaaagcttaaggaaagcaaagagataaccgagctttatgcgctgcccggcaacggcggaattgccgaggacgcggtttgcgtaaatataggcgctaccgatatagctgcgcaggtaaaatttgcgatcgagaataaaatcgattacgcggtggtggcgccggatgacccgctgtgcctcggcgcggtggatgagcttacaaaggcgggtattccttgtttcggacccgataaaaaagcggcgattattgaaggcagcaaggttttttcaaaaaatcttatgaaaaaatacggcataccctcagccgcttatgaggttttcgataaccccgaaagcgctcttttataccttgaaacagcgccgctgcctgccgttattaaggcggacggcttagcgctcggtaaaggtgtaattattgccgaaacgcgtgaagacgcaaaaagcgccgtgcgcgatattatggaggataaggtcttcggcaaaagcggcgaaaaaattgttatagaggaatttttaacaggccccgaagtttccgtgctttcgtttacggacggggaaacggtagttcccatggtttcctcaatggaccacaaacgcgcgctggacggggataaaggccttaacacaggcggtatgggaacaatagcgccgaacccatattacacccccgaagttgcaaagcagtgtatggaaaaaatatttttacccacggtaaacgctatgaacgccgaggggcgcacctttaagggctgcctttatttcgggcttatgctgacttccgacggccctaaggtgatagaatacaactgccgtttcggagatcccgaaacgcaggtggttttgcccctgcttgaaagcgaccttttcacggttatgcgcgcggttacaaacggcacgttaaaaaataccgaggtgcggtttaaaaacggcgccgccgcctgcgttataatagcttcgggcgggtatcctaagtcataccaaaagggctttgaaattaaaatggacgaaagcgtaaaggacagcgtttttgttgcaggcgcggaaaataaggacggcaggcttgtaacctcgggcggcagggtgttaggcgttaccgcaaccgcccccacgcttaaagaggcgctttgcgtagcttatgaaaaggcagaaaaaatttcgtttgaaaatgcgttttaccgcagggatataggcttaaaggcgcttaacgccggaaaggaaaactgatatggtataccgtatatttacagaaaagaaaaaggagcttgcggcagaggcaagagcgctgcttaacgatataaatacgcttttgcagataaaaagcgttacttcacttcgcgtaattaaccgctatgacgcggaaaatataacaaaagagctttttgattacgcggtaaacaccgttttctcggaaccgcagcttgatattacctattccgaacttgaaaacgacggcgcggcggtttttgccgtggaatatcttccgggtcagttcgaccagcgcgcagactccgccgcgcagtgtattcagcttatatcaaggggcgacagaccgcttatccgcacggcaaaggtttatatgctttacggcgatattaccgcggacgagctgaaagcgattaaaaagtatgttataaaccccgttgaggcgcgcgaggcggcgcttgaaaaaccgcaaacgcttgtattaaaatacaatatacccgagtcggtggcaacgcttgacgggtttacctcgcttgataataaaggtcttgccgattttgtaagcaaatacgggcttgcaatggacacagacgatattaaattctgtcaggattattttaagtccgagcaccgcgaccccactatgaccgaaatcagaatgattgatacatactggtcggatcactgccgccataccacattcctaactcatatagacggcgcggtttttgaggacgagctgctgcagagcgcatataatgattatcttgcaatgcgcaaggagcttggcagaacaaaacccgtttgccttatggatattgcaaccgttgcggttaaatatttaaagtccaagggctgccttgaaaagctggatgaatcggaagaaataaacgcctgcaccgttaaaatcaaggtgaatgtagacggcaaggacgaggactggctgctgctctttaaaaacgagacccacaaccaccccaccgaaatagagccgttcggcggggcggcaacctgcataggcggtgcaatacgcgacccgctttcgggcaggtcgtatgtttacggcgctatgcgcgttacaggcgctgccgacccgcttaaaaaggtatctgaaacgctgccgggtaagctgccgcaaagaaaaatcgttaccaccgcggcggacggttattcatcttacggtaaccagataggcttggctacgggaattgtggacgaaatttatcacgacgggtacgccgcaaagcgtatggaaataggcgcggttatagccgcggcgcccgcctgcaacgtaaggcgcgaaacacccgccgcgggcgacaccgtaatactgctcggaggctcaacagggcgcgacggctgcggcggcgctacagggtcttcaaaatcgcacaccttaaaatcgcttgaaagctgcggtgcagaggtgcaaaagggcaacgctcccgaggaaagaaagctgcaaaggcttttcagaaaccccactgcctgccgtatgataaaacgctgcaacgatttcggcgcgggcggcgtttcggttgcgataggcgaattggctgacggtcttgaaataaaccttaacgccgtgcctaaaaaatatgaggggcttgacggaaccgagcttgcaataagcgaatcgcaggagagaatggcggttgtggtagcccctgcggacgttgaagaatttttaaaacttgccgacagtgaaaatttacaggcggtgcccgtagccgctgttacggaagaaccccgccttgtaatgaactggaacggcaaatcaatcgttaacattagccgtgaatttttaaattcaaacggcgccgaaaagcatattaccgccgttgtttcaaagcctgagccttacgggaaaaaggtggacggcggctttaccgataactattttgccttggcggacgaccttaatatttgctcaaaacgcgggctttcagagcagtttgactccacaataggcgcgggcacggtgcttatgccgttcggcggcaaaaaccagttaacgccgatacaggcaatggtgcagaaaatttcggttgagaaaaagcacacgaacgattgctcgcttatggcgtggggctacaacccgtttattaccgagaaaagcccctatcacggcgcttaccttgcggttatagagtcggtttcaaagctggttgcaacgggtgcggaatttaaggatgtttaccttaccttccaggaatattttgagcgccttaataaggatgaaaaacgttggggcaagccgcttgcggcgttgctcggcgcgttaaaggcgcaaaccgagcttaaaacggcggcaataggcggcaaggactcaatgagcggcagctttgaaaatttagatgttccgcccaccttagtctcctttgcggttacaaccgataaaaccgaaaacatagtatcaaacgagtttaaaaaggcgggcgataaggttgttttaataaagcccgattatgataaaaacggtctgcccgataccgcatcgcttttaaatgtttatgaaagagtaactgcgcttttgcgctcgggcaaggcggttgcctgctacacgcctaccctcggcggcatagccgaggcggttatgaaaatgtgcttcggcaattcgttaggttttaaatttgccgataatctgaccgcaaacgaaattttcggctattgctacggcggatttttacttgaagtaaccgagaatattgcagatgccgcagaaatcggcgaaataacggcggacggaaaaatttcctataacggcgaagaaataggtcttgaaagactgctcggaatttacgaaaacaagcttgaaagcgtttaccgctgtaataaggaaaacccgaagaccgaaatgcagacattttcttatacggctgaaacctgtgtttctcccgcagtaaaaacggcaaagcctaaggttttaattcctgttttcccgggtaccaactgcgagtatgacagtgcaaaggccatgcgcgacgcaggcgcagagcctgaaatattcgtgataaacaaccgcagtgccgaaaatgtggcaaaaagcgttgaagactttgcaaacagccttaaaaccgcacaaatggtatttattccgggcggcttttccggcggcgacgagcccgacggcagcggaaaatttataaccgcgtttttccgcaatgccgcggtcaaagagcaggtgaccgacctgcttgataacagagacgggcttatatgcggtatatgcaacggttttcaagcgcttataaagttgggacttgtgccttacggcaggataattgataccgatgaaaactgcccgacccttacctataatacaatagcgcgccaccaatctaaaatagtaagaacgcgcatagcctcgaataaatctccgtggcttgccgagaccgaggtgggcgatatttacagcgtgcctatctcccacggcgagggcaggtttatagcaagcgacgagctgatacaccgccttgccgaaaacgggcagatcgctacgcagtatgtggatgaaaagggagaagccgcaagcgatattcactttaacccgaacggctcttactatgcaattgagggtataacctcgcccgacggcagagtgttcggtaaaatgggtcactccgaaaggtatgctgccgacctttacaaaaacgttcccggaaattatgatattaaaatgttccgctcggcagtgaaatattttaaatagaaaagggataaattttaaaacagacagctgcaaatttaagcggctgtctgttttgtgttaaaataatattgcggcaaaaaggcaataaaaatcccgctcacaaagtgaacgggattcttgtgagtgtgcggtggaatagcacaattattcgatagggatatgctaagtcttgctcggcgtgacatttttgcctgccgcaaaagtgatattatattcgcacgaacactcgcgaagcgaatatcacgcggcaaaaagccgaatatcactgcacagcaataccactcgccgtaaggcgaatataactgaaaaaagcaattgcaaaacgcaattgcttttttcatgtagcaggactacgaaaaagatttttcgtaaacttagagtatgtctatgaaccatcgcaacatttaaaagcagattttatggtatgactttatatgtaaaattgctttccgcagagctcattctgtcaaacactcttaacatgattttacactcttcccgcagcttttcatctaatgaatccaaattgtgcacttcaacaatatattttttatcatcaaataaatatctgaggcaatcccaaagagcgtcccaattttctccgtaatattccggcaacccaaatttttctttaagcattaggtgaatttcacctaaatatttacatttagaaaaatctaatattataggattatcagttatttttttaaatgaatgataatcattataatccaattcttttacctcctatataatttcaaaaaaagttttgtagtggtcgtatgttacaaatattaacccatcatttgaatagacaactctttgattatttctataaccaaatctgtaatttatatctgcttcataccaaatacgaccttctttgctcggcaaatgaccattatcattataatattctccgccgaatatcattttatccggacaagctgttgatagatttgctaatttaggtttccaaccactttctttggcttcggcaccggttaaataataatccggcaatttcgattcatacttcaaagtccaatccgcgccgtctaatccttttgttgtggcggttcccgcttttactgttttcataatcttaatttcgcatcggcaccaatcgtgaactctcggtttgattttgggttgctcttcatttctccggattttcccgtgcatagttctacatatcggacatgttttcaaatccaatcttgctatccaatttttatagtttttgctatcaccaaattccggtttccaatcaaaaccgttaataatctgtaacaataaatataaaaagatatccattttatcacctccgttccgacatatattatatcgaaacgaaaaccgacatttaccgacatcattttatatggtaaccttgcatttacaatcggcggcaaagccgtaccgcacctattacctcttacatattacttattacttcccaaaaatcccgttgacaattttattattaggtaagagtgaagcggtaagaagtaaaaagtaaaaatcccgctcacaaagtgaacgggattcttggggtggaagatgggactcgaacccacggtctccagtgccacaaactggcgctttaaccaactaagctacatccaccatagcgcaatgactattataccataactcggcggattgtcaacaaaaactttttaaaaattaaaacttttttaaagcgagaaatcctcgggcttataattgtccgaaattttaacacgctccggaacacgctttaagggatcgtatttatatttcctgcaggaatccctaaccgatgtaacgccgcgctttgagcaaagaatttcgcccgaaaaaagcgattcgcgcccgtaagcacaatagctgcaggcatggggcaagtccttattgaatatatcagccataataatcaccgaatgttattatactatatcgtcaagcaattttccagtgttttttttcgtgcctaccgagattatgaaaattatcaccattgtaagcatagaaacagagagagccgcaccgtcgcaggtcggaacgaaatttgcagtggcagcggcttgaacggttattttaaatattttcataatcatctgcagcagcagagccgataaaagtccgtggaaaattctgcaaatcaggaaaagcagcggcctgatttttatgagcctgccgacgcttaaaagctgacaccaaatgccgatacatgcaaatccgagtaaaaatgcggtgagcggcagagaacgggtaccggcgaccgcattcgtcacttcaagcagcaatgcagcatatttaagataaggaaagcgcaggctgtaatgctttatgtaggcgccgacagccgagaaaaaaatcacccagccgcaaatgctcaaaagcgcaccggaagcaccggataccgatgaaacaaaattatcggccgcagagggcgattttacggaaacgggttttcggctatcgtttttaattataaatgagaataaaaagcacattattaaggatggcaacagatgcgcggcaagcagcgcaaagcctaacgccctcgatgaatacatacccgcgccgacagccgaaacggcgaaggcaggccccgaatttacgcagtagcaaagcataagacctgccttttcggcggaaatacgtttttctcttactgcctcgtttaaaagctttgcgcctacggggtagcctcctataaggcttaaaattacggttataaattcatcggatgataaatgaaacagcttttgcgtaacatgagaaacccttttaagacccgaaaacgcgccgctgcccattataaacattgtgcatacggtcatggggaaaagcgaggggataagcaccctgcccgaaagcagaagtccctgcgccgcgcctgaggcgcaaagctcgggctttattataataagaacggcaaaggaaagcaccgcaataacagatattattttcaattttatcccgccttttttaatacattatatgtttttcggaattataataattacgaaaacatagtatgttacggggagttgtgctgattgagtaagaaatttaagtttaaatcggaaaagccgcgggaaaagtggagaattttcggctgcggtgatgaaatagcggctgacgcggtaaagaatccgcatttagagcttttcggaaaccgcgagataaccgttgagggctgtgtgggcgttttggaatacagcgatacatatttgaagctgcgcctgccgagaggcgcgcttattctttgcggcggcagctttgatatagtaacctttgagggcacggcgataaccgtcagggggagcatttcctcgcttgaattttgcgtataggtgaattaatatgctttttatttacagatttcggcgcggctttttacgaattgaaatacgcggcgatattgcggaggcgctgcttaatatctgcgcaaaaaacggaataccgctttggagcataaggaggcgcggaagcgttatcaggagctttatttcggtaagcgatttcaggcgcttgcccgctcttgttgcgggaagcggactcagggtgcatatactcgcacggtacggtcttccgttttttacggagcgatataaggaaagactcggaataccggtgggcgcggcgctgttctttgcgtttttaagctttatgtcgggctttgtatggtcggtcggagttgaaggcaacagcgctatatcaaagaatgagcttcttgccgaatgcagagacctcggcatttatgagggcatgcgtaaaagcgatatatcgcccgcaggcgcaaagctgcaattactgcttcgggataaccgcctttcatggtgcgcttttaatatcgagggctgctatttaacggtggatgtgaccgaggcgaagagaaaggaggaggataacagcgtgccgacgaatttaaaagcgtcggcagacggcattatcaaaagaatagatgtgacctccggcaactgtattgtcaaggtgggggatacggtcgcaaagggggatatattggtctccggaatcgaggaacgcgcggacggtacgaaatttgtccattcggcgggcagggtgaccgccgtaatcgagcgggaaattaccgtaaccgcaaaatacaaacagaaaaccgccgttttaacgggaaagaaaaaaaccaaaagggtgctttcggtgttcggattaaaaattccgctgtatttagggagtgaaagcaagccgtaccgtgcaagtacgcataaaaaggtgctgaagcttttcggaagggagctgcctgcagcgctttatgaaaagcgctttgaatttacagaggaaacggaaaaaaacttcgatcggacatcactcgaggcagagcttgaaaggctgttttcggagcaggtgaagttagaaatttcgggcgatttttcagtcaaaaatcgtgaaattgacgaaattaagggcggtttaaggctgaaaacggctgttttggcggaggaaaacattgcgacgcaggatattatgttatttaatactggaaattcatagaaaatgtgttataataatataaaaaaggaataaggagacgcggtatttgttcgagcaaacggttgatatcgaacgcatcgagcagattataaatctgttcggtaatttcgatgagaacattaaacgcatagaaaagaaatacagggtgagcatcacctcgcacggcagccagattcgggttcgcggagatgttacggatgttatgaacgcggtaagaaccatagaggggctgcttgttatgataaacaagggcgagcagataaccgaccagagcatcgattatgtttcgggacttgttgaggacggcgaggatgaccgcataaccgccgtgaccgacgcggactgtatttgcatcacctcaaagggcagacccgtaaagccgaagaccataggtcagcggcaatacgccgaggcaatcaagaaaaatacgattacgatcggcgtaggccctgcgggaacgggaaagacctatcttgcggtggcatcggcagtaagcgccttcagggcaaaaaccgtgaatcgaattattcttacccgtcccgcggtcgaggcgggggaaaagctcggctttctgccgggggatctgcagcaaaaggtcgacccgtatttaaggcctctttacgacgcgcttttcgatatgctgggggcggaaaatttccagaagtgtcaggaacgcggtgatattgaggttgcgcccttggcgtatatgcgcggacgaacgcttgatgacagctttattattttggatgaagcgcaaaataccacaaacgagcaaatgaaaatgttcttaacccgcctcggcttcaactcaaaggcggtggtcacgggggatattacccagatcgacctgcccgacggcaagcgctcagggcttaaggacgcggtaagggtgcttaaaagcgtcgacgatattgcaatacattacctgaccggcagggatgttgtacgccacagactggttcgggaaatcataaaagcttatgaaagaagtgctgaaaagaaatgagtattaaagtaaacattacggatgaacagaaaaaggtaaagctccccacgggtacgcgcctgcttataagaaaagcatgtatcgccacccttaaattggagggcttccccgactctgcggaaatcaatgttacactggttaatgatgatatgataaaggaaatgaacaaaaagttcaggaatatcgactcctcaaccgatgttctttccttcccgctcggtgaaaacggcgagtatgacacaaatcccgaaaccggcgcaaaaatgctcggtgatattgtgatttcggttgagcacgctctctctcaggcaaatctctacggtcacggaatcgagcgcgaggtagccttcctcaccgtgcattcaatgcttcaccttttgggctacgaccatgaaaagggcgggcttgagcgcacaataatgcgcgaaaaagaggagcaggtgctcgacgccttgggactcgcaatcaacaaaatctgattacatatttaaggaatttatttgatgaaggaaaaatcggcttttataacaattataggcagaccgaatgtcggcaagtcctcccttatgaaccgcataatagcgcagaaggtggcaatagtttcggacaagccccaaaccacacgcaccaaaatatgcggaatttacaccaagggcgccgaccagcttgtttttattgatactccgggctttcacaagcccagaaacgagcttgataaaaacatgaacaaagcggtgggagacggtatggcggatgttgacgcggcgctgctggtagttgaagctgcccccaaattcgggcttgaaaacgggcttccgcctgcggaaagggagcttatttcagagcttcgccgcagaaagcttaaagcggtgctggcgataaataagattgatatgcttgaacgcaaggaggagcttttaagccttattgcgctttattcgcgtgaatttgattttgaaacggtggtgccggtatccgccaagaccggcgacggcgttgatattcttttaagtgagctgatggctttttcaaagccctctccgcactattttgcggacgacgatataaccgaccagcccgaaagggttatggttgccgagatgattcgcgaaaagctgttgcgcatgcttgataaagaggtgccgcacggcatagctatagaccttgagcgctttgtcgagcgggacactgccgacggcgagccgatactcgatgttgaggcgaccgtcatctgcgaaaaggaatcccacaaggggataatcatcggaaaaggcggcgcaacccttaaaaaggcgggaatgctcgcacggcgggatatcgaggaatttttcggcatccgcgcttctgtaaaattatgggtcaaggtcaaggaggattggcgcaaccgtcagggcttgattcacaccttcggactggactgacccgtttactgttatttcctattataaagaaaagcaaactgcaaatgctcttaatgtcgggcgcggcggattatcccgaagcgccgaatctttatgatgggatcgtgaattatgggagccgaaaaatcgtgggataaatttttgaaaagcggcagcgtgaacgattatctgaattttgtaaattcgcgcagggagaatgaaatcagtgaaggaaacagagacgcgttttacaacggatgcattggttataaaggaaatgagcgtaggggagagtgaccgtctggttactctcttcacgcgtgattacggacttatccgcgcttttgccgcgggggctaagtctgtgcgttcgaaaaagggcgcggcgacctcattgcttacatacggcagcttcacgcttttaagaaaaaaggatacctataaaatttacgaagccgtaccgataaaaatgtttttcacaatgggcggtgatattgagctgcttacccttgagcaatatttttgcgagcttgcgctcatccttgctccgcccgacggctcggataccgagcttttgcgcctgattctcaattcactgcatttcctgaccgccgaaaagcgcttcccgccgcttattaaggcgataacggagttcagagcggcggtcctttcgggctttatgcccgatcttgttgcctgcggaggctgcggaaaatatgaggacgatataatgtattttgatatttcgggcggctgcctttactgtaaggactgtcttccgccggaaattaaagccgtgccgcttgaccgaacacttttatctgctgcgcggcatatagtatattccgaattttcaaaattatactcgttttctgtgcctgaggacagcgcaaggcggctgtccgatataaccggggaatatataaccttgcaggcggatcatcgctttaaaacactggatttttacaattctttaaacttgtaaggggttaattattacaatatataattttaattttaggagtaaaaaatggattacaatatcgcaagatatgtcggcacgcttgtgcttgataaaattcttgaaatgctggcaaacgaagcgtcgctttcggaaactgcggaaagagcaaaggaaatattgcccgagaccgatatagcctcggttagtgcactcctttgcaatacgggtgacgcatacggctttatgtcgcgctattccgcaccctcgttcggggcggcggtcaatgtttcgtcaccgctcaggcgcgcagaggcatcgggcgtgctttccataaaagagcttttggatattgccgaggtattaagggtcgttcgcgcggtaaaagcatggcgcggcgaatgctcgggtgcgggggaaacctcgctcgacccgcttttttcggagcttataccgaataaatttttggaggataagcttaatcatgccataaaatcggaggaggagcttaacgataatgcttccccggcactttatgatatccgccgcaaaataacggcgaaatcgggcaagatacgcgaaacgcttgaaaagacggtgagagggccgaacgcgaaatacctgcaggaggcaataataactcaacgcgacggcagatatgtcgtaccgctcaaatccgaatataaggggcagataaacggcatagtccacgacacctcggctacaggctcgacactgtttatagagcctatggcggtggtggagaccaataatgaaatacgtgttttgaagctgcgcgagcaggaggagattgagaggatattatccgaattatcagccgacgcgggcagctttgcggg

SEQ ID NO: 491 - DNA, 15264 bp, Unknown
  16S sequences of unknown bacteria
aggcgctttccgaaaaaaaagcgtttcggacaagacaaggagaaaaaggatggaacacacgaaaataacgccggcacgtcctttgagaaagacgaaggggcaaaagacgctggattatataaaacgtttctggccgctgtatgcgatgctgctgccgctggtggtatatcttgccatcttcaattattatcccatgacgggattgcagctcgcttttaaagactattttgtacgcaagggaatctggaacagtccgtgggcgacgaacgacgaagggggactgtctttgttcaaacatttcaaaatcctcttttccacttccgaattcgggacgacgctcgcgaataccctgcgcatctcgtttttgaaattgctgttcggcttccccgcccccatattgctcgtgctttttctcaacgagctgacttccatgaagttcatgaagttcgtgcagtccgtttcctacattccgcatttcatatcctgggtcgtgctcggcggtatctttctttccatcgacagatcttcgggatttcaaagcgccatgcagggactgttcgggaaagaagtgcattttttcagcaacaacgccttgtacgtggtgtttctggtcgcttccgacatctataagggaatgggctggggaacgatcatttatctcgccgcgctcatgaacgtggaccctcagctttacgaagccgccgatctcgacggcgcgggcagactgaaaaagatgtggtacatcactttgcccggactgctgcccgccatttcgatcaacatgatcctcagtctttccaatatcatgtacgcgggcttcgatcagatctataacacatacaacaccgtgctgtccgattacggcaagacgctggaactctatctgttcgaactgggcgtcacgggcggaaattatccgctgtctacggctgtgggactgttcaactccctggtgggatgcatcctcgtcctcatcgccaataaatgcacaaaacttgtgggaggggaaggcatatggtgacgcaggacgcggaaaaatccgctttcaaagaaaaagtcaaaacgggctgcaagcatattttcggcggcacgggaaaggaacggaccttcaatatcgtcttatataccatattctttctcttcctcgtcgtgatgctttcgcctttcgtatacgtgattctcgaatcctttaaatccaaggaacttgtcaacggcgtccccacggagatttggagcttcgccgcctatcgcgccgtactcgggggaaaggaaagcatcgtccgcacctttttgaacaccgtgttcgtcacgattttcggaacgattttcgcagtgacgctgacgacggtgggctcttatccgctgtcgagaaagaatctcaaaggcagaagcttctttctcatatacgtcctcatcacgatgctcttttcgggcggtctgattcctttttatctgctgatcagaaacgtgcttcaactcaccgacagctattgggtgtacattatcatcggcggggcgggcgccttcaatatttttatcgtcaagggatattttcagggcatttccgaggagctgtacgaggcggcggcgctcgacggcgcgggagaatttaaaatatttctttccgtctatctgcccctttcgaaacccatcattgcgacgatagcgctctggatagcggtaggcaaatggaacgattatatgacgggtcttctgtatatcaaaaacagcaataagctgctgattcagaacaccctgcgggggatgctttccaaggccacgaatacgtcgggcatcggcggcgattccagtcagctggctctctccgagtccatcaaaatggctgccgtcatcatttctctgatccccattatgtgcgtctatcctttcgtgcagaaatactttacgaaaggcgtgatgttaggctccgtcaaaggttaaagtaggtaacggatttattatgaaaaagtatatcatcgatacggatatcggcgacgatatcgacgacgcgttcgctctcgatctggcgttgaaactcgatctcgacctcgtctgcgtcaccacggttttccgcaacgtccgcgaaagggcggcgattgcgaaaaaaatgctccgtctttacggaaaaaaactccccgtatacgcggggtacggcgcaacgctggacgggcgcgacgaaaatttcaggatctgtcagtggactcccgatctggaatgggaggagtacgcccccgacaattcctcgcccgaggaagccgtggacgcgattctctcggcggcgcgggtctacaaaaaggaattctggctgctggcgctgggccctctcaccaatgtggcgtcggcgatcttaaaagacagggaagcgatgcggggcatcggcggcatcgtcatgatgggcggggatttcgtcaatcattacgcggagtggaatattcgctgtgacgtcgccgcggcggacgcggtcttttcgtcgggcgtgaacatcgtcgccttcggacatgaaatcacctcgcagacgaggctgacgcccgcgcagcagcgatatgtcttttccatgaaacaggacgcctatcacgcgtatctggcggaactttcaaggctttggtacaaatcgaagcccgacggctggctgatggtgatgcacgacgtgctcgtaatacgatacgcggcggatcccgccttctgcaagacggtgtccgcgcccgtggaggtggaacggcaggggaaatatacgtcgggaatgacggtgaatctttccaagatggaactgcccgtttccgcgccgcacaaagtcgaatacgcggcggaagtggatattcccgcctttatcgaatattttatgaatgaaatcggctttcatgccgaaggaggaaataaaaattatgaaaaaaatactcaaagcgacggtaagtttgtgtttgattgggacgttggcggcgactgtgacaggctgcggaaatcataataattccgaaaacgacggcaaaaacaccattcgcatcttcacctattcggggcaggaatttgagtcggtcacaatggactcggtgatgaaaaagatcgaggacaccgtcggcgtcaagctctccttcgagggcgccgtggcggacgattattataccaagctcaccccgatgatgaactctcaggattggcctgacatcatctggtgcgaccccgaaaattcgggcggcgcctttcagaactggtcggatcccaagcaggaaatgctgtataatctcgacgatctgctcgcgggcaaaaaggatcgctatccctatctcaccaagctcatttactgcgatcagtataagaatatcatgtatcacgactcgcattatatcgtgcccgccgtgaatacgtccacggcgtgggcgatctattatcgcgccgattggctggaacagataggctttgtggacgaggcgggaaaggcgaaggcgcccgaaacgctggacgagttcgagtacgttatgagtaggttttcaggcgaggggctgttcacggacgccaacggtcaaaagacgggaaaaacttacggcatttctccgaacacgcagaacttttacgtcaatccgctgtacggcgcgttcggcgttacgcccgattgggacatcaccgaaagcggcgacgtgtcctatatgtatgcccgcgacgagttcaagccctatctgaaatggatgaacgccatgtataaaaacgggtatatcgaaagcaccttcaatcaaaacgtgggctttaccgaccgcgattcctggtataacggacgggtgggctgcatcatgaccaacggcgaatcgcacatggaatgggtggtcgggagtttcgaatcctcgcagggcgcggaagtcatcgtgggacctcctcccgtgggaacgggcaacacctcgtcccttacgaattgtacgctcggcgtaaagggagagaggggatattccaactggggcggctattatggcggttacgccgtcacgcaggggaccaaagacccttatgaaacgctcgatcttctggaatacctcgttgcgcccgaaggctccatgctcaggctgtacggcatagaaggcacacattataccttggacgcggacggaaacgtggtcgtcgatctggacggcagaaacgccgagagagtcaattatttctcctccgtcaccaatgtggacggaacgcagagcaattcggggcttcactcgatgggcagtcgtttcggatataacgtggattgggaatatttcgaggaaacgggtaaaatcgcggtggcgacggatatcggctccctgtatccgaaatatcgggcgttggttcagaaggcgatcgattatacgaaatatttgcagacgccgaaacttctcaacgtcaccgctttcccctccacgatcgactccaaaaagtccgaggtaatgaacatttcttcgcagttcatcaacaaggcgatcatcggggacaagaatctgacctccgattgggataagatgatcgcggacatggagggcgcgggctataagacggtgcaggccgtcatgaaagaaaccgcgatcgcgctcggaatcatcgacggctgacggaagttttttcctcggtcttcaaaaaggcggcgcacgcccgatagagaaagggggcgccgccgcaaagaataaggagaagagatgaaaggatctatcacgaagcgtatttcccttgcgttggcggcggtctttgccgtcggagcgctctctctttgcgggtgcgcgaaaaacgaaaagagcggtacgttcgacgaaacgaatatcgtgctgagcttttccgctatgagcgacatccatcagcaaaagggaaagacgcaatacgcggataagttggtgagggcgctcgactatgcggaggaactgaacggcggtccgctcgacgtcgctctgtttgcgggggatctcacggaggaaacgtggcggcagaacaacgacgattattccacggaatacaacgcggacgtggcgatgctcaaagaaaccttggaaaggagtctgaatctcgaagaaacggcggtgttttatgccctgggcaatcacgacaccgacccgtcgaggctgggcgtcgaacacatgggcggcatggcggagcttttctatcgtcagctcggagaaaaatttttctgggtggacgcggcggattccgagcccgaaatcggacgaagacacgccgtggtcaacgggtatcatttcctttccgttcagccggacgagtattggacgctgcggggatattcggacgaaacgctttcctggatagacgctcagctcaaaaagatcaccgcggaaaaccccgaacaatacgttttcgtggcggcgcatccgcccgtatacggcacggtattcggctcctatttgggaaactgggccgacctcgacctatcggacatcatggaaaaatacccgcaggtcatttatttcagcgggcatattcacaacgttttgcaggaggaggcgcagatcagtcaaaacggggcttttacggcaatcgactgcggcagcgtcaaatatacttcctggatgaacaatctcaacgattcgggcacaaatttcgataactcggtggggactcggatcgacgatttttcgcagggacttctcgtgcaggcggacggcaacggaaacgtgcgcgtcacccgctgtaactattatacgaaaagtcccatcaaggatccttgggagctttcctatccgaaatcggacaaatcgcatctggcggcttatgacaacgaggcgcgcgaaaagaaaaatgaggcacccatgtttgcgccgaacgcaaaatttgaggcgaaaaaaacgcagggaggattgtctttttcctgggacgccgcgacggacgacgacatggtgcgctactatcgcatcgtcgtatacgaaacgaaaaacgggcaaaggacgaaggtggaatcgtataatctggcgacgttcacgtatcgatacgatcgggcggaggatatgccgacggcgctctcttacgaaaaggagggagagtatccgggcgaatacgagtgcgaactttatgcggtggacgtatggggcgcgcagagcggggcggtgacttccgcggtgacggcgtaaaccgcctgcgacgggaattgaaaagacggatggcatagcggctcaaaccgagcggcaaaacggctccttttcgtttggaagcggagccgtttttgctgcccttgcgcagaaaaaatacttatcaaatcacatatcttttcaaaaaaatcgcattgacaactgtcgtataaaaaggtataatatcctctgtaagcgggaaaatttaaagagtgacggaacgcgtttttccgcgcgcacaataagaaataaggagaaagaaggcaatgtttaagaacggaagggaatgggagagaacggagaattacggcatgaaggagcagcgcagctattatatcccgttcgaccgaaaggataagaagagcgattcacgaacggactcgtcgcggtttgagtcgttgaacggggaatggagttttcgcgcgcacgagcggatagaggactgcgaactcgaagaggagttatgggagaaaatgtcggtgccgggctgcgtgcagctgtacggatacgatcagatgcagtacacgaatcaccgctatccgttcccatacaatccgccgtatatcgaaaaggagaatcctgtctttcattatcgaagaaaaatcgaagtgaggggggaaaaggacgttcgtttggtgttcgagggggtagacagcgcgttttacgcatacgtaaacgggaagctgctggggtacacgcaaattacgcacaagaccacggaattcgacctgagcggatatgtgaaggcgggcgagaacgtattggacgtagtggtattgaagtggtgcgcgtcgtcgtatctggaagatcaggacaagtggcgttttagcgggattatccgggacgtgtacctgttgtatcgggatcgggactgcatagaggattataagatagaaacggaggtaaagggcgaaagaggagaggtgatcttcgagaatctttcggagtctttatgcgaagtagagttcgaaggagagagaaaggaagtgaagggaaggggaaaagagcgctttgaagcaaaggacgtaaagctttggagcgcggaggagccgaacctttacgaactgacgattttcagcggagaggaagtgatctatgagcgagtgggcttccgccgcgtagaggtcaaagcgggggcgctgctggtgaacgggaaggcgatcaaattgcagggggtaaaccgtcacgagttccatccgaaaacgggggcggcggtgagcgaagagaatatgcgcgaggacctggaactgatgaagagtctgcacgtaaacgcgatccgcacgtcgcactatccggacgcgccggaattctatcgcctttgcgacgaatacggcttctacgtgatggacgaagcggacatcgaagcacacggggtggtgaaccgtgacggagagtacaaggtggagcaatacaacgacctggcgaaagagaaattgtacgagaacgccattaaagagcgcgtgttgacgatgtacgagcgggataaaaatcgcccttgcgtgatcatgtggtcgctggggaacgaatcgggatacgggccgagttttaagaaagcggcattggaattgaaaaaacgggacaaatcaagaccgttgcattacgagagccacagcaatatcgcggggacggaagaatactacgaggaaacgctggacgtggcgagtcggatgtattgttcgttggaatggatgcggaaaggatttttaaaggacagaaaagaaagtcgtccgctggtgctttgcgaatacagtcatgcgatgggaaacggtcccggggatctgaaagactactggaaactcatccgttcgtcacagcggtttgcgggcgggttcgtatgggaatgggcggaccacgggatacgcaaagaggggaaatactattacggaggggatttcggagagaaagtcaacgacggaaatttttgcatagacgggatcgtgtcgcccgagaggaagataaaggccgggacgctggaaatgaagagcgtatatcagccggcggagttcacgctgaaaaacgggaaactcaccgtatccaatcgatatttctttaaggagttgatcggggaactgacgatagaagtaaaggtaaacggaaaagtgcgaaagacgcgcagcgaagcgataaaactcgaacccgggaagaaaaagagctttgaaatagaaggcgaaaaagagggcttcgcggggctgtatgtgaccttgaaggaaccggacggaaaggagtcgaatggatatttcgagctaaaagaatacgagggggagagaagcgcggaggaaatagagagcaagagaacggaaacggatcgggaagtgaagctggaaggacggggtatggagcttcggatcgagaaggggaccgggaaattgctgtcggtgaaaaaagagggaaaagaggtattgggaagcgctctggaagtgagcgtgatgagagcgccgacggataacgagatgttcgcaagcaagtattttgaaaagatcggagtgtatgattcgtggcagagggtgcatgagaaggagaggacgagcggctacgaaggggaaggacagatgctgagcgattacaggagaagcattctcgactataagctcggatatgaattgacggaaaagggatttttagtgcggttagagtatgaaataccggagtacgtggagtggctgccgtgcgtgggactgagattttccctgaaaaagcgagggatggagatagagtatctcggatacggagaagcggagagctattgcgacaggacgggaggatgcgcgaaggacgtgtaccggggaaaagcggaggagatgtatcatcactatatcaagccgcaggagagcgggaatcactattcgacggagtatgtgaagtttgggaaagagataaagctcacgtcgaaagagtcgttcgacttttgcgcgatcgagtacaaggcggaggagttgaaggaatcgaagcacgacttcgagttaaagaagtcgaagtggacggaggtgttcgtgggagtgcaggcagggatcgggtcgaactcgtgcggacccgtgctcgccgaagaattcaggattccccgaaaaaagtcctttactttctactttgcgatcaagtgaacagaaaaaagagaacgtcgggaacaggaaaggacgcctctttgcggaggggtgagtccgcgaagtgaaaagggcaaggacctttttggaaaagagaacgcagcgagggactttacggcaaaaagagttcggaatcgtccgaactctttttctgtgcctcgttttttaatctgcgtttggctttttattttttttcctatacactgcggacgaaggtcggctattttttcatctcccttttcttcgcctctaccctgcgggcgagagaacgggtgacgcggccgtaggtatagaataattccgcgtacgccctgttgccctttccggaatagaggggaaacagagaggcgtcgtattccaaaaggtcttttatgagcgctttgttgacgtaaaagaaaatttcttcgccgcgatagagaacgagcaggcgattacccgcaaagcccttttccgcgcccgccacgccttttattttacattcgttcaaatcgacgggatacggctctccgcgtccctccgcgatatacaaaatcgcttgttcgcggtagatataatagcggaaatgagcgaatacggcgtaaacgctgagtcccgcggcggcaagaaagcaggcgagaaaaaagcaaagggccgtggaaagggaaaagaccgtaaaggaaaatccgccgaggacaaggatcatcgcggcgaataaaaaagggcggaaattccatttcggatagtagaggggattgccttgaacgtttttcatgaaaatatcctttgtgtgtatgttttaaagcgtaaaagaggaaaaagagccgctttcgcttttcggcttcgcaaaaatttttccgcgaaacggcgcgcggcgacaaacgccggcaacttttgtcttttatagagaagaaagagaggaacaaaaaccgcgtcggcgtttcctaaaaagacggagcgcgagagaaactttctttgcttcaaaaagagcgccgggtgcagacgcttcggagttgcgtcaaaagagcgatatgcttcggcgctatctcggaaagaggaagcgtggcagtcgcttcgattttgcttaaaaagagcgccggcggctttggctctatctcggaaaaagcggggaaaattggcgatttggcttttgtatcaagagaatgcacgaggcgcggtagcttttttatcgcgaaagttgaagggaacgttcggcgggtaactcttttatgaaaatcggacgggaacggcttttgtgttcagccgttaaaaaagataaaaagaaaaaacgaagcgagagcgagcagaaagaaaccgaccgcggcgagaaaccaaagggaaacgggcggggatttttttcgcttttcccgaaattccgcgtaagattcccgttccccgcgggaccctcggaaaaaggagcgcgccaaaagcagctttacggcgtaagcgaagccgtcgaatatgcccgcgccgcccgcccgaagaagccctgccgccccgaggcagagcgcaccgacgaaaaagcaggaatcgcttaaaattcttgccgtttccgcgccgcttttcgcggaaaatatccccgagaaggcggagaggacgaacgtacaaacaaccgctgccgccgcgcagataacccctctttttaaatttttttgcctgccgcccgtttgtttattcacttagcgccgcccgatatttttcttcctccgcgttgttgcagtagacgaaatggccgggagccacttcccgcaaagagggcttttgcgaggaatagtcgtgttccgcgagcggattgtaggagatcctttgtcgcttcttttcataatggggatcgggaaggggaatggcggaaagcagagatttcgtatacgggtggagcgggtgggaaaagagctcctccgaagaagccagctccaccaattttccgaaatacatgacgccgatgcggtcggaaaaatacttgacgacggacagatcgtgcgcgataaacaaaatggtgagtcccagactttccctcagttcgtttaagagattgatgacctgcgcctgaatggaaacgtcgagggcggacacgggctcgtccgcgatgattaagtcgggcttcatgataatggagcgggcgatgccgatgcgctggcgctgtcctcccgaaaattcgtgcggatagcgatcggcgtgctcgcgcaccaaagaaacggtttcgagcaccttaaacacctcttcctcgatatattttttatccctttcgccctgaatgatcaagccttcggaaacgatttcccgaacggtcatacggggattcagggaggcgatggggtcttggaaaatcatctgtatcttggtgacgagattttctttcttcgcctttttcgcgagggcgtcgtactccttcgaaacggcgcgcctttccgactcgctttggcaggaggcgagcttttcctccttctccgcgcggagccgcgcaaggcgtttttcccgaaattccgcgtcacagtgtttgcggtcccgtctggcgcttctgatttcgccgcgcagttccccgatccgtttttcgagccgttcccgatccgcgtttttttcggtcagcttttttttgagcgccctgatctcctccgtatagccgcgcgttcccgcgcagatgcgctgtcccttgaaatagacgttgcccgaggtgatattatacagcttgatgatcgagcggcccgtcgtagtcttgccgcagcccgattcgcccaccagaccgaatacttcgcccttcttgatgtcgaaggaaacgtcgtccaccgctttcagttcgcgggaacccgatttgaaatattggcagaggtgttctacttttaaaaggacttcgccgtgattatcttccatcccgcgcctcccctaagttcttcattctcttgatcctgtccgtgaccagcttggggggacggacgcggggcgcgtcggggtgcagcagccaggtcgccgcaaagtgcgtatccgccacgcgaaacatgggcggctgcatttcgtaatcgatttccatggcgtatttgttccgctccgcaaacgcgtcgcccttgggcggatagatcatattcggcggcgtgccggggatggcttccagcttttccgtcgtgtcgaggtcgggcatggaagagagaagcgcccaagtatacgggtggcggggatcgtaaaaaatatcctccgccgttccgtattcgacgatttttccggcgtacatgacggctattttatccgccatttttgccaccacgcccaaatcgtgcgtgatgaagatgacggaaaggtgatgctcttctttcaatcggttgatcagttcgagtatctgcgattgaatggtgacgtcgagcgcggtcgtcggctcgtcgcagatgagaatatcggggtttgcggacagggcgatggcgatgacgatgcgctggcgcatcccgcccgaaaattcgaagggatactgattgtatcgcactttgggattgggaatccccacctcttccaaaagtttcagcgcgcgcagcttcgctaagccgcgcgtgatcttattgaccgctgcggaagagagttccttgaaatagtcgatcagggcgatcgcctcccggtgcgcctgataagagtcttttaaagagagtatcttttcgtaatgcgatttcagcgcggaaatttcgtccgcaatctgcgccttcaaagcttccctgtcgatcagagaaaggggaatcaccccccaatcggggagcttgccctttgccaaaatagcgtcgtgcctggccttttgcgccgcgtagcgcctttcttcacggggattataatctgccgccagacaatattcgccgacgtttttttcgacgctctccgcaaacgtataggcggggttatccctgctcgtatccagaggatcgatggagtcccggattgccgcaaacagctttttgctctccgcacgataaaaagtcctgtcttccagcatacgctccaaatgcgccgaagcgtcctccaatagttcgacggcgcgttctttcttcttcaagctctcgcgataggcgtaagagagcgctttttccgcttcgccgataaaatcgaaaagaaagtcctcgtttaaaaattcgagcgctttttcgttcagctcgggaatctccatactcgccagatcgaaagagggatgacgatagacgtaatagccgatgcggaagaaattggggcgctcccgttcctgtgcttttgccaggacttccagacaggcgtcgagggtatctttcgcacgagcaaagccgtcttcggacttccccgacgcgttttttgcctcttcttccaaaacggaaacgagggaaggaagctcgcttttaaggggatctatcagaaatacattatagcatcctttgagggaatgcgcaagtgttttgagattttctccgacgttcgtcttctgcttcttttcgagcagaaataaaaattccctgatcgcgggttccgtttccgcgatcttgcgctttgccgcgttgtactcttcttcgagcttggtgccgcagacacaaaaactgtcgaaagtcctgcaaaggcgtctgcttttttttcgtatctcgggcgtgaggctcccgccgtacgattcgtcgataaaactattcaggagcttcaatttttcgttgaattcgctgcgggagcgccgttgactcgtttttcccttcaacagcatcgcttcggtgagctgttttcccaccttcatgatgggattcagactgctcatggggtcctgaaagatcatcgcgattttatcgccgcggattttgtggaagctttcttcctttaacttcaacagatctttgccgtcgtagaggatcgagccgctctccacgacggcgtttcccgccaaaatgcccatgatggcgcgggaggtgacggatttgcccgaacccgactctccgatgatggcgagcgtttccccgtcgtagagatcgaaggagatgtttctcaccgcctgcaccttgccgttattggtgcggaaagagattttcagatctttgacttctaattttttttcagacatagttaggcctccgtaccgcgcagagagggattaaaggcgtcgcgcaagccgttgccgaacaggttgaagctgatttccagcagcgcgataaagagcgcgggaaagaaaaggacgtgcggataagtgctcaaaagcccctgtccctgcgaaagcatcgtgccgatggaggtcagcgaggaggtttcgagattgacgatgccgagatacgagagcatggattcggtgaaaatgacgccgggaatggtgagcaccgatcccgtgatgatcgttcccaaagagtttggaaaaatatacttgaacatgatgcgtctgtctttcgcgccgagcgtccgcgccgccagcacgtattcctgattcttgaatcggtagaactgcattctgacccgcgccgccatgccaagccagccggtcagaacaaaggcgaagagaagggagggcaccacgcccaccttgctcgaaaggtgcatctgaaacagggtggcgacgacgatgaaggggacggaggagaggatctccgcaaggcgttccatcgccatatccagcgctccgccgtaatagccctcgacggcgccgtaaatagcgccgatggtgagattgagcgcggaaacgaagatcgccagcaggaaggatagcctcgccccgctcgccaggcaggtcaaaatatcctgtccgtggttgttcgtgccgaataaaaaagagggataatgcccgtttatgaatttaaaatattcgtaatagcagacgcggaccttatatcccgtctgatttttaaaggcatagagataataactcggcgtttcgcttaaaagggcgccttcgggagcctttacccatttgtccccgtccttatacacgtatcccgtgttgtcgttataccaataatactcgactccgttttcatccttcatgacgggatagacgtctttttcgctgtgggcgggatcgaggggcggggcggcagcgggcgctccgtcgggataatcggaagcggaaaaatccagtttcaggctctcgtagccgtaagcgacgggggaggtggaggacatataatcgggcacgtattcccccc

SEQ ID NO: 492 - DNA, 21418 bp, Unknown
  16S sequences of unknown bacteria
agtactgacccctatggggtctgagcaaaccactagtttactagtggttatgattgattttttgtgctgtgctatgctatactttataattgaggaaatatagggcaaagcccttttgcatgacgcacctccttccgggttgggggtgcgatgaatcatttttgcccgggaaagaggaaaggaaatgacagaacaaagtaaaattcgcaatttttccattgtggcccacattgaccatggcaaatccacgctggccgaccggctgatggaggcctgtgacgctgtttccgaccgggaaatggaagaccagctgctggacaacatggatctggagcgggaacggggtattaccatcaaagctcgggcggtgcggctcaattacaaggcccaggatggggaaacctatgccctcaacctgatcgataccccgggccatgtggacttcaactatgaggtgtcccgctctttggccgcctgtgaaggagctattttggtggtggatgctgcccagggcatcgaagcccagaccctggccaatacctatctggcgttggaacacgatctggagatcctgccggtgctgaataaaatcgatctgccggccgctgatcctcagcgggtcaagggggagatcgaggatatcatcggcattcctgcgttggatgcaccggagatctcggccaagatgggactgaacattccggcggtgctggaggatattgtgcagaatgtgcctgctccccagggggattcccaggcgcctttgcgggccttgatctttgacagccaatatgacccctaccggggcgtcattgtctatttccggatcatggagggtacactctccaccggtatgaaggtgaagatgatggccaccggcggagaatatgaagtgctggaatgtggttatctgctgcccatgggcatggggccctgtgagaccctgaccgccggagaagtgggctatttcaccgcttccatcaaaaatgtgaaggacacccgggtgggtgataccatcacagaggccgaccgccctgctgcggagcctttgcccggttatcgcccggcccaggctatggtgtattgcggcgtttatactgaggacggttccaaatatcctgatttgcgggatgcgctggaaaagctccagcttaacgatgctgcgctgtcctttgaaccggaatcttctgcggccctgggctttggtttccgctgcggctttttgggaatgctccacatggagatcatccaggagcggctggagcgggaatttgacctggatctggtgaccactctgccttcggttatttatgagatcaccaagaccgatggtacagtggtgcgggtggataacccccacaactatcccgatcctggttccattgccctttccaaggaaccttatgccaaggtgtccatcatcgcgccgccggattatgtgggcaatattatgcctatgtgccaggagcggcggggcgaattcaaagatatgcagtatctggatcaaaacctggtggagctgcactatcagatgcctctgggtgagatcatttatgacttttttgatgcactgaaagcccgcaccaagggctatgcttccctggattatgaaatgtccgattatcgggaaagtgatctggtgaaagtggatctgctgctcaacggagagcaggtagatgctctgtcctttattgcccatcgggaaaaggcatacagccgggcccggcggatctgtgaaaagctgaaggaaaacattccccgtcagctgtttgaggtacccatccaggcggctatcggcggcaagatcattgcgcgggaaacggtaaaagccatgcggaaggatgtgctggccaagtgctatggcggcgacatcacccgaaagaagaagctgctggaaaagcagaaagaaggcaaaaagaagatgcggagcctggggagtgtgcagcttcccaccgaggcctttatggcagtactgaagctggaggaagaataggccctgggtccgtggcctgagcagagtgaggcagctgaaacaaagtagcctgggtgaaggccgatatggccgtccggacaccggacccgcggcctgagcagagcgatgctgctgaaacagaatagccctggtgaaggccagtatagtaggccggacaccggccctgcggcctgaacaggggagaaaacgaggaattatgggatttcgcaaaaaacagccgcccaagccggcgatccggcagagcttgggtgtctatatccatgtaccattctgccggaaaaaatgctcttattgcgatttttactcccgtccctgcaaggatgaaagtctgatggatcggtatgtccgggcggtggagcggcatttcggagattacttccggagcagcgaaagtttcgatatcgataccgtttattttggcggcggaaccccttccttgctggggagcaaacggctgcggcagctgctcaccgctttggagaaaaccggaggcattgccaaaggcgctgagatcaccgtggaatgcaatccggagagcgtagacaaaaagatgttccgcgctcttttcaaagcaggggtcaatcgactttccatgggtgtccaaagtgctcacgatgatgagctgctggccctgggccgtctgcacacctttgagcaagcccgtcaggcagtggccgaggccaaggaagcgggattttccaatatctctttggatctgatctacggcctgcccggtcagaccatggaacagtggaaagattcagtggagcagatcatcgctctggagccccagcatatctctgcctatgccctcaaactggaaaaaggtacgccgctgtatgaagaaaatccggagttgcctccggaggatgtgcaggccgatatgtacttttacgcagtggaacggctggagcaggcgggatttgagcaatatgaaatctccaatttcgcccaaaagggttatcgttcccggcacaacagccgttattgggatttgtcccagtatctgggttttggcccttcggcccacagctttttcggcggccgccgcttttccttcatcgccgatactcagggatatatcgacggtgtggagggcaacggcccgctgctggaggaagccgaggaagtggccagtttccatcgccatggggaatacatcatgctgaaactgcgtaccaccgatggggtggatgaagaggagttttaccgtcgcttccggctggagtttacgccctatgcccagcggctgagcaaatacatccaggccggctactgccaaaacgaaggaggggtgtggcggctgacacccaagggaatgatggtgtccaatgggattttgaccgatgtgctggaaagcgaactgttgtaacaaagagaaaatgaacaatggggaagaggtttgaaaaaatgaaggatcaacaccgacgggaaggctatggcctgcggatcgtgctgatgctcctggggctgtttctgtgtgccctgggcagcgtgatcaccatgcgggccaacctgggctttacgccatggaatgtattccatcagggcattcacaatgtgacgggcatcaccatcggcaccgccaacactttggtgggaatgtttattttgtgcatcgatcttttgctgcgggagcggatcggattgggcagtatctgcaatatgctgctcatcggcccctttaccgattttgtcatctggaccgatgtgctgcccaccatggacacctggtataccggtcttttgatgttggtggccggtatgatggtggtgggtttcggcacttatctttatatccgttcccagttcggcgccggtccccgggacagtctgatggtggccacggcacggaaaacccatttcaagcctggttattgccgcattgccatcgaagccactgtcacccttctgggcttctttatgggcgggcctgtgggcctgggcactttggtgggcgcctttggtcagggcctgtgccttcagttgatcttccagctgactcgctttaagcccactgagatccatcatgagaattttgtggacctgtggcgcaatctgaaaaatggacaggccgctggaaagaaaatcggataagaaaattgttttcaaaaccgtctgccaaaaggcaggcggttttttgctgcgcgcataacatgaaatttgtaaataaaaatataatttgcaaaaataattatataaatatcttgacaaaagttgaaattgggtgcatcataagcatgaggaaagcacaggaggtgcaaaatgaaaaagacattatatagcctgatgctgtcggaggatgtggtacgggcggtggatgagcgggcccatcagttgggcctgagccgttcgggactggtcaaccagatcctggcccaaagcctttccgtggccacccccgagagccggatcaacgatatttttcagcagatggaggccttgatggccccggtgaaggagttggtgccctttttcgcacccaattcccccaccatgtccttgaaatccagcctggcctataagtaccggcccacggtgaaatacgaagtggagctgagccggggtggggaaggaaagctgggggatctgagtgtggtgttccgtacccagtcggcccagctcatcgccgatatgaccgacttcttccgcctgtgggtgggcattgagaacgctcacctggctcccttgctgggggcccggctggaatgcgctttatacgaaggaaaatttctgcggcccattcccctgccacgcagccggaactgctcggcccaggacatcgcccaggccctttcccagtatgtgcagctgtttgaccggctgctgaaagggtatctttccggagatctttctccccaggatgtggaaaaggcctattgcgaggacttgaaaaccagaacactgtacctttaaaaatgaggtgaagaacaatgaatgccaatcgctatacacagaaaacactggacgccatccgcacagcccagcagatggctcaggaaaatcagaatcaatatgtgatgccggagcatctgctgtatgctctggtggatcaggacggcgggctcatcggttcgcttttgcggaagatgggtgtggatcaggatggccttttggcccagctggacactatgatcgggaatctgcccaaggtcactggaagcaatacccaggtgtatgccgcgccggaaaccagccaggccttggatttttccgagaagatcgccgagaaaatgggcgacagctatgtatcggtggaacatctgatgctggccctgttggacaaaggcccggcttccttgcggaagatgctctcttcccggggcgtgacgaaagatcggttcacccaggaactggccaaagtaaaaagcggcccggtgaattccgacaacccggaggacacctatgacgctttgcagaaatacggcaccgatctggtggagcgggcccgcagccagaagctggatccggtgatcggccgggataccgaaattcgcaatgtggtgcggattctgtcccggaagaccaagaacaatccggtgctcatcggcgagcctggcgtgggcaagacggccattgccgaaggactggcccagcggatcgtccggggagatgtgcctgagggtttgaaggaccggacgatcttttccctggatatgggcgcgctgatcgccggcgccaaataccggggcgaatttgaagagcggctcaaggcagtgctggagcagatccgcaaatcggaagggaaaatcatcctgttcatcgatgagctgcacaccattgtaggcgccggcaaaaccgaaggcagcatggatgcaggcaatttgctcaagcccatgctggcccggggcgaactgcactgcatcggcgctaccactctggatgaataccggaaatacatcgaaaaggatgccgctttggaacgccggttccagccggtgatggtggatgaacccacagtggaggataccatttccattctccgtggcctgaaagaacggtatgaggttttccacggcgtgcgcatccatgacaatgccctggtggcggcggccacgctgtcccatcggtatatcaccgaccgtttcctgccggacaaggccatcgacctggtggacgaagcctgcgctatgatccgcaccgagatcgactccatgcctgctgagctggacgacctgcggcggaagattatgcagcaggagatcgaggaaatggccctgaagaaggaagaagatcagctgtccaaagaccgtctccagcagctggccaaggaactgagcgaggagaaagaccagttcaatgccatgaaagcccgctgggaggccgagaagagcggtgtggaccgggtgaaagagctgaagagccagatcgagcagatgcatggtcagatcgagcaggcccagaacaacctggaatacgaaaaggccgccaagctgaaatactccgatctgcctgcgctggaaaaacagctccagcaggccgaaagtgaaagcgagaagcacaccgaaaacactttggtacacgacaccgtcaccgaaggggagattgccgacattgtagccaaatggaccggcatcccggtgagccgtctgatggaaggagaacgggagaagctgctgcacctggacgaagtgatccacaaacgggtggtgggccaggatgaagcggtgcgccttgttaccgaagccatccagcgttcccgggctggcatcgccgatccggggcggcccatcggcagcttcctgtttctggggcccaccggtgtgggcaaaaccgagttggccaaatccctggccgattgcctctttgacgatgaacacaacctggtgcgcatcgatatgaccgaatacatggagaaattctcggtgtcccgtctcatcggcgcgcctccgggatatgtggggtatgacgagggcggccagctcaccgaagcagtgcgccgcaagccttacagcgtggtgctcttcgatgaggtggagaaggcccaccccgatgtgttcaacattttgctccagatcctggacgacggccacatcaccgacagccagggtcggaaggtggatttcaaaaacaccatcatcatcctcacctccaacctgggcagtcaggagctgttgggcggcatcagccaggacggggagatttctgaaggggcgagaaatgccgtgatgagtctgctgaagcagtccttccgtccggagttcctcaaccgtctggatgaagtggtgctcttcaagcctttgaccaaggaaaacctgacaggcatcatcgatatcctcatggccggtctgaaaaagcggctggcggataagaccctgaccctggaagtgaccgcagaggccaaggatctgctgattcagcgggggtatgatcccatctatggcgcccggcctttgaagcggtatctgcaaagcagtgccgagacgctgatcgccaaatccatcctgcggggcgatttgcctgtaggcagcaccctggtgctggatgtggaagacggagagctcacctgccggaaaaagtaaagaaaaaaaggacccgagagggtcctttttttaggctgtcgaaaacctgtatcgcaaaaaaagagggtttttcctccctttcatcaatccgcaaaaagccgcgacctgtgcgtggctttttgcacttctcaaggggcaagtgtgcgccaaagacatgcatgcagccccttgcaagaactcgaacaagtggccggaggccgcttgttcgacatgctcaaaggacccgagagggtcctttttttctgtgcgaaaagacggaaaagaccagggagaaagagtatggtaaaggaaagggctggagaaaggagggaaggtcagccggcccggaaaggaggaaaaaatggacatacagtataaggcctgtgcaccggaaaattatacccggggccggaaagagcctgttcgctatctggtcatccactacacggccaacgatggagataccgctcggggcaatgccgcctattttgcaagggaaaatgggggacatacatcggcccactattttgtggatgaaaaagaagtgtggcaaagcgtagaggagggggataccgcccatcactgcggggctaaaagctatcgccatccccactgccgcaaccataacagcatcggcatcgaactgtgcagccggaaaggggaagggggatatgtttttcttccccagacggtggagcgggccgctttgctcacccgttcactcatggaaagatacggcctggggccggaagatgtgctgcggcattacgatgtgacgggaaaaaactgcccggccccctttgtggagcagccggaagcatgggcagattttcaaaacagattgcaagaggaggaatggaaaatggaactgcctgcatgggcaaaaaccacctatcattggctggaagaaatgccggattgggccagaagctcggtgagcaaggccgtggcccagggcgtgatcgacaccaatgaggacaactcggtgaccctgcctggtctgaaccttcagaccatcgtgtggatggacagggcggggctactggacaaaaaggagggatgatggatggataaactgttggaagtgaaaaaaacggtcaccgctttgatggcggctctttcggcctttttgggctggatgggctggctggtggtgctctatgctgtgagcatgggcatcgattatcttaccggcagcgcccttgcggccaaaaacagagactggcaaagccagaaggcccgggaggggctgtggcacaaggccggcagcattctggcagtgatcgtggccgccttggccgattttctgctgggattggtgctgaaaaacctgcctttgagtttgccttttacctatactgtgcttttgtgtccggtggtgttggtgtggtatatcctcaccgaaatgggaagcattgtggaaaatgtgggagagatgggggcgaaagttcccgcttttctcaaaaacatcattgcagtgctccataccggtgtggaagaaagcggagataagttggtggggaaaaaataaaaaacaggcgcggagcatagtttccgcgcctgttttttattcttttcggtatttcttgggggtgaatttctgtttggccaggcgtttggtcatttccagctggttttccagactggcccgcagcagctggcgggtttcctcgtccaatggctcgccgtcgaacatcaaaccgtctccggcctcttccagcatggccagggtttccgacagcttttgggccacatcccgcaccggcggatcgtccggcaggggagcctgccccggggcctccaccagctgggctttggtaatgccgaaatattgggccaacagctggattttgtcaatgcggggataggcattgccgctgatccactcgcacacggtggaatagggcacctgcaaagcgctggcgatttccttgcggctgacgcccagccgggccatttgccgtttgatgttttcacccatgatttttttattgcccagatcgttcatacaatcaaccccttggtgcaattatacgatattatcgtataaactgcaagagtacaatggaaaatacgatttaattgttgacaaaacgattaaatcgtattacaataaatgcaagatcagaaaaggagtgaagaacagatggcattgacattgcgtgcggcccggatcaacaagggactgagccgtcaggaggcggcaaaattgctgggggtgggggtttccaccatcggcaattacgaacggggcgtttcctatcccgatgtaccggtgatccaaaagatggagcaggtgtacggtgtaccttatgcggagatgacctttggaggaacccaggagggaaaaaaggatggaggagagtaaacagctgctttttcaggcagcaacattgtgggaacatatcggggaaaggcggttctatgtgggcccggaaggagtgatggtgccgccggaaaccttttttgatgcgttttcctattgggaggacggcggccagcagctggaggacggccggcggctgctccataccaagctccagggagtgccggtttattgctggggcaaggtgagctgaacccttggggaaaccattgcaatctcgtttttcctttgctacaatcaaagcaaaggaaaagggaggaaaggctatggaaacactgcattttgcccatatcagcgacacccacctcacctgtggaggaagcagccctttcatgcagcgggtggcccgggaggttcgggacccctgggacaatctgaaggactgtctttgtcagctccaggggaaagcattggattttgtgctgctcaccggcgaccttgtccacgagggagaggaagaggactataaggcgctgaaaagattgctggaggaaaaactgccgggagttcctttgtgctgcgccatggggaaccatgaccatcgcctggccttccgccggggatttttgggagagaatacagaggacgccggtccctatctggcctacacccaggtgaagggattgggtattattacattggattccccctacctccatgggacagacggcacactgcctccggatcagttggaatttttgcgcaagtctttggagcaaaaaccgccccggggaaatattgtcatccttcatcatccggtggtaggccagcagccttgggggccgatggaagcgccggaagaatattttgagcttttggcaaagggaaaggtgcggggcgtttttgccgggcatctccactcgtccttccacggctggcggggaggcgtgccccattacaccgccggttctctggcctttggcatcgatatggaagaacacagagcggtgtataccgaccagtggtgctatcacctgtgccgcatggagggggacggaaccgtgtccttctggccggtagccctgtcgcctagtcgccaggtgctccaggtaaaacttatgggatcatgaaaaaagattcctcggaaatttccgaggaatctttctttttgtcccatcaaaccgccttttgttgacaaggccccgggggcggtgtaaactaaagaatgaatacatgggcctttgtggctctgaacccaggaaaggggaagaccgatgaaggctcttttcaagaaaacctccggcagtatcggggctgattgttggctgttggcccttctgctggcggcattttttttgttccagctgcctcggctggatcaagcgccttgggaaaattacgatagctggcgccagaccgatacctacaccattgcccagaattacgcccagcgggatatgaatcctctgcggccccaattcaattacgacgggcctggggataactatgtgcagctggagctgcaggtgatgccctatctgtcggctgtgctgttcaagatactggggcgggagccctattgggtgcccaggctgatcagcctgctgtttttcatgggctcggcggtgttttgctatggcatcggccgcagattgctgaaaaatcgctgggcggctttgggggcttttgccgtttacctggtcatgcccatcagtttgctgtacagccgggccatcatgccggaagcggcagccctgtttttctatacggcggccatctatttcttcctccgctggtatcaggggggaggccggggcgctttggcactctccggggtgatgatgggcctggccattatggaaaagacgcccacagcctttgccgggctgatgatcgtggtgctctttttcaaaaaaagagggctgcgcagcttcaaagatcccatgttttatggctatggcgcgctgtctttgggcttgcctctgctttattattggtatgccggacaggtggccaccttcacttttgtgtcggggattgcggaaaagcacattttgaaaagtgcctttaccgccatctttacttcccaggcctgggagtttttccagcgggaaatgcccttgtttttcagctggccggtgctgattgggatgctgctgggagttctgtgctgcctgaagcgaaaaaacctgccacttcttctctggacgctgtccatggctttggagaccgctaccatcgtggccgtcatccggtttggatattatatggtgtttttggcgccgctgtttgcccttctgtgcgccgctgtgctgctggaggtgggaaaatggattcccaaagccggagcggtgctggggtgtgtgctgtgcgccgccgtgttttaccacagcctgactgtggcctggcccatggcgtctgtcaatgagaccattaccgcccaggcccaggtgatccagaaggtgaccgatgaggaggatgtgctggccgtggcttcaccggacccggtgctgctgggagcttgccagcgcatgggctaccgggccaatctccggtattacgactacatcccggaagagccggaagaggagcttgcctatttcctgggccatggcgtccggtattttgtggtcccgggcggcgtgattccgggggaagacggggaagaatatctggagctgctgcagacccggtatcccgtggtataccaaggggaagaatgtttgatttttgacctggaggggaaagtatgatggcacaactgcgggggggttacgaaaagctgcctccgattttgaaatatctcctgatctccatttttgtcacggtggtggatgccgccattgtgtgggtgctgtccatccgcatgggcgtggggctggggatcgccaacaccgtaggcgtggtagtgggccaggtgatccactatggtctggcttccggtcaggtgtttgagatggagttcggaacggtgggagcggtgatttatttcggcaccttcctgctggggctgttgctggccaactggatcatcaccaccgtctttgccctctgccagggactgatgggaaaaaacctggcctttctcgtgtccaaaggatgttcggtagtgggaccgtttttcgccctctatttcctgcggaaaggtttgtatgcttgtgtgaaaaggagaagaagcaaatgaatacattgtttgcctgcctgccctgttataacgaagaagagaacatcatccccctgaccctggggtggctggagcaggaggaggctttgaaaaaagagggcttttcccttcaggtggtggccatcgacgacaaaagcaccgacagcacaaaggaaaagatcagccagctggagcgggagcatccccaggtgcatctggtggcccatgaaaagaatatgaacctgggcggcggcgtcaatacggcggtgacctatttcctccagcacggcgtgcctggagatctgtgtgtgctgatggatggggacaacacccatgaccccaagtatgttcattccatgatccaggcggtgcgccggggagccgatgtggtcattgcctcccgttaccagggaggcgccgaggttcacggcgtgccccgtcaccggctgctgcttagcgatggggccaagctctattattccctcatgcttcgggtgcccaaggtgaaggactacacttgcggctaccgggcctatacctatcagagccttcagcgggcccggaaaaagtatggagatcagctgattacccagcgctccttcgcctgcatgatggagcttttgtacaagctctaccgcagcggctgccgttttgacgaagtgccgttttccctgcgctatgacaacaaaggtggggaaagcaaaatgcgggtgctgcgcaccatgaaggacagtctgaaaaccgcctggcagctgcgccgggggaaaatttaaaaaatgcaaaaaaaagatccggccgtcatccggatcttttttcggccctttcggggccagtgaaacaatatgagaaacagaaaagagagatgaaagggaaaagagggagtgaagcgggaggggggatcccgcgggggtttcaattctcttcctcccgatcacagtttttattctaatgggcaaatgtaaagagagcatacactttttttaaataatatttgaacaatcaaacttcttcatggggaagcatatcaaagagcttgtaaatatcccctgcgcccatggtgaagatcagatcccccggacgggcctgccggcggatgaattccgcagcttcgggaagggtaggggtgaaaacggcgccgggaatccgatcggccaggcttttggaggagatatggttcacattggtttcccgggcggcatagatctcggtgagcacggcgatgtccgcataggaaagggccttggcgaactcttcaaacagagattgggtacgggaataggtgtggggctggaatacacagatcacccggtcatagcccatgcttttggccgtttttaatgtggcgatgatctcgtcaggatggtgggcgtaatcgtcgtagatcacagctccctggaaggtgcctttccgctcaaagcgccggcctacgccggtatagccgcccaaaccggcggcaaaggctttgccggaaacgcccagggcatggcaggccgcagcggcagccagggcgtttttcatgttgtgttccccaggcacctgaagggtggcccggcagtaaaattctccaaagcaaatgatatcaaaggaataataccccaggttcacttccacattctggggatatacatcccagcggggttccagaccgaagcggatgatccgccgattacaaccggttacggctttttccacatggggatcttcgccgttggccaccaccagaccttccttctccggcaccaggcaggcgaagcggtggaagctgtggatgatatcatcggtgctgctgaaaaaatccagatgatcccgttcaatgttcagcaaaatggcgatggtgggcagaaagctcagaaaagagttccggtattcacaggcctcagccacaaacagatccttggcgccgatgcgcagactgccgccgatcatgggaagctcgccgcctaccatgacggtggggtccatatgtgcgcaaaggagcacctcggtgagcatggaggtggtggaggttttgccatgggtaccggccacgcaaagggcgtggttgtagccttgcatcagaaggccccaggcctgggcccgttccaaaacgggaaggccccggcgatgggcttcttcaatttccgggttggaatcgggaacggcggcggtgcggatgaccaaagcggcattccccagctgctgggcgctgtggccgatgtaaacggtgatatcctggcggcggagcatggccacggcgggggagtgatcccggtcgctgccctggacggtggcgcccatctgctgaagaaggcgggccaaggcccgcatggagacgccgccgatgccgcagagatgaatgactttgtgctcttcgatcagttgtttcaggtgctgatagttcatatgttctcatcctattcaccctgccctgggcagggatggagtattttttaaaatgaaaaggcaagccagaaaagagagggactggcatagtccattttgctttggggcagactctggccttaaaacctcactttattatatagcattttccatggaatataaatagaaattttcatagaggtggtggaaaagtaaaatctcccctttctcctatacaaaaaaatacgaaaatgctataatgaactggaatggaacggagagaggggaaaaccatgaaaaccttgattttgacggtatccaccggatgggggcacacggccacggccatggccatcgaggcccgtctgcgccaaatgggcggtggcgctcataccatcgatgtatataaatatatcaacagctttatttccgagactctggacaaaagtaccgccatttataccaaggtggcccctgatatctatcggctggtttacgattatctggaaggcggcgtggaggtggaccagaggaacattttcagcctggtcaatcggctgtgttcctataagctggcccgtctggtggaggattacgatcccgatgtgatcgtgtgcacccatgtgtttgccgcccagctggccaatgagctgaaaatgcggggcaagacccgggcccgtatcgtgggcatcgtcaccgattataccatccacccttactgggaaacggtgtcctgtgtggattatgtggtgacggccagcgaagtgctcacctaccggggggtcaaacgggggattcccgaacggaggatcaagcctttgggcattccggtgcaccccaagttcaatgaaagcctttccaaagaagaggcccggaagaaactggggcttttgccggaaggggatgtggtactgatgatgggaggcggcctgggctatggcctggcggccagcgaggtggagcggctgctctatcttcgtcattccttccagctgctcatcgtctgcggcaaaaataaaaagcagcagaagcagtttgaaaaataccggcgggagcacggctttgaacatctccatgtatatggatttgtggacaatgtgcaggagatgatggatgccgccgacattctggtgagcaaacccggcggcctgacggtgagcgaggccctggccaaaaagctgcccatggtggtggtcaatcccatcgccgggcacgaagagcggaacctggaatttctcctcaactgcggcctggcggtcagcgctaccaaaacattccctctggatgaagcggtcaatctgcttctgagcatcccccgccgtcgggaggagatgcgccgggccattgaaacggtggccaagccccatgctctggaggacatctgccagtttatcaccacattgcaagtgccgggccatgctgcattataaatcagaaacaaaaagccgccggaaaaaccggcggttttttgctgccctgggagaaatgcttgttgacaaagtatattattcgatatataatattgacaaaaaaacagaaagcaggtgattccatgacatttcagctgggggccgcgttactggacgcctgtgtgctggcggtgctctcccggggggacgcttatggttatgtgctgacccagcaggtgcgccaggtgatcgaggtgtcggaaaccgcattgtatccggtgcttcgccgcttgcagaaggatggatgcctggacacatatgaccagccctatcagggacggaaccggcgctattaccgggttaccccccaaggcgtggagaggctggaagaataccggcagcagtggcgtctgtataagagccgggtggatacgatcttgctcaaggagggacacgagaatgacgaaggatgaatttctcaccacattgcgcacattgatccaggatatgcctccggaggaccggagggatgtgatgaattactataccgagtattttgaagacgctggcccggaacgggagcaggaggtgctgcgtcagctgggaagccctgagcaggtagcccgggaagtgctgggaggaggctttgcaccggcccaggaacctgcaggcgcaccgaaaaggaaccgtggactgatttcggccattgccatgatctgtgccgctcccattgcgctgccgctgatggccgccggggtgctggtggtgtgctgtatggctctggccgcactgctgtgcgtaggaggactgctggtggctgccgtggccgtggttgttatgggtggggccagtatgggagcagcgctgtttaccggtggtctgggaagcggcaccgtgctctactttctgggaagcgggctggctctgctggctttcggtgtgttgttcgtggctctctttgttcggtttggtattttttgtttccggaaaatcaccgactgggccagtgattttgtgaatcggaggagggttcggcaatgaaaaagggctttcgtaactttgtactcctttgcgtaggtgtgggagtggtgggcgtcgccatggcggcgaccggagcggctatgggcggccagaccagcctgcgcctgaaccggccgggggtctctttggagatcaccccctggggaatcagcttttcccaggggagcagcaccagtcacggtcttctggacggactggatgaaatgctggacgctttggacgacctggacaaaggggattttatgagccgcatccccgatggggatgacgattggaacctgatgggagaagatgaagttacccggcggcaactggaggagtttggatcgctcaaagtggatgtgcgccagcttccggtggaagtgaaggagggagacgggtttgccatcgcctgttatggtgaagagacggtggatgctgtttcctacactttggacaatagggagctgacggtgaagcaacaaagagacctgacccaaatgggcggacataaagtggtcattaccatgccgcgaaacagtgctatggaggagatcaatatccaaagcgacagcggagcagtatcgttggagctggaggatgacattctggccaccagcatcacggtgcagacccaaaccgctcccatgagtgtggatgtgaaaatgtgtactgctttgctgctggagacccagtcgggagccatttccctggaagaagaaaacatcggcacggccagggtgaatgcggtcagcggtgccatatcggtggaaggagccttgctggggcagctggaagtgacaagccagagcggtgtcatcaatgtggatgtggatggacgccaggagaactatacctacacctgttcctctcagggtctcgtggcggtgaatggaaatccgggcagcacatcgggaggccagggccataacaccgttcatctgcaaagccagaccggcctgatcaatttggaatttgacgattgaatatagcttaaaattttgggagaggttcctgaacttcagtttgccgaaaacttatctgattaggggggaatgtttgcccactccctcatcaatttgtaaaaaccggcgacctgtgcggcggtttttacaccgatcaagggccaagtgtgcgccataggcgtgcgcgcaggcccttgcaaaaatccaaaaaagtggcttttgccactttttcggcatgctcaagcgcggggaaactctctgcgctttttctatggggaggcccggttgcgaagggaaagacggcatggtatactggagcggatatttgcctttgcgctggaaaggaggggctttgcgatgccccagcgatttgatgtgattttttgggattttgacggcactttggcctattcccgccatttgtggaccaattccatctgtgatgctttgaaacaggccgaccctgagacaaatatcggttttgatcagctgcgccctctgacccgcacctgttatccttgggatcaaccggaagagaattactgccgcttgcagggcgcggagtggtggagctatatggaaaaacaatttacccgggcctatgagcaggccggggtgaaaagagagatcgcccggaatgctgcggcccgggtgcggggcgagatcctccggccggaaaaataccatttgtttgaagacaccttttgggcgctggaatattgccgcagagaaggctgccggaatgtgctgctttccaacaactacccggaactggaggaaatcacaactgtgctgggtctcacccccttgctggatggtatggtggtttccgggcaggtgggctgggacaagccccggccggagatcttccgcctggctttggagcaggtcggcaagggggcccggtgcctgatggtgggagacaacccggtggccgatgtccagggagcccgaaattgcggcattcctgcggcgctggtgcacaaggaagccgattgcggtgccgattatcgcagtgataccttgcgaggactggtggagcagatttttgctccggctatggtttctggcacattttgataaaatttcctggggaattctatggaagatggcagatatccccggcgtaccctttctgctatactgtttccaaagggggaacaatcagaaaggggggagccgcctgtaggcggaaaatatgaaaagaggaagaatgggaagcacagcggtggacatgactcagggaacgccctggaaacagattttgcgttttgccctgccgctgcttttggggaatttgtttcagcaactatacaacacggtggacgccgctgtggtgggcaattttgtgggaagcgaagccctggccgccgtgggcaccagcggcccggtgattcagctgctggtgggactgtttttgggtatgagtctgggcgccggtattctgatttcctagtttttcggtggaaaggtattcggcaatattcagcgggcggtgaacaccgccatgcttctcacactgaccttgggacttttggttacagccattggtctgcccctggccccggtgattctgcgggctttacgggtgccggaaaaggtgtatcccatggcggtgagctatttgcgggtgattttctgcggtgtcactcccatgatgttttataacatggtggcctccattctccgggctttgggcgacagccgcacacccttggtggccttgggcatcgccagcatcatcaacatcattctggacctgttctttgtcatcgtctgcggctggggcgccgtcggcgtggcctgggccacggtgatcgctcagaccctttcggtgtttttcagtggctggcggctgcatcatatggaggaatacacccgactgtcccgggattttatccatccggatctgcatatgttgggtcgaatggtgcgcctgggtttgccctcgggtattcagcagacggccttttccgctggaatgatgctggtgcagagcatgatcaattcctttggtcaatatgtgatggcggcctatgtggtcactatgaaagtggacgctttctgcgtcatgcctttgatgagcctgggactggccatgaccacatttaccgggcagaacatcggtgcaggggatatcccacgggtggaaaagggctgccgccagggactgctgctgacggtatccatcaccggcggactttcggtgctgctgtttttcttcggcaaatacccgctgatgctctttaccccggagccggagctgctccgggaagggatgcatcttttgcgtattctctgccccttttattgggttattgccgtcagtgatctgctcaccggcgtgatgcgtgggtcaggaaataccattatccccatgatcaattccatgatctgtctctgtctgatccgtatcccgctgatgtattggctggtttctctattccatagcgccgatgccttgtattacagcatggtgatcggttggtgcgtgggcgccacctttatgagcctgttttacaagttcagcccctggcgccgccgggccttggaaaaataccaaaaagatcagcagctgttggctgagaaataggaaatggtttgtcaaaagccgccgggccgcagtgaactgcccccgattgtgcggacagcacaaaaaagcctctatgtaggaaaatat

SEQ ID NO: 493 - DNA, 25679 bp, Unknown
  16S sequences of unknown bacteria
acaatatattcaaaatcataaacgttatccaccattttctgaaccttgggcagatggtcggcgccggggcggaaatattggctgaccctgtttttaagctttttcgccttgccgatatagattatttttccgcttttgtcgtgcattatataaacaccgggagaaaagggcagcttaagcgccttgtcgctcagtcttttgagattttcattcataatacagcctcccttgacggaaaataaaaacggtgatggaaatgcttaaaaaggaaataaagctttgccttttgataatttttttgtgcgcacttgtcggcacggcgggaattttggttgccgacaatcggacaaggcaggtgggatttgccgactcctccccctccttcagctttaagatcgaaggcgggcacggagagctgacgattttcggacaggattttatcatcgggttcgaaaattaaagagcggcggcaaagtatgccgtccgcccctattcatgctcttttcagcaccgatttaacgcggccgaaaagctgttttacctgtaaaggctcgattgccgcattcacacccacaataacaattccgcttataacggcggtaacgaccgcccacacaagccaacccagaagatttgacgggtcggggcggacaaatttatggacagcgacaaccgtcgcaagagagacggcgacgtttctcgctattctgcgcagcgacatttttatgctgtcattgacaagatatttgttgttatagaaaatacagtcaagcgagcgataggaataggaaacgatggttcccatgagaattcccgccatgccgagcggctttataagggcaagggaaacgacaatgttaataaccgcctcgagaatggcgcggctttgcgtctccttaaaatgcccggcggcgcatatcatggtcagcgacggaattcggatattctgcataaggccgagaatcacaaaaagaaaggcgatgttctgtctgacatactgcacgccgtcccccacctcggccgtgtaaatcttcacaaagggaagcagcagcacggcgcagcaggtatagacgcagaacagcacgatcatgtaaaaatattcatagttggaaaaggcctttttcaaagcatccttatcgttgctgaaaataagcgaaccgaagcttgaggttatgccgtttgaaaaaacgctgagcagcgaggtcagggcgacggccaccatgttatatgtggtgtaaacgctgacctcctgaagggaggtcgctcccatgaaaagcgtcagaatgacgatgtcggtgttgttgacaataactccgactatttgatgaagcaaagccgcccagcgctgtttaagcaggcccttttgaaagcctgttttgaaattcatgtatttatacttacgcttggcgtaaatataaacgaacacaaaccgcgcaatatagagccccgttgcaacgcctttaacaacaaggaaggagaagccgagcttaatgagcagaatggaaacgcccatgttgacaagggttgccgcagcctgagtgagaaaaatgacatatccccgctgatcggccgtcaaaagcaccctgtattttccgataaagaaaaagtcgacgagattgctggcggcaagaataagaattaaaatacgggtggaaaggctgtctatctgattcgccacaaaaagcggatagaccaccgtcatgatcgtcagcaggattacatatgccccgcccgatttataataaaacttttgcagagccgacagcacggaatttattgcgccggtgtcattttggttaagcggcccgtaaagctccacaatcgccgccgagcttatccccgcctcaacaaggttgagataggtcagaaactgggaaacggaatttatcattccgttgactgtggagccgtattgattgagaaaaaaccgcggcagcacaagccccgacaccgccacaactatttgcagcagcaaatttccccaaaggtttttgaaagcctgtttatttctcattttacaagcgccgtgccgagaattttaaagccgccgctttgagccgaagccaaaagctcctcaagctttttatactcggtatatttttcccgttccacaaggcacacggtgccgattttttttgcggcgacaagggagttcgcataatccccgaaagagggaatgacggcggcgacaagaccgttttcgccgctttcaagcgctttttcaagctcggacaaatcgtttatcgagctttcgtcaaagcttataagggttaatttttcgcctttttcggcgaggaaagccttaaccttttccataagggaggacaaatatccgcagtcaagctcggaggagacgaccgcaacggccttaattccgttgtcggcacatttttgcacaagagaatttgcgaacatttttatcttttcggtgttcttttcatttctgttcatcgatatttctccttactttttgaattcgcccaaaacgggaattcccatgttttcaaaatcggctctgcggttaagagtgggctttacgagaattttaatgaacacgccgaagcaggtgagcacaaaggcaagcacggctataagagcgattttcacggttttgctttccgagaaggaggaaagactgctttcggtgggctcggccttttcgcttacaagctcggaaatgcagtcgacggttatcttgtcgccgatgtccttgaccgaaccgttgatgtagtcggtgtagattttcatcaggttgtcggaaaaggcgcggtcctttgtttccacatggattttaacacccacatttcccgccgcaaaggacacggtggtgaattttgcgaactgcttgggtgaaatttttccgtcctgcaaaaccgaagaaccgaaggtctttgtataaagctcctcgataaaatcctcggaatagctgtcctcggttttttctataacatatgtggtgaccgcctcttgagaaagaagatccttatacatttcggcaagcttgttgaccgtgtatcccgccgtggtatccttgggaatatcgtcgtttttaaagcagactattttctcgttgatataatacggctcctcctccccgacaattgtttttccgcagacaagtgcgccgaaaacaagagtcacgacgagggtgacggcgataatgagatatttatacttccaaagaccgatgcaaaaatctttaaatccaagatgttcaaacataaattttcctccgttcggtattatcaaagcctatactgtaggatttgttgaatagtgcggcaaagaaccaacaaaaagccgtcggcagccagaactgcgccgtgactataaactggagccagccggttgcggcgtcccgtggggcaaagaacagcgatgtcagacagataagcacaaaggcaaatccgaaggtgccttttttggcaagcttgatcatgtaaatcatgaatatgccgagcacaatgctgaaaagcgcgacgcccacaaagccgaagtccacataggtttccagcaagaatgacgagccgtagccgtttccgttaagataatcctgccctctggcaagataggacatattgtgggaaaagctgttgctcaccgttcccataacgacgttgtttccgtcgccgaggtctgcggcgccgaaaagggtctgagccaaattcccgtgaagaaaataatcgagaaatccgccgaaggtatagtttctcaaaggtctcacggggaggcggtccataaccgaatgtgcaattgccaaaacgtcaaaggacacaccctgtttatagaagaaatcggttattacctcaaagccgcttgtcagtcccgattcgctgcccgatctcgtgtaattgaatataccgagcattattattcccgccggagccgcaagggccgttaccgcgcgttcaaagcggccgaaccacttggttccgttttcgtaaatatccctcatgtaataataaacgatgcagaaaataagattgagcacgatcggattcctcagtcccattaaaagcgagggaatggccgagaacacataaagcacaaggggtaaaaatgcgtgaagctttttgggatatgtggcaagaaagatgcaaagggtatacggcataaatctcgaaaccacataaacaacatagggcatggcacttttaaaggaagaataatattcgagataggagtggctcataacatagagcagcttttctccctccatgagcatataaaaaagaaaggaaaagtagaaaagcacacccgccgcaatacgcagatttcttacataagcctctctgtatcttatttcattaagcgttcttgcccttttcggggcggctctttcgcttttttcggttatcttttcgccgattacggcgccgatttgcataaaaatcagcccgaccgagagaagaacaagggaaaagctgagatgaacccagtcggaataccaccattcggtccccttaagcatacttataagcggtctcgaaataagaaacacggcataggtaaagttgaaaaccaaaaatattatgcggctgcgcggtttttcaaaaccgtagatcatgttatttatccaaagaaaaaccaccgcggtcaaaatcgtgttatatgaccctatcaaaaggccgagcggccacatggcaaaggccgcgaaaacaagcagataccttgtcagttttgtcaccgttcaacctcctttttttcggtcatttcgtcaatcagccgtctccagcgccccaaaatttcgggctttgagaacttttcggtcatgcggccggcattatcggagaatttcttcataagatcgccgtcatttgcaaggagagaaagcttttcggccattttatcggtgtcatagggctctatgagaaatccgtttattccgtcctctaccatttcgcaagggccggtgtcgatgttaaagcttacaatgggcaggcggttggccttggcctcaagaagcacgagaggaagcccctcacggtatgacggcagcacaaaaatcgaatagtttcggtaaagcgacagcacattcgggttgtttcccatgagcttcagctgtccgtcaagaccctccttttcgacaagagcctttatgtcgtcgaaggtctcgcccgttccgtacacgtgccattgccagtccgggtgggcggacaaaaatttctttgccgccttgaccataaggtcatatcccttttcctcgccgaatcgccccacgcaaagcacctttttagcataaaggttgcagggggcggcattttcggtcacccggtcgtcaatccagttgtgaattgtcagcactcttttgggcgagatgtgaaaatatttgatatagtcgtttctcgtcttgtcggtgagcacgacggttttgtcggcaaaaagcgaggtgagaaaacgtataatcgtaatggcgcgctcgtttatctgatttataagagcgccgtggtcgcagtatataaatttggtgcgattgaaaatcatggagggaatggccacatagccggggtaatttcctataagcagcacggcgtcaatggagttttcctttaaaaaccttctcagcggctttcttatttcccacattatcgaacgcaggcgggtgttttcggcatcgagacaaaagaccttttttgcggccgacaaatcataagcaagttcgctgtttttttggaaaaccgttacaaaataaacgtcgtatatgtccccgaaagcccttgtcagcgaggctgcaacggcctcggcgccgccggtgaccgtcatgtcccaatcgagcagggcaattcgcttttttttcttcatttgcatcactgtatcttatatattttttgctttgtaagcagaatttttttataaagcggaacactgaatttaagcgcaacggcggcgatttttctcatttttccgaagcccggatcccttataatatcaagggtgtggcttttaagatacttaaccgtcgttttatattcgggaatggatttgcagtcgtccctcatcagcattttgtcgagcacgttgaaataggcgttgcggtagcgaaactctgcaaagggcagcgcctcgggacaaagctccctcacctgccgaacgcatatgtcataggcctcgataacatcgagatcgcccttgcggaagggcttggtggtgatactgtcggcacggcggaaataataatacatcggccttgaggtgacggcggttttttccacccttttaagtatctgcggggtgaaaaatccgtcctcgtaaagcttgccgacgggaaatctcacctctcccaccgtctgccttttataaagcttgttgcaggccgacggcagcccgtctccccgcagcatatatttatagctttcggttttattaagggtgaattcccttatttcccgaacctgagttacctccttgccctcaaacacatccatcgccgagcaaaccgcaagatcggcgtcgttttcggtgatgagacggtgaagggtttcaagcatttgctcatggatataatcgtcggaatccacaaacatgagatactcgccgagagccttttctatgccgaaatttctcgcgtcggaaaggccgccgttgcgtttgtgaaaagcctttatgcggctgtcgccttttgcatattcgtcgcacatttcgccgcagcggtcgggagagccgtcgtcaacaagcagcagctcaaaatccgaaaagctttgcgaaagaatcgattttacgcatcgatcaagatacttttccacattatagaccggcacaataacgcttatcatcggttttcctcccgcagaatttcaagggttctttcaagaccctcggcaacggaaaatctcgccttaaatccgagagcattgattttcgacgggtcgagaagcgcctttgtggccttggaatatccctttctttcctgttcgtcgggaagctcgaaaacaacctttttgcctgcgttttcggcaagtatggccgcaaggtccttaagccttatgtcggaacgggggtcggcgatgttatagctgcctcccttttcgcccttaagcaaaagcagcagcagcccgaacacaacatcggcggcatagcaataggaaaaaagctgagttccctcgcttttaagcacaatatcctcataggccgcagcctttttgataaactgggcaagagccttgctgtcggttttgagcatactcggtccatatacacggcaaatgcggggaattacaatgtccataccgtatttttcgatatacgcctggcaaagagcctcgccggcacgcttgccctcgggataacccgcacgcagggtgttgcagtctatatagccgagatagtcttcggagaatttgtcggtgtctcccctgttttcgccgtatatttcgacgctcgacaaaaataccgaacgctttgcgccgcagagcaccgcataatcaagagcgtttttggttcccacaacgcctgtaagtaccgttcctatagggtcggcggcatagtctctcgggtgggtgttgctggcgcaatggaacatataatcgaatttctcgtgaaattcaaggggcttgtttatatcgccctctataaacttaaaatttttcgaatcggaatatttttcaaatctcttttttgcccgctcggcgtttctcgcaagggcaagaatttttatgtccgaacctaatttttcgtttcggtacataagcgcgtcgcaaagcacgctccctatcatgccggtagctccggtcacaaaaaccgtagagccgtcgaggcgctcgagcccctcaagagtgtttatatattcaagatcgtcaatataatttttgttttcggtaagcattttatccctactttttcattttgagcatggccttaaagacctcgaggtcgtcgggagaggtcagtttaaggtttttgtcgcttcctgcggcgaaatgaagggtctctcccaaatcaaccatcatggtgttggtgtaggacgagccgtatattccgatttccttttcaaaggcctcgcggtatctcgcaagaagatttccgaatttatatgcctggggcgtggaaacgcggcgaagggtctctcgcggaatgtactgagttgtggtctcgccgttgtcggtgacgaaaatctgctcgttataaggcagagaggttacggcgtttccgtatttttgacaggtgacgattacgtcggaaagcacctcttcgtcgaccatcgggcgaattccgtcgtggattatgacaatgtcgtcgtccttgcagattccctcaaggctttcgacaccgtttcttatggactcctgtcccgtggcgccgccctttacgatgcttttaagcttggtgattccgtttttctcggcataggatttaagggtgtcctgccagccgtctatgcacacgcagacgatattgtccacaagcggatgcttttcaaagacctcaagtgtatagattatgaccggctttccgtcaagcagtataaactgtttgggaatgtcctgtcccatgcggactccccgtccgccggcaattataacagcggtaatcattttttatcttcctttccggtgagataatattttcctttataaattttatagctgtgctcgcagtcgagcttgacaacatcgtgatgagccacctgcttttccttgggcggcagcttcatataatccccgaaggcgattttcaaataatcgtcatagccgacggggatgggcattttctcaccctcaaaatccacaaatattgccttttcaaaagccgattttggatatttctttttcatatatcccggccccgagcaaagctcggttatgttgccgcaatcggcgattttatatttggtcattttacgctcggcgcgcttccaaatcttatatctgatttttttgcctctgaaaatgccgagcagcaccctcgagccgaaagccataagaccgccgtgcttttcgggaacggtctgagcgcagaaaagcgagtaaacaagggcatgaaagacctgccattttcgggagagcgccgagtcggggtagccgtcgagaggcagtatgtcaagcaccacgccgtgaaccatgtcaatatcctgctgatagggctttataagggtggtttcgctgtctcttattgttatgaaaatattgcggtcgacggtattttcatcgggtcttgaaattttataccgctcctgagtgccgttgtcccaaagcttataaagcttttcatagtcgtctctcggcatgaaaaaatcaaggtcgtcgtcccacggaatgaagcccttgtgacgcaccgcaccgatacatcccccgccgcaaaaatagcagagaaggccgtgttcgttgcagaaatccacaaaatgctttgccatgtcaagattgattttatgaagagaagcaagctcctcttttgtatattccggcatattacagccgtcctttcaacggtattttatccgaatgattatatcataacccaccgcaaaatacaacttatatttaaagattgtaacctttggcggccgtgagaataaataacagttgaaaaaaccgtctctcggtggtattatgacatcgataaaagtaaaggagtttttccatgtttaccgtttctctttgcgttgtggcatacaacgaacaggaactcataggaaatcttttggacgatttccttggccaaacatatcccaaaaatctgaccgaaatcgtgctggtggacagcatgtcgacagaccgcactcccgaaattttcgcggaattcaaaaagaaacacgtcggcgaatataaaagaataataatcgccgaaaaccaaagaaagaagcaggcgacgggatggaacacagccataaggctctcctcgggcgacataatcatgagaattgacgcccatgccgaaattccgccggattttgccgaaaacaacgtaaagcaccacgaagagggcgaaatggtcacgggaggcgcacgtcccaacataatcgacggctccaccccgtggaaacagacccttctcatggccgaaagctcggtgttcggctcaagcgccgccgattttcgaagaaacggccaaaaacggtatgtaaaatctcttttccacggagcgtaccgccgagaggtttttgaaaaagccggtcttttcaacgagaccctcggacgcaccgaggacaacgaaatgcactatcggatccgtcaggcggggtataaaatctgcctttgtcccgacattatttcctatcaacacacgagaagcagcctgcccaagatgctcaagcagaaatattccaacggatactgggtggggcgaaccgaaaaaatctgtcccggctgtctttccctttaccaccttgttccctttgtattttttgtgggaataatcgccgcggttttgctcggccttgtttcgtgggtttttcccgcccttttcttcggctgttattttgccgccgccatagttatgacggtttcggcgataaaatcggaaaagaaattccatgttttttatctgactcttcccgttcttttctttttgcttcatcttttttacggtgtgggcaccgcagtcggatttataagtcttttgacaaagcccgtcaaaaaaaagaaataaaaaagtccctctcgggactttttttatttacagcgaaagctcgttataggtcttgccgtcaagcgagcgccacaaaaatacgttgttttcaaaaatcatgtagccgtgctcgctgttttccttcggaatcgacaccgagccgggattgagataaagattgccgtcgccgaagggctgccatgcgggaatgtgggtgtgtccgtgaagcaatatgtcccctttgcgcaagggcggcgggctgctcatgttgaaattatggccatgggtcgcataaatcaggcgtttttcggcggggattatgcagtaatctgctaaaatcggaaaatccaacaccatttggtcgacctcggtgtcgcaatttccgcgaacgcagaaaacacggtcttttatgccgttgagcattgatattaccgctttcggcgcataatccttcggaaggtcgtttctcggaccgtgatagagaatgtctccgagcagcagcagcctgtcggcgccttcccgctcaaatgcctcaagcatttgtttgcaatagtattccgaaccgtgaatatcagaggcaatcatcagtttcataacgctttttctcctttttttcgttttaaaagacacacacactcaatgtgctcggtgtgggggaacatatccacggggcaaagcttatcgacggcatagtcctccgtgagaaatgcaagatcccgagccattgtttcggggttgcaggaaatatatacgattttttcgggagcggtttttagcagagattttaaaaattttatgctgcttcccgccctcggagggtccataaaaaccacatcgggtctctgcccgttttgcgccgcattttccataaaaagacctgcatcggcggcataaaattccgcattggttataccgttgagctcggcgttgcgctttgcgtcgctgaccgccgttttgttaagctcgactccgacgacccttttcgcatgagaggcggcgcaaaggccgatggttcctattccgcaataggcgtcaaacacggtttcctcccccgaaaggtcggcatagcctatcgccttgttgtaaagaaccttggtctgaacgggatttacctgataaaaggatttgggggaaattctgaatttaaggccgcacagcacgtcctcgatatagcccttgccgaaaagaattttctgccgttcacccagcacaaggcttgtaaaaccgccgtttatgttctgtacgacggtggttatgtccgggtggcggcgcaaaagctcgtttacaaagctgtttgccgacctgagttcctcccttgcggtcacaagaaccaccattatctcgcccgtttcaaagccccttcgcacaagcacatggcggagctgccccgtttcgctcttttcgtcataggcctttattttaaaattcggacacattttgcggatgtcggcgattatttcatcggcctttttatcctcaagaagacagccgtccgcagacacgattttatgggaacttgactgataaaccccggaaattattcttcccctcgacactccgaaggcggcctgaaccttgtttcggtaatgataaggatttttcatgccgacgattttttcaggccttttatatctcgacagcagccttttgaccttactctgctttataagcagctgacggttatatggcaaatcaagcagctgacagcttccgcaccttttaaaggcgggacaggttttttcatccatttttcacaccctccttcgcctttaaaacattataaaccgccaccgagccgattacaaccgctcccccgaaaagggacagccaccccaccgtttcgtgataaaaaatcgccacaagcacgggatttaaaatgggctcgacggtggatgtcagcgatgcggttattggcgagaccgagcgaagtcctatcgaaaggaacacataggaaagccccatctgaacaattccgagcacggccaccgcccaaatgtcggtggaggtaaaggagctctcggtaaacaaaaacggaaccccgatcgcaacgctcataagctggccgaaaaaggccgagctttcgaaatcggaattgggaatggccttttgcataaatatgaccgcataggtcgctcccgaaattatggcaagtatgtttcccgccaagccctttgccgtcagcccgtcgaagaaaaagcaaattatgccgacaaaaaccgttatgcaggtgacgacctcggccttttgcggtttctttttgagaaagaccaccgaaaaaattattataaaaatcggcatggtgaactgaagcacgatggcgttggcggccgaggttatttttgtggcgcagacgtaggtcagattcatgacaacattgcacagcgccgcaaaaatcacggttttgttcaccctgattttgtgacccgtcgctttcataaatgcaaacataaccgcggcggcaaaaatgctgcgcactccgtttatggtgacgggagaccagtcgatgattttgataagtattccggcaagactgaaggtcaccgccgaaagcagcacaaaaaaggtgcccgaccttgaattatttttcattttcaaaaagacctaccgtctccacatgagccgtccgagggaagagatccacgggtatcgctcttttaagacgaaatccgagttcgcaaagcaccgccgcgtcccttgcaaaggtggcggggtcacaggaaacatagacgatttttctcggattcatatcatttgccgcaatttccaacacctctcggtcgcagccctttcgcggcggatcgacgaaaacgacgtcgggacggactttacgctttgcaagagcctttgcgccgaaggaggcgtctccgcatataaactctgcgtttgcaatgccgtttatttttgcgttcagtttggcgttttccaccgcctcgggaacaatttccacaccgaaaaggcgggagatttttttgtttttcgcggcaatgagacctatagccccggcgccgcagtaaagatcgacggcggtgtcggtttcgccaagatcggcaagctcgattgccttttcaaaaagacggcgtgcctgaaaagaattgacctgataaaacgaaaggggcgaaagcacgaatttcactccgcaaagggtgtcggttatggtatcggaaccgtaaaccgtcttacattcgttccccattatgacattgtttctgttgcgatttatgttaaccgtaaagctgacaacttcgggaaccttttcgacgattttttcggcaagctcacgctgatttttaagactctgtccgtttatgacggcgcagaccgcaatctgaccgctttcgctgcccttacgaatataaagatggcggcaaagtcccttccccgtgctttcgtcatacaccgaaattccgtattttttcaggtgatttataaaaatttcggtgatttttgaaaactcggcaggctcgagaccgcagttgccgattttgacaattcggtggcttttttttgcataaaatcccgcaaaaggctctcccttttcgtcaattccgatgggcagctgagccttgtttctgtagccgtccgttttgtcggcggctataatctcatcaggtattatgtcaagctttgcgatacggcttatgcagtctctcacccgctcatattttatacggcattcctcgtcgtaggaaatgtggcgaaagacgcagcccccacattttccgaatgcctcgcagtcgggctcgaccctgcatttcgacggctttaaaaccgaaacggcctttgcgatacagtaatttttacagacctttattatccgcagaattatctcgtcccccaccgcggttttgggcacaaagacggtcatgccgtcgatttttgcgatgccgtttccgtcggaggatacggccgttatgaccgcgcgggtctcggtatttttcttaaactccatattttttacctgcatttttcttaagtacaggtaatattatgccacaaacggccttcaagtcaagggttaatgtttaaaatacccaaactgaatttttattcggtggaaatgcaagttttcttgcccccttttattgacaatatatattgtatatgatataatttaagccaaattttatggatgaatttcaaggagtgcatacaatgtctaaatacacaaaagaggatgttatccgcattgccaaagagcaggaagtaaactttatccgccttcagtttaccgacattttcggttcgctgaaaaacgtcgccataaccttaagtcagcttgaaaaagcccttgacaacaagtgtatgttcgacggctcctccatcgagggttttgcgcgtattgaggaatcggatatgtacctcgttcccgacatcgactcctttgtggttttcccctggagacttaagcagggcaagaccgcccgtcttatatgcgacgtctacggcgccgacatgaagccctttgccggtaatccccgctacatactcgaaaaggtcatcaaagaggccaacgacatgggttatgaattcgacgtgggacccgagtgcgaattcttccttttcaagcttgacgagcagggccgccccaccacaaaaaccgacgacacctgcggatatttcgaccagagccccgtcgacctcggtgaacagtgccgcagagacatttgcctgacccttgaggaaatgggattcgaaatcgaagcctcccaccatgaggttgcgggagggcagcatgaaatcgactttaaatatgacgaggcgctgcgtaccgccgacaacatcaccaccttcaagcttgcggtaaagaccaccgccgccgcccacgacctttacgccacctttatgccaaagccccttttcggccgtgcgggttccggtatgcacgtcaatatgtcgctccgcggcaaggacggcaaaaacgccttctttgacgaaaacgaccccctgcagctgagcaaggccgcatacagctttatcgccggaatcatggagcacgttaagggtatggccgccgttaccaacccccttgtaaattcctacaaacgccttgtgccgggatatgaggctcccgttcacatagcctggtcggcgcagaaccgcagccccctcatccgtattcccacaagccgcggcgccggaacaagaatcgagctccgttgtcccgatccgtcggcaaacccctacctcaccctggctctctgccttgcggcgggtcttgacggactcaagagaaatctcacccccgtcgcccccgtcaactccaacgtctacgatctcggtcacgacgagcgcaaggaactcggaatagacaaaatgcccgcaagccttaacgaggctcttaaggaaatgcagaaggacagccttgttatggaaaccctcggcagccacattgccgaaaaatatatcgaacacaagaagaacgagtggagagaatactgcacccgcgtttcttcttgggaagtggaaaaatatcttaaccagtattgataggagtgaaaaccttgtctcttataattcccgaaaactataaatctctgctgtcccttcgcgacacgcaggtggccataaaacaggtcaaggactttttccagtgcgagctggccaagacccttaatctgacccgcgtgtccgctcctcttttcgtcagaaaagattccggtctcaacgacaacctcaacggtgtcgagcgtccggtcgcctttgacgtcaaatccacgggagaggtcatggaaatcgtccattctctcgcgaaatggaagcgttgggctctcggaaaatacggatatgagccgggcgaaggactttacgccgacatgaacgccatacgccgcgacgaggacaccgacaacctacattccctttatgtcgaccaatgggactgggaaaaggtcattgaacacgaaaaccgcaccaaggaggccctcgaggacaccgtgaaaagcatctacgaggtgcttaaggccaccgaaatttatcttttcggtctctatcccgagatttctcccgtgcttcccgacgaaattcattttgtcaccacccaagagcttgaggacgcatatcccgagctttccccaaaagaacgcgaaaacgccgtctgcaaaaaatacggcgccgttttcctcggggaaatcggcggaaagcttaagtcgggcgacattcacgacggccgcgctcccgactatgacgactggaccctcaacggagacattctcgtttggtatgaaactctcgggatcgccttcgagctttcgtcgatgggaattcgcgtggacgaaaaatctctgctgtcccagcttgaggagcgtgggtgcagcgaccgtgcagacctccccttccaaaaggatttgcttgaaggaaagctcccctatacggtgggcggcggcatcggtcagtcgagactttgcatgttcttcctcaaaaaggcccatatcggcgaggttcaggtttcggcctggcctaaggaaatggtggaagaatgtgcgaagaacggcataaatcttctgtaaagtgtaaggaaggatagctatgaaattcacaaaaatgcagggactgggcaacgactatgtctatgtcaactgccttgacggtatgccggaaaacccttccgagcttgcaaagaaaatttccgaccgtcatttcggcgtcggctcggacggactgattctaatttgcccctccgacattgccgactttcaaatggtcatgtataacgccgacggttcaatttcggaaatgtgcggcaacggcattcgctgcgtgggcaaatatgtccgcgacaaggggcttaccgacaaggacgaaatttcggtggaaaccggcgccggcataaaatatcttaaatttttccgtgagaacggcgaaacaaagcttataaccgtcgacatgggcgctccggttttaaacggtcttgacattcccaccgttttcgacaaaaaccccgtggttgctcaggacatcgaggttgacggcgttacatataagacgacctgcgtttccatgggaaatccccacagcgtggtttttctcgataaagacgtcgacctttcaaaattcgacatcgacggcatcggctcaaaattcgagtgccacccggcgttcccgagaagagtcaacgccgaatttgcaaaggtcatagagcccggtctcattgaaatgagggtatacgagcgcggtacgggcgaaacgcttgcctgcggaaccggcacctgcgccacccatgttgcggcgcggctcaacgggctgaccggcgaccgttcggtggttcgtctgctgggcggagagcttattatcgaatggaacggacagggacccgtcatgatgaccggccccgcagaatttgtttttgaaggtgaataccaatggcaaaagtaaacgaaaacttcttaaagcttcgcggcggttatcttttttcggaaattgcccgccgtgtcaacgaatttaaaaaggcaaatcccgaccgtgaagtgctccgtctcggcatcggagacgtaacccttccccttgttcccgccgttgtcgaggcaatggaaaaggcttcggccgaaatgggcaaggcggagaccttccgcggctacggccccgaattcggttatgatttcctcagagagaccattgccgaaaacgatttcaaggcaagaggcatcgacatctcggccgacgaaatattcataagcgacggcgcaaagagcgactgcggcaacatcggcgacattttcggcgtcgacaacattgtggcggtgggcgatccggtatatcccgtttatgtcgacaccaacgtcatgggcggccgttcgggtgagcctaccgacgacggaagattttcgaaaatcgtttatcttccatgcaccgaggaaaacggcttcactccctgccctcccgacactcacaccgacataatttatctctgctcccccaacaatcccaccggctcggtggccacaaaagagcagcttaaggcatgggtcgactatgcaagaaaagaaaacgcgatcattcttttcgacgcggcctatgaagcctttataaccgacgactcgattccccacagcattttcgaaatcgaaggtgcgaaagagtgtgccatcgaattccgcagcttttccaagaccgccggctttaccggcacgagatgcggctttaccgtggttccgaaggaagtttgcggaaccgattctaagggcgaaaaggtctcccttcagaccctttggggacgcagacagggcaccaaattcaacggcgtaccctatgttatccagcgcgccgccgaggccgtctattccgaagagggcaaaaaacaggtgaaggcaaacatcgagtattatctcggcaacgccgccctcatcaaaaagggactgaccgccgcgggatttaccgctttcggcggagaaaactcgccctatgtctgggtaaaaactcccgagggcatgggcagctggaaattcttcgactatctccttgaaacctatgccattgtcaccacacccggtgaaggcttcggacggtgcggagaaggatatatccgtttttcggctctcggttcaagagaggttgccgaaaaggctgtcgagcttttaagcaaataaggagacaaaatgagacatcaggaaactatatgcgtacagggaaactatgctcccggcacaggcgaaccccgcgtgctccccatttatcagtccaccacctttgcctatgacacctgcgaggacatgggaaaggcctttaatctcgagcttaacacacacctttacaccagaatatccaatcccaccctttcggccgtcgccgacaagataaacgctcttgagggcggcgtgggcgcagttctgacctcttccggtcagacggcaaacatgattgcggtgctcaacatctgccacagcggagaaaacattctcgcctcgggcgaaatctacggcggaacggtcaacctgttttccaaaacccttaaagaaatgggtatcgagacaaggtatttcgacattcagagctcggatgaggaaatcgaaaaactcatcgacggcaaaacccgtcttattttcggtgaaacgctgtctaacccctctcttgcggtttttgacatcgagcgttttgccgctctcgcccacagaaacggccttccccttataatcgacaacaccttccccacccccattaactgccgtccctttgaattcggcgccgacattgtcacccattccaccacaaaatatatggacggccacgcctgctcgacgggcggagccattgtcgattcgggtaacttcgactggacaaaatatcccgaaaaattttccgggctgaccgctcccgacgaatcctatcacggtcttgtatacaccgaggccttcggaaaggcggcatacatcaccaaggccaccacccaccttatgcgcgacacgggagctcaggcctcccccataaacgccttcattttaaatctcggcctcgaatcccttcatcttcgggtcgaaaggcattgccggaacgcgcagaagattgccgaatatctcgcaaaaaatcccaaaatcggttcaataaattacccttcgcttgaaggcagcaaatattatgacctgtgcaaaaaatatctcaaaaacggctcaagcggagttatttctttctgtgttaagggcggcagagacgcctccgttaaatttctcgacaatttgaagcttgcaagaatagtcacccatgtggccgacgcgcgcacatgcgtacttcatcccgcaagcaccacccaccgccaactgaccgacgagcagcttaccgcctgcggtataacacccgaccttgtcaggctttcggtgggaatcgaaaacgtcgacgatattatcgaggacatcgaaaacgctcttaatgcgtaagctgaaaacggcttataatttcgagaaaagaaggaaagaaaaatgaacaacaccaaggttaaaaagctggtctttgccgctctgtttgcggctctcgcctgcgccgccacattcattcacattcccgtgccgtccatgacaaacggctatgtgaatctcggcgactgcttcgttctccttgcgggtttttgtctcggccccgtctacggcggtcttgcgggtggaatcggctcggcgctgaccgaccttctcggcggttatttccactatgttcccgcaacgcttataatcaaatttttaatggcacttgccgcagctctcattgcaaaggcgcttaaaaaacatgtgtcatcccccgtttcctacaccgttgcggccgttgccggagagcttatcatgataggcggatatttcctctatgagctgtgcctttacggtgctgcggccgtgggaagcattcccggaaacgccgttcaagccgtagccggacttgtttcttcggttattatcgtgcttattcttgacaaaagcaaagccacaaaacagcttttcgacggactgaagggtgaataaaatgtatgaagatttaaaagaacaggcaaaaaaagccgccgaacaggtgcttgaaatgtcgggtcttaaagaggggcaaatcgtcgttatcggatgctccacaagcgaaattgtgggcgagcgcatgggaacccactcggtgcccgaggttgcaacggcggttttcgacgaaatctacaaggttttttcaagaaaaggcgtttatgtggcggctcaatgctgcgagcatctcaaccgtgcgataatcaccgaaagagaagccgcaaaaggccttgacattgttaacgttattcctcagcccaaggccggaggctcctttgccaccgcagcctacaatgcctttaaagaccctgttgctcttgaagaaatccgtgccgacgcaggtcttgacatcggaggaacgcttatcggtatgcaccttaaaaaggtcgccgttcctctaaagctgacggtgagaaaaatcggcgaggcaaacctcaccgccgcgcgggtcagaccgaaattcatcggcggctgccgagcggtctacgacgagaatatgttataaaaagcaaaagatgcccttgaaacttaaattcgagttttcaaaggcatcttttttgtttttgcatttatttcatcatacaatgaacgttgtccataaagtcgcccacggccttgaccgccttcgaggcctgctttttaaaggactttttgtttgtgcaataggcaattccgccggcaacgctgcccataacgccgagcattattcctgcgcccatgcccttggcaaatcccatttttccgagcattttctttcctcctttgtttttttcaacaatattatttcccgaaaatgattttttaagcaaaaagtccgattgattttcaatcggactttttcaatgctttttgatttatttgagaaccgaaatggcgtcggaaatggtcttttccatagcctcgcggccgtatctgtcgaccttggccttgttgatttcaccgtgggtcagacagccggcaccgccgatgcagccgccgacgcaggccataccttcgataaagtttgcgtcgagcttgcccttgctctttttgagaagagccattcggcaggtctcgattccgtcgcaggaaacggctttaagctcgaaatcttgctcaccgtgctccttgagtccctgtgccacggcgtcggcaaggcctccgcagcgggcgaaaattcttccgaaataggaggcgttgtcaagcacgccctcctcaagggtggttatgtcgatgtccttgctgtcgaaaagcgcctgaagctcctcaaaggtcattgccgcgtcaacatatggcttgacctcgtccttttgaacctcggccttctttgcggtgcagggtccgataaagacgatcttgcagggcgcctcatgctccttaatatacttggagatggtggccatgggagacaagttgtgagaaacaaagggcttaaggtcggggaaggatttttcgatatagcttacaaaggcggggcagcaggagcttgttaagaactgcttttcggcaagctctctcgactcggcgtcggcaaccatgtcggcaccgagagccgcctcgacaacggtgtggaagccgagttccttaagcccggttatgacctgcccaagctttgcataggtaaactgacttgaaattgcgggggcaaccacggcatatactttatactttttgttgttatcgctctttttgattatgtcgataacgtcaagaatataggacttgtcggttatggcgccgaaggggcactgataaacgcaggcgccgcaggatatgcacttgtcgttgtcaatggaggccgccttgttctcgttcatcttaatggccttaattttgcaggcgttttcacagggacggcggcggcttataatggcggtgtaggggcagaccttggaacaggctccgcactccttacattttgacttatcgatatgcgccacatgattgtggtcaaaagaaatggcgccgaaacggcaaacatcctcacatctgtgggcaagacagccgcggcaggtgttggtgacctcgtatccgcccatggggcattcgtcgcaggcggtttcgataacctcgatgacatttcggttgtctatgtctccgcccatggcaagcttgactcgctcgcttaaaatggcgcgttccttataaacgcagcatctcatggtcggggtgtttcccggcacgatgattttgggaatgtcgagcaccttttcaagcagcgtgtcattccacgcaagccgtgcgacctcacggagcaccttatatttaagatgctgtacctttgtatcaaattttctcataaaatcctccctcgccgtctcaaaaacgactgttagaaataacttaccttaattcgcttgcccattttcttaaggcaatccgaaagctcggtcaccaaattcattttaatgttgaaatttatgggcagatcggggttctgatgagcggggttgaccgcccgacccacaaaaaagtttatgtcggtggcttcctcaaaaagcattcgcgcaatgagcgaggcaccgtcccgctgaacgctccattgaccgtatttttcgttgtctccaagagcgtcctcggcatattcgatgaccttatttattgttatgacaccttcggtgacaaggtcaacgccttcaatttcggcaattggcggaacgtcgctgcgctcgaagctcagactcgctttaagcggctttccgagatattttgccgcaatcgaagatgtggtgccgccgcatataatgtgcttgccttccttggagaagaacagagacatcatgcggtcgcagtcgtcgcggtttctcggagggccgaacaaaaggttcatgggctctctttttcttatacgcacaacgcaggccgtggcgtcgtcgccggggtgatagccgtattgcttgtcgcattcgtccacaagcatggtggaaagagtttttgcggtgtatcccacatgggctatggttttcataaattcggcaatgtcctcccttttccagccgaaattataggcaagtcctattccggcatggggacagccgtcgctcatggcgatgaaaatgtcgttttcctgaagctttatgaccgatttatatatctttttcccgtcgatgttaagctcgcttttgggataatcgtaaatttcgcagtcccttatccatatgacaagaggattgtcatactgtataagctcgacggtggaattgtcgatgatatggataattgtgaaggtggaataagccactccccgctcggagcaaatgggaagtgtggccgcaatggtggacacacattcctcgagagcaagcccctcggccatcatagttgagattattttggaggtgagcgtcgacagaatactcgcttttaccccgctccccagcccgtcggcaaggacgataacggtggagttttcgttttgctcgataatgtccacatgatcgccgcaaagctgttcgccctcgtgatttatgcttttccagcctatatccgcgcaaagattattcatcgtttatcgactccttaagcttggttaaggcaatcttggtttcggcggcagtctcgcccagaagagaggcaatgtcctgaacaatacgcatctgtctgtccacaacgcggtcggcgatttccaccgtctggcggcttatgctttccttcttttcacgctgaacctcttcttcggtcacgtcgcgcatgatacatacaagaagccgatattccttatcgtatacaatggtctcttccacatatttttcatattcggcaagataaacccgcttgttgtgcaaatccctgcccgaacttaaaaccttaacaaaatccgccgggtcgagcacgcgcaccacctgatcccccattatatctgaggcatagcgaatgttaagaattttgagagccgccttgtttatctgctgaacctcgagcttttcgttaagcacaatgaggccgttgggagtatttctcgtaatggtgtcggagaaattctcggccttgtccttaagatagggcagacacatggaaatctcggcctttccgtgataaatcgcgacggccttttcgcggcaggtattatatccgcaggagccgcagttaagctcgtcggagggcttggtctttcccatttgaagaagaatttcccttatctcgttttccgacggaggcaaaaggcgtcgctcgataacggtaaaatccttgccgagggagcggcggtcgggctgctcgacctcgaaatcctccttgccggcaaactttgccaccgacacgaagtccttaacgggcgaacggtggaatttttccataacggggccgccgacgcagcttcccgcgcaggccgacatctcaataaagcaatgatgaatttttccgctttcgatgtcctttaaggcggcaatgcagttttcggttccgtcaatggccatataggtgtaatcgggattatccttggtcatggtctttaatattccgccggtggtggggaaaaatctcgcccggctgtgctcgttttggtcgagttcccttttaagctcgatgttttcggccttgagccacgcagtcagctcgtcgaaggtgagcaccgcgtccacaaagccctcataattctgagcctcgtccttttttgcgacgcaggggccgataaagaccgtttttgcgtcgggataacgc

SEQ ID NO: 494 - DNA, 14934 bp, Unknown
  16S sequences of unknown bacteria
caacgcctacgatatcctctgcggagcatccgcgggacagatcgttgaccggagctgcgataccctgggtaaccgggccgtatgcttctgcctttgccagtctctgaacgagcttgtaaccgatgttgcctgcatccaggttcgggaaaatcaggacatttgcatgacctgccacttcgctgcccggagcctttgcctcacctacactcggaacgatcgccgcgtcaagctgcatctcaccatccagcttaaggtccggattctgctctcttgcaatcttcgtagcctctacgactttgtctaccagtgcatgctttgcgcttccctttgtggagtgggaaaggaatgctaccttcggctctgctccaacgagggaacggaaggactcggccgaagatgctgcaatcgctgccagctcttccggattcggatcctgattcagtccgcagtcagcaaacacgaatgtaccattctcgccaaactcacagttcggaacttccatcaggaagaatgcggatacaagctttgtacccggctttgtcttcagaatctgcagacacggtcttaaagtatctgcggtagagtggcatgcacctgaaaccattccgtctgcatcgcccatctttaccatcataacaccatagtaaagatactgattcagaagaatctcttttgcctgctccggagtcataccctttttggatctgagctcaacgagcttgtcaatatatgctgctgtcttgtcagaggtagccggatctactacctggataccggtcaggtcaaggccttctccgtgcttcttcacgtcctcatccgtacctaccagtacaatattcgcgatgccttccttcaggatcttcgcggcagcctcataggttcttctgtcttcgctctccggtaatacaatcgtctttttgtctgcttttgctttctctttcagaacatcaataattgccatgattcatggactcctttcgcttgtattgtaactgcgcccgccatcttttcacgataacagagtgcggctatctttttcagctataccgattataacccaaattcttacaggggacaagatgaaatttgcattgcgaagggcttttttgtctgttaaaatggagtttacagctattgtttcaaaaagaaaacaaaaaggaggagcgatacgcatgcgcagcgtcggaattatcgcagaatacaacccgcttcacaccgggcataaataccatatccagaaagcccgaaggatggcaaatgcagactacaccgttgtcgtgatgagtccggactttgtgcagcgcggaaccccggcgatctttgacaagtatacacgcacccggatggcactgcttgccggcgcagacctcgtactggagttgcctatctgctacgctaccggaagcgcagaatattttgcccgcggtgcgatcgggatgcttgatgcactcggatgcgtcgataccgtgtgtttcggaagcgagacggcagacggcaatcttctctcacagctggctgacatccttgtacttgagccgcccgtgtatcaggacgtgctgcgcagggagcaaaaggcaggaaagacatttccgcaggcacgcgccacggcacttgcggcagtgcttgcagacagggataatgaatttctgcgacagctctccatgccaaacaatattcttgcgctcgaatactgcaaagcgctgcagcagctctcttcttctattttaccgcttccgattctccggcagggcaatgggtatcacgatgaggccctgagcgatacattctgctcggcgaccgcactgcgggaggcattgttacagggacaaggaccggaagaaatacagatgaaacagcgaaacctcacatcactgctttcctacataccggaaacctgccatccactctttctgaaggctgcacgtgcaccggtaaccgcagatgattttctcccgttacttatagataagctgctcacaatctccgacttttccggctattttgatatttccccagagctctcagaccgaatccggaagctgcgcttttcctgcatcgggaaatcctttgctgaaatcactgcacttttaaagacacggcagctgacggaggctcggattcgccgcgcattgctgcatctaacgctggatttgcagcagagctccctgtcctgcttttgggtaaacggcactgtcttctacgcacggttgctcggattcaaaaagaacgccgggccgttgctgcacgccatcaggcattccgcaagcattccattacttgcaaagccttccaatgctgaaactatcctgaaaaatttttattctgaacagccgaatcggctctcctgcgctctggaaatgctacgaatggattttctggcttcccaccggtatgaaggagtttcttcctataaatataatcgggaatttgtgccggaattcaagaagagtcccataatcatagaatgacagcgcagatattctccatccatttcagagccccatcacgctaccagaatcaaaatttctgaggttatcaataaatccccctcaaaaagcaattcacatctcgctttctgagagggattttctcttttaccttatatgacccttgtgcttcctgtcagctttctgccctattcgtgtgcatatccagtttgtttatcagcaatatcttcttgcacaaaccggtgtctgataatacgcattggaaatgataattccgctacgggagtttgctgcatgtacaatctggccgccgccaatgtagatcgctacatggtcgatgcttccggtcgaattatagaacagcaaatcacccggctgcagattgtccaggctaattgatgtgccgccgtaagactgggactctgcagttctggacagatacagcccgaaatttgcaaatacggtctgtacaaatccggaacagtctgccccttctgtaagacttgtcccgccccatacatatgggttgccgacatactgcacggcaaaatccgcgatctgctgaccaacgccagatgtcgaaggcgcctcggtctccggtgcttccgtgtacggcgcttctgtttccggcgcctccgtgtacggtgcctcggtctccggtgcttccgtatatggcgcttctgtttccggcgcctctgtgtacggtgcctccgtctccggtgcttccgtatatggcgcttctgtttccggtgcctccgtgtacggtgcctccgtctccgccggtgcttctgtccatacagtctcatccgttgcaggtgcttcggtccacgtcgtttcatccgaatcatccggataagatgcttcctctgtatcggaagaatcatctaccgtcggctcctcataagtctcctccggcaatgtttctgccgtatcatcggatacctcgtaatcggctgcctccgctgcctcctgctctgcactcagtctggcctgctcctcctcgatcgtctccgcggtcggataataggtcttataatctacataataagcattgacatatccgtaaacatctccacctaatgcgaccttcatccagtccccatcccatgcgacaacctcaagctcgtctttttcatgtgcggtagcgagtacctcgctgtcctcatttgcatcggaacggatattcagatccgtcggatgtaccatcgctacattataggcagctttctgtgcaactgcgtccgcagcctcccctgtcacaaaatattctgccattacatacccttccgcattaccggaacggatcttataccaatcaccgtcctgctcctcaatggttgcagagccattgttgtaaatctttgccgtaacggcgctgtctgtgcttgctgactcccggatattgatgtattcttcacactgcgcaaatgccagtgttccaaccagagaggtatctgtatccgattcagccgctatctccgtcgcagcttcctctgccatcgccggaatgtacagactctgtgccagcaatccgatcatcatgcaaaacgaaaccgcttttgacagccctttcttcatgaactttgcctccttcatatttatgatgttgggggcaataagtcatgctttttcatgcaagcatgagacgcatgacctttcgacccttgcatcatatttcttacaaaagtattgcatatatgctaacaaataataacaaatttcaatttgatggtcaatgcttttcaccgactcttaataatactttcataattttttcataaagttcgtgctttcgaagctgtataaggcagtttcattttgcaaagcgtaatatttagttcttaaagctgtggatcggagccggaatgcgtcctttacgatttacgaacgcatcacaggagaaggaattcaccggcatgatcggtgcatagccaagcagtccgccgaactctactgtctcgccaaccttcttgccaatgaccggaatgacacgaactgccgtcgtcttctggttcaccataccaatcgccatctcatctgcaatgataccggaaatcgtcgtcgccttcgtatcgcccgggattgcgatcatatccaagcctacggagcagacacaggtcatcgcttcgagcttctcgatcgtcagggcgccggcttttaccgcgtcgatcatgccctgatcctcactgaccggaataaacgcgccgcttaatccgccgacataagaagaagccatgacgccgcccttctttacctggtcattcagaagtgccagcgctgcagttgttcccggtgctccggcatattccaggccgatttcacagagaatatctgccacactatctccgatcgccggcgtcggtgcaagagaaagatccacaataccgaacggtacgccaaggcgtctggatgcttcctgtgcaaccagctgcccgacacgggtgactttgaatgcagtctttttaattgtctcacagagcacttcaaagctgctgccacgcacggattccagggcatgttttacaacgcccggcccgctgacgccgacattaataatcgcatctgtctctgtgacaccgtggaacgcacctgccataaacgggttatcatccggcgcattgcagaatacaacaagctttgcacagccaagtgaatcattttccttcgtcagctctgccgcctgcagtatcacatccccaagcagacgaactgcatccatatcgatgccgcatttcgtcgaaccgacattaacggagctgcagacaaaatccgtcgttgcaagtgcttccgggatcgaacggatcagatactcatccgcctttgtcattccctttgatacaagcgcagaatagccgccaaggaaattgacgccgaccttctttgctgcacgatccagcgtctttgcgatcgtcacaaagtcctccgggcatttgcaggcacttccgccaacgagtgcgatcggcgtgacggaaatccgcttatttacaatcggaattccgaactcacgctcaatatcctcgccggttgataccagatccttcgccactgtcgtgatcttcctgtaaatattttcattgagcttttccagatcatccgtgatgcagtcaagcaggctgatgccgagtgtgatcgttcgcacatccagattctcctgcgtaatcatgttgttcgtctcttttacttcgaatatattaatcatgccctcacctcagatccgatgcatcatgttgaaaatgtcttcatgctgacagagaatggaaactccgatctcttttccgactgcttcaagctcatctgcaatctgagctgcggacttttcacatttcgtcgcatcggtcaccatcatcatattaaaatatccctgtacaatcgtctgagaaatatccagaatattgacattgttctctgccagatatgtacataccctcgcgataattcccacggtatcctttcctactacagtaataattgttttcttcatgctgtctccttttctccctgtctcggggtccgcgggatgtcccgctcttcttttgtccgtgtatcacacggctatcaactccgacggctcgtcccgctttgcgatctgaatcggaaaatccgtcgccttgtatggattatctccatccgtgatctctgtgcagaccgtcgccatcgcaagtgcctcataattgttctcccggctcagatgtccgagcataactgccttcatccggtcgtttaatatctcaccgagcagacgcccggcattgtcgttcgaaagatgtccctttcgtcccagaatacgctgcttcagatagtaggggtacgagccgacctgcagcatattgatatcatggttcgactcaatcagtacagcgtccagccccctgaggtgatcgacaatataatcatcataatacccaaggtctgttgccaccgctacagacttttcaccacagctgaaccgatatgccaccggctctgccgcatcgtgagaaacccgaaacggaagcactgcaagctccccgatctcaaaccgaatatccggcgcaacggtgtgaaacagggaactgtccaccttgccaagcatattctgctccagcatcgtttgtatcgttccctgtgtcgaatacaccggtatcccatactttctggccagtacgccaagtccttttatatgatccgaatgctcatgggtaatcagaatcgcatcgagctccttcggatcgcggtcgatcgcatgcaagccttccgtcacacgcttcccgctgatgcctgcgtcaatcagcacattggtatgatctgttcccacaaaaatgcaattcccgctgcttccgctggcaatactacaaaaatccatgttctctcagtcctttgtccatttgttcatatgtattttgcacaatatcactgctgttgtcaatcaccaattgacaggcagcccggaaatcgcattcatttttctgatttgccataatcctgcggcacatttcctccgaatagccgcggctttcctgcaaccgtttgatccgcacagcatcatctgtatggacataccagatctcatcgcaaatctcatcatagtgatcttccaggagaagtgccgcttcgacggtcacgaatggcacacacccccgtttttgttctgcctcgacctccgacttgatccatcgtcggatagatggatgcataattgcattcaaccgcgccattttctgcggatctgtataaacgatcgcgccaagcttcggacggctgatcgtcccatcggcatttaaaaccgtcgttccgaacagttcgacgatcctgcgatagcagctctcatgcggctgttgcagcagatgtccaacctgatcagcctgaatgacacgtgcgccataatgctctttcaagtacatcagtaccgtgctttttccggccccgactccgccggtaattcctagtactttcattcttccctcctctgcatgtggctatttcgcctcataccagtctttgccggagtgcacatccacttccagctttacccgcagatcggcagcatgcatcatctcatcgcgaagcagcttctcgactcttggcagctcttcctttgcggtctcaatgagaagctcatcgtgtacctgtaaaatcaggcgggacttcattcccgctgcccgcaacgcctcatccacacgaatcatcgcaatcttgataatatcagctgcagtaccctgaatcggcgcattcatcgccacgcgctccccgaatgatcgctgcatgaaattcgaagacttcaactccggcaccggacgtctccgtccgaacatcgtcgtgacatagcccttctccttcgcatccgccacggcctgatccaaaaatcgtttgatacccggataggtcttaaagtactgctcgatatactcctgcgcctccttgcgcgtgatactcagatcctggctgagtccaaacgaactgattccatatacaataccaaaattgactgcctttgcgttccgacgaagcagcggtgtcacctcctccggctttacatgaaagacctgcgaggctgtgattgtgtgaatatcctgtgcatcctgatatgcctgaatgagcatctcgtctccggataaatgagccagaacgcgcagctcaatctgcgaataatccgcatccaaaaagacaaaaccctgccttggcacaaaaaccttccgtatcagacggccaagctccatccggatcggaatattctgcaggttcggctcagtgctgcttaaacgccccgtcgccgtgatcgtctgatggaattttccatgaatccttccatcctccgcaatataattcgccagcccatccgcgtaggtcgatttcagctttgtcagctgccggtactccagaatgtgagccacgatcggataatcgaccgccagcttctccagtacatccgctgccgtcgaatagccggtctttgtctttttgccgtgcggcagctgcagcttctcaaataaaatgacaccaagctgtttcggagaattgatattaaatatctctccggcctcttcacagatctgctgctccagctccccgatccggccagacagctgactgccataagatgcgagcgcctcccgctccacaccgatcccggcatcctccatatgacgcagggtaaaaacgagcggcatctccacttcagtaaagagcttcatcatatcttctgcgtacagccgttcctccagcaccgggagtacctgatatgcaatagccgccatccggcagacataccgcaaaaaatcctcccgctgctccacagcagcctgatgcagcggcatcttcccaagcagctctgatttcgacggcaccatccagtccagatagtctcgcgccagatcctccgcctcatagcttccctttaatggattcagcagataagccgcgattgccgcatcaaacaaagtggcatcctgcatggaaagcggcagtcgcatcagctggggcttcagatcaattgtaacagcctgctccatactacggattgtctcagcaagcttcgtcgttaaatatgtctccgtcaaaaagccctcacaggcgagaaaaactgcctcctgctttttctcgctgaccgctgctccgaggagactgccgtcctcaccaaaaatcagctgaaacgccgctcgcctgcccgccaatccggctagtatctcttctgcccgcgaaagatcgctgacccattcatatgtctcctcgctctttttcgtatcttcctgtacggaaaagaaccgtccgagcagatttttaaattccagacggcgacacagctccagcgcctccggtgtatataaattctcaatccgtgcagccgtctcatccagagtatacggtacctgcaaatcaatggtcgccagcgtcttgctcatctgtgccagatcataatgattccgcagagactcccgcgcacgggctggcatgatcgcatctacatgagcataggcctcctcgattgaaccatactgcacgatgatctttgtcgccgtcttctctccgatgcccggcacacccgggatgttgtcgcttgtatcgcccattaatgccttcagatcgatgaactgggtcggtgtcacctgatatttttcctttacctggtcggcataatagtcctcgatttctgtccctgttgcctttgtcttcggaatccggatctggatttttccggtagccagctgcagcagatcccggtcccctgatacaatcgataccgaaagacccgcccgctccatctggcgggagaccgtacctaaaatgtcgtctgcttcatatccctccaaagacatgaccggaatgtgcatcgccccgagcatttccttcatcagcggcacctgttcgcgcaactcctccggcatcggcttacgcgttcccttgtatgcctcgtacattttatgccggaatgtcggcgcatgcaggtcaaaagcaaccgctacgtaatccgcctgttcctcctcgagtaccttaaacataatattaaggaagccatacactgcattggtatgctttccctcgctgttggtcagcatcggaagcccgtaaaatgcacggtttaaaatgctgtgtccatctatcaaaacgatcttttctggcataatatcggatcctttctactacttcatttcctgcttgtgtcattctgcgcaaacaggtattcacagtcctgccctgccgttcatctctttcgcgctactcccctgttttctccggccccgcctgcaaaagcggctccggtcctgcactgatctgctggccatccggttctgtatccggcatctcaaagactgcctcctgatgacgttccacccggatctgcgtatcagcaggcagctcctgatcttctgaaaaaatcccctgtgaccgcattcggagcagtgcgcgctggatcgtcgtatactctgtctgcccctgtttaagctcgtatccggtataagcgcttccaatcaacaaacactctgtcaggacaagtaaaatccccccaaccgctccgagcaccctccggcgccggagtctccgccatgacgcgcggatatcatctgagagcatacgccggaaatcgtagtcatggtgatcgccagaatccaaaagatccaacgcctgatacaccgtatagtacgtatccagctcatccatgcagtcgctgcagtgcgcgatatgatgtaaaaatgcttcgagttctttttctgaaagctctttttttacataagcagtaatcattctgcgcgcctcattacagttcatatgcattccttcctctctctggaattctatccgtctatcataccatgacgcaacgcttctcacaagcacttatccaacaaatcttgtaaaacactccgctacatgatatgataattacaatgcgccgcccgtaaacaggcggcagaatggagattattaatatgaaagaaaagctctacactatcccgctcaatgacgcagtgaatgaaaatgatgaatgcccattctgctttattgagcgcaagctggaacaggacatgatcaactttgtgctcggaagctcctcgtcctatatggagagtgatatccgtgagcagacggacaagatcggcttctgccgcacccatatgaaaaaaatgtttgactacggcaacacgctcggcaactctctgattctgaaaacgcattatcagaagctgcagaaagaatttcaggagcagataaagcactttacgcccggaaaagtctcgctcgcagaccgtctgagaaaacagtcctccggcaacaattccattgccgcctgggcggcccaaaaagattgctcctgctatgtctgcaacggattgcaggaaaatttcgaccgttacatggagacctttttttatatgtacacaaaggattctgccttccatgacaagatcgtaaacggcaagggcttctgtctgcaccacttcggattactctgtgaaaatgcagaccgctatttaaatgaaaaacagaaagcagccttttacccggaggtttttgccctgatggaacagaacctgcatcggcttgaggaagacatctcatggctcatcgacaaattcgactatcggaacaaggatgccgactggaagacatcaaaggatgctctgcagcgcggcatgcagaagctccgcggcggatatccggcagatccggtatttaaggcacagtaaccatctctcttgtaaagcggacattctgtcagaaaagcacgaagctcattttccaatgggctccgtgccaggtgagatcctgattcagttgaaccgcagtcgcagtgtccggatttcaaatggccggatcgtcaatcgtatctcatttccttctaccggaagcggtgtctcctgctcttcgagcatgttacagtcacaggcttctgtaagggcaaagcctgaatctgccaaaaattcatccaccgatactgtaacgtctgcccggcggttgaacgcctcatacagccgaatgataacaccgtctccatcctccgcctgctttacaacctcgataaatacattttccgcatcggtatgcacgaaggaagcatgcgctgtcagctgaccggcggtccgtgtctgacattcctctgttccggcaagcatactgtctgccgcagcctttgcctgtatcgcaagcagcggattattcagcgcataggcacgattgatcgtccctgcctcgcgaaaatcaccggaatgcggatagatcacataggtaaagctgtggtgttctttgtcagctgccggattcggatccgttgcagacttgagcatagaaagaccgatcacgccatcgtgaacactgacaccatatttacagtcatttaaaacgctcacgccatagccgttttctgccacgtcgagccatttatgatggcacacttcaaaccgtgcaaaatcccacgacgtattataatgcgtcttgcgcgtgacatttccatactgaatctcgtatgttgcctcatccttgtgaatatccacagggaagagcgtcttcaggaaaatcttctgctcccgccagtcgatctcgttgcgaatcttcagctccggactgtcggcctccagggagatatactgcgtgatctccgaatccaggtagcgccgcacgacctgaattgtcgcacgcagcggaccatcctcgatcagagaaagatgctgcacatccgtgatctcccatgacttttccacatagtaattattgacatcccatgcgtcataattgtgtggacggtcctcataagtcataagcacattgccgttctttccggccttcaaaagctccctccttgcttttttatcatagatcgaagaaaactgaccattcgggtcaagcgttactttgaggtaatcattttccagatgatgcagtgaagcagctaatgtctcgctttccctgtataccagctcttttgtcttcacatccgtgcgtggcagtactgcatactgttgccagccttttgccggaacggcatttgcccggaagagccatgcaccgtccgctgtcttctgtaccgaataaagatttcccccatctgatacgaccggatcgacatgcgcatcctcccattcaaatggcacaagcccggtctgcgcccatccatttggattaaatacagtaagcgcagccgccccttgccgagtatgctcagcaatcgcgtgcaaagcattggaaagcagcacatgtccttctgtgagcagcttttcatactctgtcttcgagtcctcatacacctcataaatagaagagccaggaaggatgtcgtggaactgattgcgcagggcgatctcccacagtgcgtccagctcctgcttcggataggaaagcccagtcagacggtgtgccagcgttgaaaagcattcgatattttcaagcagaaattctgaccggcgattgtagtttttattacgcgccattgacgtatacgtgccgcgatgatattctagatacagctcgccgacccacaccggcagatatttccggcctctgacctgatcttccaactcatggaaaaagtccgctgccgtgctctgtaccgtctgcggacaacccggaatgccttttgccagacggcgctgattctccagcatctcctttgtaggaccgcctcctccatctccaaatccataggacatgagcacttcgtcatttaaatatttctgactgtaacggtgccacgcgcccttgacctgcgatggattgataaacgcattataggtcgtaaaatgcacggtgtgctcgctgccctgctcggccggtgcctgatagtcacggctcggtgaaaaatgcgtcagaatccgtgtcccgtcaattccctcccattcaaaggtatcgtatggcattttgttaaattcattccagctgatcttcgtcgtcataaaatagcggatgccacattttttcataatctgcggcaaagcagccgagtagccaaacacatccggaagccagagaatctcattgtccgttccgaattcctcccggaaaaagcgcttgccataaaggaattggcgcacaagtgactcgccggaggtcaggttgcagtctgcctcaaggaacatgccgccttctgtttcccagcgcccttctttcacccgctcttttatctcctcatagacctgcggtgcattcttttttacatatttataaagctgtggctggctggacataaacttgtactccggataccggcgcatcagctcaagtaccgtcgaaaagctccggaccgctttatcctccgtcaccgccagcgtccatttccacgccacatcaatgtgcgtatgtccaacgcagtacaccttctgccgcgccactcccgcataccgctcataaaattcctgatccagatagtcctgcgctgcttttaaggacttctcataagcatctgaatatggcttgcgcagatccagaagattcagggattcatttaagttcaaaatgatgtcccgatactcggtatcactctcccgaagcaaacacgcagtgtcatacggcattttcaggtcataatagtacttctccgtctcccggtgcaacaccttgatccgggcatccagcaccagattcatattgtggtcgccggtaaatgctgaaagcatgatgcgataccgttctcctgccttcgcatgctcggtaagcagcacctcccggtggttgatatccaatccctgcttcagcacattattgacataaatcgtaaactgtggatttgtcgcatcccagccgtcctcttttccggtcgtctgttcatagacgacacattgcccatccatctcttccggaatcgtcacaaaggtctcaaaccagtaatacgcccgatgtccgccccaggacatcggataccggtcacagtatgcccagtcatccgtattcacctttgaaacatccggaaacttttccgccgactgcacatagcgaaatccgctcaccggcgtctcatctgtataaatcagcccttccagatcacgtaagagcttgccgatccgttccctcagaaaaatca

SEQ ID NO: 495 - DNA, 5031 bp, Unknown
  16S sequences of unknown bacteria
attggcggagaaggtgggattcgaacccacgtgccctttcagacaaccgcatttcgagtgcggctcgttacgaccacttcgatacttctcctcgcgccttaagagtagaaaaatctctactgccttgctattatacaaggaaacgcggcggatgtcaagcccttctgtccccaaattgggacgcgatacgcaaaaatcgcaggaaattttcccagcattgggacattctgtccccaggaggaatgagcgggcgaacgtgggatacaccaatacagcggcaaagcgcactttccccaaaaagaatttgtgtaagccccttcctttcgccgcgcattcatggtacaatgacagcaggaaatctgcgaaacgcgagcgtggaaaggagaaggaaaacgtggagtggatggcaaagccgccctatctgggcgtggcgtattatccggaagactggcccgaggaacagatggatagcgacattcgccgcatgcgggagattggcgtcaatgtggcgcgcattggcgaattcgcctggcaccgcatggagccccgggatggggaattcgatttttcgtttttccataaagtggtggacaagctgcgcgaggcgggcatcggcgtcattatgggcacgcccacggccacgccgccgcgctggctcagccgcttgtatccggatgtgttcgcggagcgcgagaacggccgccgcagcgagcacggcgggcgcaggcattgctgctcgaacaacccgcattacaacgcctattgcatgcgcatcgcggaggccatggcgcgcgaatttggcgaggatcccgccatcattggctggcaaatcgacaatgaaatctacactggcgacctgggctgcttctgcccggaatgccaggcgaaattccgcgaacgcctgcgcgagaaattcggccatatcgacgcgctcaacgaggcctggaatctcaacctgttcagtcagtggtatgacgactttgccgatattcccgccccgcgcgacgcttggcacaacccgcatctcttgctcgcctggcgcacgttccagaatgattcgcacatcgcctttgtacaccggcaggcggaaattttgcaccgctatgtgcgcgtgcccgtgggcacggataccatgccctttggcgcgatggattaccgccgcatgacggaaaaactagacatcgtgcagttcaaccattataacgaagcgcattcgctgcacgcctgctcgttctggttcgatttcctgcgcacgctgaaagaacatcccttctgggtgacggaaaccgccaccaattggaacggttccgtggcgatcacccagagcgtgaagcccgagggattctgccgcgcgaattcgtggctacccgtggcgctgggcgcggaagcgaacatgtattggttgtggcgcacgcactgggccgggcacgagctgatgcacggcgcggtgctcgatgccagcggccgggatatgcacacggtcggcgaggtggaggaagtcgcgcgcgggttccgcaaggcggcggactttttgaacggcacgcgcgttcaaacggacgtggcgctgcatttcacctccctgagttggaatttgaatgagacgcagccggtggtcagcggcctgaaatacatggaaaccgtgcaggagcgctggtaccgcccggcggtggacatgggcctgcggccggacgtgatcgatgcagccgccccgctggatgcctacaagctgatcgccacgcccatggtgatggcgctggaagaggaaaacctcgccgcgcgcatggcccagtgggtacgagagggcggcgtgtgggtggtgggcccgctcacggacgtacgcaatctggaaggcgcgcggtatcgcgaccgcttctatggcacgttggaggcgctcacggggctgacctggcgctacgccgtgccggacaaagaaggcagcgttgcggcgcagtggagcgacggcgcggcctttgccggggaaacctggtttgagatggtggacgcggaggaaggcgctctggtacgcgtgtgcggcgggcacagcgcgtttgccggcaaggccattgtttcccaaaagcgcgtgggcaagggctgggtgatcctgctgggcaccattccttcctatgaagatgcgcgccgcctgttggcgcacgcctgcgcgctgagcggcgtacggggcgtttccatcgaaggcagcgtgatggtttccccgcgcgtgggcgcggcgggccgcgggctgattctggtggaatacggcgcgaaggaagcggcgtgcgttctacccgaacccatgaccgatgtgctcaccggccgcgcgttttccggccgcgtggcgctgaagccgtatgaggtgctggtgctcagggcataaatgaaatgcccgtttggggcggccgcctttggcaacggccgccctcgttttcgcccgcaatgtgattttgtcacggttcaggccgccctttgtgtggtatagtatgagcgtaaggaaaacatgccacgaaaagcgcgcgagcgcttttaccaagggaggcgggaagcgtgggatttttggataagctgttccgcaaggatagggatatcaacgcgtgggtgcaggatgccgccggtgtggcggggagcgtgttgctcgatgtgcgcacgcgggaggaataccgccaggggcacatccccggcagcgtgaacgtgccgcttagcgagctggcggcggtggatgaaaccatttcggcgaaggatacgccgctttacgtatattgtctcagcggcgggcgcagcgcccgcgccgcggcgcaattgtccggtatgggatatgcttcggtcgtcaatatgggcggcattgccggctggaaaggcaacgttgtggaagggggaacgtaagaatgaaagtggtgatcgtcggcggcgtcgcgggcggcgcatccgccgcggcgcggctgcgcaggctggatgaaacggcgcaaatcgtggtgctggaacgctccgggtatgtgtcgtatgccaattgcggcctgccctattacgtgggcgatgtgattcaggaagcgggcgcgctttcggtgcagacgccgcagagcctggccgcgcgtttcgccctcgacgtgcgcgtacacagcgaagttacggccatcgatccagcgcgcaagaccgtttccgtgcgcgcgctggatagcggcaaaacctatgaggaaagctacgataagctgattctcgcgcccggcgcgcggccggtggtgcccaatttgcctggcgtggaactggagcgggttttcaccctgcgcaccgtggaggacacgctgcgcattcgccagttcgtcgattcgcagtcgccgcaatcggccacggtgatcggcggggggtttatcggcctggaaatggcggagaacctcagggcgcgcggcctccatgtgacgctggtggaaaagatggatcagctcctcggcccgctggacgcggatatggcctccttcgtgcacgcgaaattcctttccgaaggcgtgaaattgctgctgggcagcggcgcggcagggtttgaggaaaaggacggcggcattttcacccgcctggacaacgcgccaggcgtgcaggcggatatggtggtgctggccatcggcgtagcgccggacagccaactggcgcgcgcggcggggctggaactgggcgcgaagggcagcattgccgtgaacgagcgcatgcagacgtcccagatggacatttacgccgtgggcgacgcggtgcagatccgccatctggtgtccggacaggaaacgctggtttcgctggctggcccagccaacaagcagggacgcgtggccgcggacaacatctgtgggctggatagcgtataccgcggcgcgcagggctcttcggtgatcaagctcttcgatatgacggctgccgccacggggctcaacgagcgcgcggcccgcgcggcggggctcgcttatgaaaagatcgtgctttcgcccgccagccacgcttcgtactatcccggcggcaaagtgatgaccatgaaggtgctttacgaaaagggcacgctccggctgctgggcgcgcagatcgtgggcttcgatggcgtagataagcgcatcgacgtgctggccacggccatgcaggcggggatgagcgccgtcgcgctcaaggacctcgatctcgcctacgcgccgcccttttcctcggccaaggatccggtcaacatggcgggctttatggcggagaacatcgaaaaggggctcgtaaagcaatttcactatgaggatgtggccgcgctcccgcgcgatggcagcgttacgctgctggacgcgcgcacgccgcaggaatacgcgaagggcaacgcggaaggctttgtgaacattcccgtggacgaattgcgcgcgcggctgggcgaacttgaggcgggcaagcccgtctacgtgatgtgtcagagcggcctgcgcagctacattgcttgccgcatccttgcgcaaaacggttttgaatgttataatttctctggcggataccggttctaccagagcatccgcgatcaccggtttgtggaaaacgtccgcacgtcctgcgggcaggaatcagagcattaggaggaatgaaagatgtctgtcgtaaccatcaccaaggagaattttcaaaaggaagttgtggagagcgaaaagcgcgtgctgctggatttctgggccagctggtgcggcccctgccgcatgctctcgcccattgtggatgaaattgccgaagagcgcacggatatcaaggtgggcaaggtgaacgtagacgagcagcaggaactcgccgcgaccttcaacgtaatgagcatccccacgctcatcgtgctggataagggccaagtggtcaaccagagcgtgggcgtccgccccaagaagcagatccttaccatgctgtaaggtgcaaaaaggcatcagagccgctatcccgcaaaatggatagcggctctctgatcgttgacaaacctttggtttgtcaacgagcagaccactgacaaagcccgtttcaagaagtggaagacgggctataagcctgagc

SEQ ID NO: 496 - DNA, 5257 bp, Unknown
  16S sequences of unknown bacteria
gcacctgcgtccatgcccggggcacggcctacggcgtggtgcatcagccggtcagagattacccttggacgcactgggccagcccgtgggaggcggagagcgctcccgagccggtggaaccattaggccccatgacggaggccacggtgtacgccgagaacgggctgccggtgaagttgaggaacaagcccagtcagggcgagaacctgtactggaatgtggcggacggggaaaccgtgaccattgaggagccggggaacgagtggtcgctggtcagggcccgatgcactgacggcgtccggcggcggggctggatgatgtcgggatttctggccatgggataatcacaacaacagatcggagctgatgaaaatggattgggtacaaatgattgtaacggtcgtatgctcggtggtggcttcctccggcttctgggcgtttatgcaaaacagggcgagcaaaaaggacgcaaacacgaagctgctgatcgggctggcccacgaccgtatctgctacctgggtgtgaagtacatcgagcgcggctacatcacgcaagatgagtttgaaaacctcaacgactatctgtacgtaccttaccgtgagcgcggaggcaacggaagcgcccagcgcgtcatggaaacggtgaaaaaactgcccttccgggcgtaaaggagtgggaaacatgacttgggaagacatcaagcggaaactgacctcgcggaaattctgggctgctatcgtggaatttgtgtccatgctgctgctggccaacggcatgacggaaaatcaggtgggccagatcacggccatcatcatggcgggcgccggcgtgctggcgtacatcatcgccgaagggctgacggacaaggagagcgtggcaaaaatcgaacctaagaaaccgcctgagaaagcctccgctaccgatcctgccgaggtagcggagggctaacccatggagcacaggcggcaggaatacgagtgcgtgatagatgaatgggtcctgaacgaaagagacaggatcgcgctaaaacgtaagtacctcgacggcatcccctacgaagccattgccgaggaactcgatattagccggaaaactgtgcaaaacatcgtcagacgatggcgaaataccatcgaacggcatttatagaagagctgcctgcgggcggctctttttttgcgccttttttgccgggaatatgccggaaagatgcgccgggctttcctcgaaaaacggggccgttgctggcatgatgagggcaggagggagcggagcatgtaccgggagtataaccgaaacccgcggggaaaacgagtgggcgactgcgtgatacgagccgtcagccgggccacgggaaagacgtgggaggagacctacgcggggatctgcgcagccgggtatgagctttgcgatatgcccagcgccaatcaggtgtggggggcgtacctcagaaggcagggattccggcggcacatgctgccggacacctgcccggactgctacacggtggagacgttctgccgggatcatccgtccggggtgtacgtgctggccatcagcggccacgtggtatgcgcggtggatggagactggtgggacagctgggacagcggacaggaaacgccggtgtactactggcagaaggaggactgagccatgtttggatatgggtatcagcagccgggctttgggggcggctattacggggccgcgccggatcatctggcgcagatgcggatgggccagaatcagcccatgcagatgcagcagcaggggcagcagcagaacggcggcgggctggtatgggtgcagggcgaagccggggccaaaagttacatggttgccaacggttccagcgtcctgctgatggacagcgagcgccagtgcttttatttgaaaagctgcgacgcggcgggaatgccatccatgcgggtctttgactatcaggagcgcaaggctgcgcccatcccggaagaggcggcggcggaatacgtcacccggaaggactttgaagccctgcagaaccgggtggaagaactggtgaagcgcccggcgcgggcgaagaaggaggcggcgacagatgaacccactgtttaagcagctgggcggcatgggggcgcagatgccaggccccatgggacaatttcagagcatggtacagcagttccaaaaattccgccaaagtttcacgggtgatccgaaagcggaggtggaaaagctgctgcgcaccgggcagatgagccagcagcagcttgaccagctgcagcaggcggcgcagatgttccagaacctgctgggcggacaataaggcggtaatcgtggccacgatgaagcatataaaagaagggagaaaagaaacatgatggaaaacggcatgtcccctgccgaccttgcggcggtcacggggaggaataacaacggcgacggcatgttcggcggaaacggcgcatggtggatcatcatcctgttcctgtttgtgttctgcggctggggcggcggctggggcggaaacgctcgcggcggtcagggtacggccatggacggctacgtgctgaccagcgattttgcgaacatcgagcgcaagatcgacagcgtgaacaacgggctgtgcaacggcttttatcagcaggcgcagctgaccaacggcgtgcagatgcagatggccaacggatttgggcaggcggagctttcccgttccaaccagcaggcggcgctgatgcagcagctgaacaacatggccatgcaggcggcggaatgctgctgcaagacccagacggccatccagggcgtgaactacaacatggccaatcaggcctgcgagatccgcaacacgatgcaaaacggaaccagggatatcatcgagaaccagaacgccaatgcgcgggcggtgctggacgcgctgacggcccagcggatcgaggccaaggacgagaagatcgcggcccagaaccagcagatcttcggtttgcagctggcggccagccaggcagcgcagaaccagtatctggtgcagaccctgcggcccggccccatcccggcctacacggtgcccaatccgtactgctgcggcccgcagctctgcaacggctgacaagtgcatgacacagcttcccgccctgacgggatgaccggcaaaggccggtgctgacgatctgcggcgggggaactatccctcgccgcttttgttgaaaggagaatgaatatggcagaatttacgaacgcggccctccaaacggtggccagcgatcagaacgtgatcctgacggaaacgccggtgtgcccctcccggtgcatcgtacaccgggaaggcagcggcgttgtgaccctccggggcctgacgaaccagtgcaaggcgcgattccgcgtgaccttcggcggcaacattgcccttccggcgggcggtacggctgggccgatctccgtcgcgattgccattgccggggaacctctcccggccagcaaggccattgtgacccctgcggcggtggagcagtttttcaacgtctgcgtggatacgtttatcgacgtaccggcaggctgctgcgtgacggtggccgtggagaacaccagcggtgtgagcattgaggtacagaacgcgaacctcatcgtcacccgcgaagcgtaaggaaaggagaagcgaacatgaaagcgctgcataatttgaaggaaatgctctgccgggaactggaagaactggcggagaaggagagcctgtccatgggcgatctggatctggcccacaagctgacggacacgatcaagaacattgacaagatcgtgatgctggaagaagacggcgggtacagccgcgcgggcggctgggaagcccgcgggacctatggccgctacaacgacggtggcaacagctacgttggccggggcgagcactacgtgcagggccactacagccgggacggccagggcggaggctactccgggcgcgacggctacagccggggcggcgaggacatgatggaggagctggaacggctgaagcagcgggcgacccatcagagcgagcgcgaaatgatccagcgcatgatggacgaaatgcgcagccgctgaccccaaaattttgacccccgttttgacccccaaagggtgcagaaacgggggtcaaacgggggaaaacgggagatattgggaaagggaaaatggatagagaaaccccgcaaaccgttgtggtttgcgggttttagtgatgattgaagtcttgatttgaagcataggtggttgtagccggggcaacagtccgaccacgaaaaaatattcgtgatcatcgatgtattccctctccaactgtttcaaaatcggatcgatctcccccactgcggaagaaaagagccgttctatttcctgcttggaaattctctgtgaaaataagccctgtacagactcctcataggagatcccctgcttttcagcgcggtacttcagcccgattcgccgcgtgggatccacacagtcaaacaggccatggtgcgcgccgatagcaaacgcgagcagttcggacgccatgacgccggtacgaacggggtccgtttcctcatgaaactgttccatcagatatcggcagccctgaaagctgtgaatcacctgcccccgcgcactgtggtcgccagcagcaagatacttctggaacgcgggagcggctttgcctgcgtcatggagcagtgcggcaagatacgcagcattttccaggcccaccggccgcaggcattctgccgcccgccgcgccgcaccgcgcaggtgctcccgcaacgtctgccaaacgatttgcctgccctctcgcttatgcgcccaatattccatcatatatcaccagccttcgtttatttgtgaaaaacagccgtatcaaatgttttctgtggaaatagtataacccttgttttcgagaaagtccagcattttcttttctaagtatttattttgtaaacaaatttatatggcggaataaaaaaaatggtaagcatatacttgaccacttgatttttatgccttgtttgatatactagagaagtcttgcattacacaagtggattgaaaataagtatttatcttgtatgcatccgtccgggacgttctcgcggatgcgtatttttttgagtgtttcaaaaaagcgcgcaaaaatgggcattgtatcctcacgtggctataaattgatatgtcgttgcggctcgacagccaaaagaccgcttcaaaagaaggctctataataaaagttggggtaatagccaaaaaggaagacaaatgattcgc

SEQ ID NO: 497 - DNA, 7822 bp, Unknown
  16S sequences of unknown bacteria
ggggggcggatccccgcccgccgttttccgattcaggaggtgtttcgatgcacaagcataagggacgcacccgttttgtactgctctgcgttctgccggcgaccatcctgtttaccatctttatggtggtccccaccttgcaggtcttctggatgtcgatgttcaaatggggcgggtattccgacgaaaagacctttgttgggctgggcaatttccgtacgctgatggaggacggaaaattcctacggtcctttcagaacaccgtcctgctgattgtggtggtgacactggtgacttttgcgctggcactggtgttcgcggggattctgacaagggaaaagctgcgggggcagaactttttccgtgtggttttttacattcccaacattctctcggtcgtggtcatcgccgcgatattcaacgccatctatgaccccaaccagggcctgctcaacagcattatcggcctgttcaccaacgtaaaggacaatcccatcctctggctgggggataagcagctcgtcattttcagcctggccggagcgctggtctggcaggccatcgggtattatatggtgatgtatatggcgagcatggccgcggtgccggaaagcctatatgaaagcgccgggctggaaggggccggccggttccgccagttcttccagatcaccatcccgctcatttggaccaatatccgcaccaccctgacctttttcatcatcagcaacatcaacctgagcttcctcttcgtcaaggccatgaccagcggcaagccggacggggcgtcggaggttttcctgagctatatgtattcgcaggcctacaccaactcgtcctatggatacggcatggccatcggcgtggtggtgttcatcttctcgtttgcgctctctgccattgtcaacggcgtgaccaagcgggaacccctggaatactaaggaggcgccgatatgaaaacaaagcggactcagcggggcggcgacgccctgtacaaagcgtttatctatgtggcgctgatcaccttcgtcatcacgatcctggtgcctgtgagctgggcctttctggcttcggtcaaggaggattcggagttttacggcaacccctgggccctgccgcagggtttccatttccaaaatttcatcgacgccttcaacaaggccaatatgggcgcctatttcttcaactcggttttggtgacggctctggcgctggccctcctgctggtggtggcgcttccggcttcctatgtgctctcccggttcaagttccggggccgccgagtgctgagcgtggcctttatgggcggtctgttcatcaacgtcaactatatcgtggtgccgattttcctcatgctggtggacggcaacaaagggttggcctcgctgatggagtccctccgggtggaggaggggtcgccggtgtacaacctgttcggcaacggttttttcctcaacaaccactttattctggcgctggtctacgcgtccaccgccctgccctttaccatctacctgctctccagctacttccagaccctgcccaaggattttgaggaggccgcctatgtggacggcagcggctatttccacaccatggtgaaggtcattatgccgatggccaagccgagcatcatcaccgtcatcctcttcaatttcctctccttctggaacgaatatatcatcgccatgaccctgacctccggcgatttccagaccctgccggtggggctgatgaacctgatgaaggcgcagaacgcctccgcgcagtatgggcagatgtacgctgggctggtcatcgtcatgctgccgaccctcatcctgtatatcgcggtgcagcgccagctgacccaggggatgaccgtcggcgggatcaagggctgatcgaaaggagtagagccatgaaagcactcaaaacactggttgcgctggcggtactgatagcgtcgctctcgctggtgatcgccgggcagatgcacgacggccccctctggctttgcgccatgctgcttggactggcgggcctcctcgcccttttatggtggtacaaccggggctatacccgtgccgaccggatgcaaaaacgccggcagaaggaaaaggagcgggctgcccatggaaaataaacgcctgagcgggcgggtcaccatccccaccgatgtggatgtggttccccagacccttgaaatcctgcgccgctttggcgctgacgccatccgggactgcgacgggaccgatttcccggccgcgctgcgggaagtggatgcgaaggtgtattccacctactacactacccgtaaggacaacgactgggcgcggaaaaatcccgacgaaatccagcagatgtatatcagtacctcctttcacaccgccgaaggggagagcctgtccatccatctgatggaccatctttaccccgacatgctggcggttaatgaccgggacgacatcgcccgctggtgggaggtcatggaccgcaccaccggcgagccggtgccggtttcccagtggaaatacgatcgtgaggctggggacgtggtgatcgagaccgtaccctatcaccagtattcggtcagcttcctggcctacattctgtgggatccggtccacatgtacaatgccgtgaccaatggctggcagggggtggagcatcaaatcaccttcgatgtccgccagcccaaaacccgggcgttcacgatgaagcggctgcgccggtttatcgaagagcatccgtatgtggacgtgatccggtataccaccttcttccatcagttcaccctgttgttcgatgagctggcccgggaaaagtatgtggactggtatggctattccgccagcgtcagcccatacatcctcgagcagtttgaaaaagaggtgggctatcccttccggccggagtatatcatcgaccaggggtatatgaacaacacctaccgggtgccgtctaaagaattccgggatttccaggcgttccagcgccgcgaggtcgcgggactcgccaaagagatggtggatatcacccatgaatacggcaaagaagccatgatgttcttaggcgaccattggatcggcaccgagcccttcatggaggagttcccttccatcgggctggacgcggtggtgggcagcgtgggcaacggcgcgacgctccgcctgatcagcgacatcccgggggtgaagtataccgaggggcggttcctgccgtatttctttcccgataccttccatgagggcggggatccggtcaaagaggcgaaggtcaactgggtgacggcaagacgcgccatcctgcgcaaacccatcgaccggatcggctacggcgggtatctcaagctggcgctggaatttccggaattcatcgactacatcgagagcgtgtgcgatgagttccgtaccctgtacagccacgtcaagggcgcggttccgtactgtgtcggccgggtggcggtgctcagctcctggggcaacatgcgggcctggggcaaccacatggtccatcacgcgctctatcaaaagcagaattattcctatttcggcgtcatcgaggccctcagcggcgccccctttgacgtccgcttcatcagcttcgatgacatccgggccgatcccgcgatgctggacgggttcgacgcggtcatcaacgctgggggtggggataccgcctggacgggcggggaaaactgggcggacgaggccgtcctcaccgccgtgcggcgctatgcttacaatggcggcggcttcatcggcgtgggggagccttccgggcatcagcgccagggccggtatttccagttggccgatgtgctcggcgttgaaaaggagacggggttcaccctcaatgtggataaatataactgggaggaacagccgcatttcatcatgcaggatgtacagggcgccatcgatttcggagaggggcagaagggcgtttacgccctgcccgatacggcggtaatcgtccaacgggaccgggaggtccagctcgcggcgaatgcctgcggccgcggccggggcgtctatatcagcggcttgccctacagctttgaaaacacccgcctgctttaccgcgcgatcctgtgggcggcgcatcgggaggaagagctccgccgctggttcagcgccaatgtgaacgtggaggtccacgcctacggcgagccgggcggaggtcccgaggtacggcggtactgtgtggtcaacaacacctatgagccccaggataccaccgtgtaccgcggcgacggcagcgctttcggcctgcggctggatgccaacgagatccgttggttcgatgtatagaggaaccctactttctttggacggggacaccggaccgtgcggttcggtgtccccgtcagtatctacccttgtttgctgacgaggtttgtttccgaggcgcaatccccgaaaacacggagcgcagacccgccacggctttcttcacagctggggcctccttttcccctttaccgacagcctgggccggacgcgggctggcgtccggatttttccccgtccggtccccattttgagagctttttcatgagtctggcttttcaaaaccaggcgggttgtgtataatggtgccatgggatcgtaccccagcgggtatcgggagccctggggtgcgtgtgctgtacgggatgaaaaacggtaaggcggggatgatgttgacaattcgggactatcgggcggaggatctggccgacgcggcggccatctggaatgccattgtggaacagggggacagcttcccgggcgatgcggttttgccgccggaggaagcggaccgcttcttccgttcccagaccaggacggcgatggcgctggacggcggcgaacgggtgggtctctatgtcctccatccgaacaacatcggccggtgttcgcatatcgccaacgcctcctatggggtgaaggcggggctcagaggccggggcattggacgggccctggtgctcgattccctcgagagcgcccgggcgctcggctttcgcggcctccaattcaatgctgtcgtcgcggagaacgcggcggcgatcgccctgtacgaacaactgggattcgtgcggctcggcaccgtccccggaggatatcgccgggcggacgggcggtatgtggatacctatgtatatttccacgatctccgcggataaagggatccgttgcccggtctcaaaacgccgccgttttgtgccgctccggcaaaggccggcggacggtatccgcatccagccggaaatctgaaaaacgggagcagcgccgctcgaacggcgctgctcctttcctgttcttcggcaaacgggcataaacccctatggatttgccctcaagtgtgatatactaacagcagcgtccaatagacgggaggacactttatggaagaacaggacagactcaagcccatgaccgagaccgccattctggccgcggtggacacgggggaatacgatgcggacagttccctgaatgaactggaggaactggcccgcacggccggggccgaggtcatcggccgtctggtgcaaaagcgggagagtccggacaccgccacctgtatcggggcgggccgtctggaggagttcgccgggctggccgccaatacggcatgcgatctcgtcatttttgaccgggagctcaccgcgacccagcagcgcaatctggaggacgctctgccctgccgggtggtcgaccgtaccctcctgatcctggatatcttcgccggccgtgcccgatcgtcggagggccgcctgcaggtcgagctggctcagctgcaatacctcctccccaggctggcgggccaggggacggccctgtcccggctgggcggcggcatcggtaccagaggcccgggcgaaaccaagctcgaaagcgaccggcgtcatatccgccgccggatcaaaaacctgaagcttcaactggcggaggtgcagcggcagcgggaaacccgccgtgcccgccgccagaagatcggcctgcccacggtggccctcgttgggtacaccaacgccggcaaatccaccctgctcaacgcgctgaccgacgcgggggtgctggcggaggataagctcttcgccacgctggacccgaccgccagggcactccgcctgccggacgggcggcaggtgctgcttatcgacacggtcggcttggtccgtcggctgccccaccatttggtggacgcgttccgctccaccctggaagaagccgcgagggccgatgtgctgctgaatctctgcgacgcatccagccccgaggcggcggagcatctgcgcgtgacgcgggagctgctggcctccctcggctgtatcgaccgcccaatcctgacggtgtttaataaatgtgaccgtctgccgggatcggaaatcctgctgccgggggaggaccggcagtccctgcgcatcagcgccaggacgggtgaggggctgcccgccctgctcgaggccgtggcggcagcccttccccctgatcggagaacggtgcgcctgctcctccctttccgggaaggggcgctcgcagagcggtgccgcagggaaggcgcggtggaaaccgaggaataccggccggagggggtcttgatgacagtcacccttggagcccggctcttcgacgccgtcaaggactacgagatacccgccggcgacagcgtcccatgagggccggatctcctccgggcacggatagatccggacggcccggcatacaataaaaggacggccaatccggaaaaaagagggggattccagtgaacacgaatccatatcgcgtgacgaaaaagggcgggttttccatcgccgccttcgacacctgccaggacggcggactgagcaaagacaaggggctggccctgctcgagaaaaacgtcaagaaaatggcggaattgcaggaccgcttttatgcccaggaccgggacgccctgctgctgatcttccaggcgatggattcggccgggaaggacggcgcggtcaagcatgtgatgagcggcctcaatccccaaggggtgcaggtgtacagcttcaaacagccttccgcggaggagctcgaccacgattatctgtggcgcatccaccgccgcctgcccgagcggggaaatatcggcattttcaatcgttcgtattatgaggaggtgctggtggccaaggtgcataacctcccctatacacaaaagctgcccgcccgctgcctggacggccgcctgtgggagagacggtaccgccagatccgggatttcgaagcctatctcaccgaaaacggggttacggtggtgaagttctttctcgacatttccaaagacgagcagcggcgccgcttcctttcccgtatcgatacgccggcgaaaaactggaagttttccgccgcggatgtcgcagaacggggatattgggacgcctatatggacgcgtatgagcaggcgatcaatcagaccgcctccaaagcggccccttggtacgtcattccggcggataaaaaatggtttgcccgcctgctcgtctctgaagtggtcgtggaaacccttgagcgtctcgatccgcagtatccggaggtcggcgacgcgcagaagcgggcgctcgaaacctgccgtgaacagcttttggaagagaaagagccctgaactggatggcggccggctccggttatgtgccccccttttaaaggaaccggaacaagaagcagagaggcggcgtccggaggtagaagagtgcgggaaaacgcgggagcgttttcagagggggcgcagggaaggaaccggaacaagaagcggagaggcggcgtccggaggtagaagagtgcgggaaaacgcgggagcgttttcagagggggcgcag

SEQ ID NO: 498 - DNA, 9970 bp, Unknown
  16S sequences of unknown bacteria
cagcgcaggcacccgaagacgatgtcgctgccgagcccgagcccgttgtggagcccgaatccgagcccgatgccgaggaggctcccgagcccgaggaagagccgcaggaaaaagagacgttccgtcagaaaatgcgccgttggttctcgtaggagagtgcatatatgttcgacaacctatctgataagctccaaaacgttttctccggatttcgctcgaagggcaagctgaccgaagaagatatcgacgccggcatcaaggaaatccggatggcgctgctcgaggcagacgtcaacttcaaggtcgtcaagaagttctgccgccaggtcaaagagcgttgcatgaccgcagacgtcatggattcgctcacgcccgggcaaaacgtcgtgaagattgtcctcgaggagatgcaggcactgctgggcggcgagacgaccgagctgcacttgggcagcaggattccgagcgtcatcatgctcgtcggtctgcagggctcgggcaagacgaccgccgcgtcaaaactcgcctaccgcctcaagaagaaaggacacgttccgctgctcgccgcatgcgacgtgtaccgcccggctgctgccgaccagctgcagacgcttggcgacgagcaaggcgtccgcgtgttccgcggcgacggcaagcatcccgtcgagatcgcgaagggcgcggtccaagacgctatcgacaacatgcgcgacgtcgtgatcgtcgatacggcgggccgcctgcacgtcgaccaggacatgatggacgaggcggtcgcgatccgcgatgccgtcaaacccgatcagatcttcatggtcgtcgatgccatgaccggccaagacgtcgtcaacgtcgtctccgagtttgcgcgccaggtcgatttcgacggcgtcatcatgaccaagatggacggcgacgcccgtggcggcggcgcgctgtccatccgcgaggttaccggtaagcccatcgtgttcatcagcgcgggcgagaaggccgacacgctcgaggtcttccaccccgaccgcatggcaaagcgcatcctcggcatgggcgacgtcgtctcggtcatcgagcgcgccatcgaggtgcaggacaaggaaatcgagaaggctgaggcggagcgactcgcacgcgcccagttcgacttcaacgacttcctcgacatcatcaagcagacacgcaagatgggtggcctcggctcgctcgtctcggcgctgcccggaggcaacaaggccttggccgacggcaatgtcgacgaaggggagctcgaccgcatcgaggcgatcatcaactcgatgacgcccgaggagcgctccaagccgaatatgctcaacggatcgcgccgcgcgcgcatcgcccgcggcagcggtatgtcggtcacgcaggtcaaccagcttatcaaacgcttcaacgagacgcgcaagcaggtcaagaaggtcatgaccgcgttcaacgcccagagcaaggggaagaagggcaagcgccgtcgcaagatgcgcatccccgggatgggcaatatcgatttctccaagttcgaagatatgaagtagcgaggcaagagaatgcagacaactgatacggtactgatgtcacatggcagcggcggcacgatgatgcgcgacatcatcgaagggcttttcttcgacgcgtatgcgggcgagacgctcaagcgcgcggatgacgcggcatcgctggacatcccgacgaatcgcatcgccttctcgactgacacgttcgtcgttacaccgcatttcttccccggcggcgacatcgggcatctggcggtgtgcgggacggttaacgacgtcgccacgagcggcgccgtccccaagtacctctcgtgcggcttcgtgctcgaggagggctatccgatcgagaacctgaggagaatctgcgcgtccatggcaaagacggccaaggaggcgggggtcgaaatcgtcactggagacaccaaggtggtcaatcgcggccacggcgacggcgtctacatcaacacggcgggcgtcggcgtgctgcgcgacggtatcgacctgtctgccgtcaacatcaagcccggcgataaggtgctggtcagcggcacgattggcgatcatgggattgcgattatctcgacgcgcgaggagctgagcttctccacgaccgttcaaagcgacgccgcgccgctcaaccatctcatcgccgaggttctcgatgcctgccctgaaggcacggtacgtgcgtttcgcgacccgacccgcgggggcgtggcgtctacgctcaacgagttcgccgaggtgtccgggtgcagcatccgcatcgaagaggacgccgcgccggtgcacgatcaggtccgcggcgcatgcgagatgctcggctacgacgtgttccaggtggcaaacgagggcaagatgatctgcgtggtcgacccgagcgctgcagatgcggcgctttcggcgatgcgcggtaacaagtatggtgctgatgccgcgataatcggcgaagtcatcgaaggcgatgggcatgtctacctgcgcacgggctttggcagcgagcgcatcctcgacatgctcgtgggagagcagcttccgcgaatctgctagttgttggcattccacgcatcgagaatcttctggagggcgcctgcgagcgccctcctctcgtctgcgtcgaggggcgcgaaaacctccgccgcgactgccttgtcgacggagaggattttctgcgcctggtccgagcctgtctcggtgagacggacgatggcggcgcgtttgtccttgtctgacttctcgcggacgatcatgccgcgggactcgagcttgccgagcgcctcggagagcgtggcgggggcgatgccgagcagctcgagcagcgtttgctgggggagcgcgccgttgttttcgaagagattcgtgagaacgcggcgttgccccggcgcgaccttgagttcgggttctccgtggccatgacggagaagatgcgatacgcgcatcagtctgtggtgaagctggatgttgctgattggtggcacggcggactcgcgtttctctcttgtgggggccttcttctacgctaactatatcgttgggagaataaactgtacaagggcgcatattggtctccagaaaagaattgttcaaaaagggtttgtctcgtgcgaagttttactctataattccgccttgcgtctgctaggttggacgtacctgaaaaggctatggtgggtgtcgcccagttggctagggcgccagattgtggctctggaggtcgagggttcgagtcccttcacccaccccagttttttctggacacggaagcgaaaacgtgtataatctctatttgctgcttggaccgttagctcagctggcagagcaggggactcttaatcccaaggtccggggttcgaacccccgacggtccaccagataaacttgaaagctcccgcaagggagcttttttcatgcttggagctgggtgtcgaaaactcgccgcgtgccaggaatccctggcagtgccaacgatgggtggcgagaacccgccaggcgccagtaatccctggcactgccaatcctgagcggtgaaagcccttcccacgccaacaattcctggcagtgccaatcctgggtggcttttgccaagaatccctggcagtgccaacgatgaatggccagaacccgccaagcgccaataatctctggcactgccaacgatgagtggcaaaaagctccgcgacgccaataattcctggcagtgccagatctagatggctattgccagtaattcctggcactgccaatcctgagtggcgagaacccgtcgcgcgtcaagaattcctggcactgccaatcctaagtggcgtcggagcgtatcggggaaggctgaacgcatctatttccgcagctcggcccctcgtgttccgcgcttctcatgaagaagtcgcatcgagctcgtgtttatctcgtatctagctcggatgcgggtcagagacgtggcgagcaattgctgctataaccagcccatgacgattctcgttgacgacatatcggcacttgagtactacctgcatcatccggtcacaccggtgatgctcgacagggcgcagcttgtcgtccaaaggggaatgtctccggcatcaagaccggagctcgaggcctttctgcagcgttctctggacatcgattgtgagacgctccatctcgcaacgcttgatgcgagcagccgaccgcttaagcacaggttccgctatcggacaatctcgcgatctgcgctagccaacagcgctgcattgccaacagatgatgcgctgcttgtttctccggaggccgcgctcgtgtcggttgcgacgaaatgcgatttcgtgtcccttgtcgagttgggttcgttgctctgctcgtgtttctatctatgcgaagatagagaattcggcattgcgcagcgtcaagtgcctcttgcatccccgaagagtatctcggcgtttatctccaagaatccaaacttgccgggagcggttctgaccaagcgctgccttggacaaatagctgccaatgcagagtccccgatggaagtgaaagtagcgatgctcatgtgcctgccgcgtcggtatggcggaggagcgcttccgcttcctgagctcggcttttccgtgaatatccccgattgctatagaaagacctcgagcataaacacgttccgttacgattattactggccgggaagcaatctcgaggtcgagtacgacagcgatgcagtgcatgccgcatcggagaagctgttccgcgatgcgaggcggcgcaacatcatccaggcgcttggagtgacaagcctttcgctgacgcgtggacaggtgatgcacggagctgcgttcgaggaattcattcgggagctctattcggtgcagaacattcgatatcggattcccacagcacaacatcatgttgcccaacgggagcttcgtgcgcggctgttcgatgccggccggagaaaagaggtcttgcgcgagctgcaccgttgagagggtggggcaggggtctgccgatgatgggtgcggcaggaagcgcgggtttgcgagatgcggcgccactgaacactggcactgccaggctcttctggcggggagcgcccatgcgccactcaacattggcactgccaggtttatctggcaggagccacccagctctggcactgccagaaaaaactggcaagaatcacccgtacgccactcagctctggcactgccagggaatcctggctccctggctcccgtacgtcctcgcgtcccccacgtcgcattctgcaaactgcaacgccgcttgcgccaactgcaacgagaaccctatcgcgatgccagtacagtgaacccataagagatacgaacccaaccgaaaggaacatccccatgttcaccgaactctgcatcgcgttttacaccgtcatgaccctcggcattgcctctgccttcctcttcacccatgctcagcaggcaaagtaagccctctctcatcccctgataatctcttcctttctcataccccccctcctgcgaaggccccggtttcggggccttcgcgcgtcttgcagcaaaagcgtgctagcctagaagctcaactcgattggaggcgcctgcatggcattgcaacataagaagcgaaccatcatcctcggcgtgatcgcaacggtcgtcgttgcgctggtcatcgccgtcgctgtctatctcaacacctcctatcctgcggggcaggcggcaagggagtccctgcagtccgacgctgcggtatcggttaggacatgcgacgacggtgacgtcgtcttcgagccggtcaatcgccaggcggcaaatggcgcgggactcgtcttctatcctggcgcaaaggtcgactacaccgcatacgcaccgctcatgcgcgctttctctgagcgcgggtttacctgcgtgctcgtcaagatgccgttcaacctggcgtttttcgatatcgacgtagcggatggtgcaagggaggccgctccggacgtgacgcgctggtaccttggcgggcattcgctcgggggagccatggcggccaagtacctcgctggccatgcggacgagtacacagggctgctgctgtgcgcctcctacgccaccgaagacctctccgccgacgatcttgcagttctgagtgcatatggcacgcaagacggggtcttgaaccgcgatagctaccagagcaactggaagaatcttccgccaagcgcgcaggagctcgtcatcgacgggggcaatcatgcgcagttcggcgactacggtgcccaagacggcgatggcgaggcgagcatcgcgccggccgagcagattgccgagacggcagatgcgtttgcgcagctcgatgggcatgtttcgcaacagcatcaaaatggcaactagacgtcggctctagcttcgcgcgagtacaatagaggtatcagaacacgaggctttctcgactggagaggaatggtggtaaccatggcagacgataagcagaggacctggtcgttcttgcgcgacatgtgcgcggtgcctcccgaggtggaggaaatcctgctcgacgacgaagaggtcaaggccagctacgagggcgactacttcgacgacttcaacaagagcgtgcgcacaccggccaagtacgtcttcaccaactaccgcttcatcctggtcaggtactaccacttcgacttcaccgacgatcaagtgcgcatccagtcgctcccgtggcgcatcgcagacagctggcacacggacattacgagcgagttcaacgcagaacgcgccaaggcctatcaggaaggcaacgccgccgagtgggcgaaccttggctgggaggccaccgtcaccgtgcgcacgcgcgtgggcgaggactggaagttccgcatcgccgatcacctgatcgacgacgagcgagggctcgcggacttcgatcacatgctggcagactgcgcactgtaagaggcggccacctcgcaagtaacgcgaccgtagacaaccgcccccgcagacaggcacctgtgtctgcttgcgggggcagctacatgcttggtgcgccctgctcgacgtatctgcaccttagaggtagcgccaggcggcgttcatccaccagtcgtacatcttcgcccacgcttcgtgttcggtgacctgcggataggtcctgagcgctcgcttgagcgtcgggttctgctcgaaccacgtgttgacgaaccagcccggcccgaccatgcccatgatgggcgctttggcttggggcgcatgcagctcggcggtccacagcgtcgcgggcacggggttgccgtgctcgtcttgctcggcatgggggtagtcgttcgcgaacaagtcgatccacacgctgtcggcaacgcggaagcgcttgaggccgtagccatgcatgggcttgagctcgccatcgtcgatgacggtgtagtcgatgctcccgtccccgacggcgtcccaacttgcggcaggcgccagcggcttgaacacgaagggttccttgcgctttttcgtgttgatgcagggcgtcttgcacgcacggctcacgtacgcgcccgggttgacggcaatcatgacttcgccgatgagttgccccagctccgcggcgagcttctcgtcgtagcacgagagcggcgggtaatggtagtcgggcgtctcggtgaggaagaagccgtcgtcgagtccgcgcccacgtaggcagtcctgcaacgcgacctccgcggcgagcatggcatcgaggtcggatgcgtattttccatcggggctcgcgccctcatcgggggcaggccccgcctcgagcacgttgcgtacacgcgtcgtcagttcctgctgcagtaccttgtcgtcgaacatgctgctcctcactgcggatcggttggattgctcaataatagtcgagcggtgcacagtgcgctctagtaaaatgttgacacggtaagtctctctgagaagaggtgcacaatgggaatgaaatccgatgaagcacttgatctgcagtacgacgatctgaccgactacctgggcgcgaagcattccgcatatatggaatatgccggccagacctattacctcaccgacgtcaacgaacaatggtggcgcgcccaagacaccgcgcaactcaacgaaaagggacactatatcgacgcgagcgagctcgtctcgactgcctccgaattcgtcgagctgccgttcctggaaggcaagtccattaaggacgtcttcgccgatgcgaccttcttcgcctcggtaaaggcataagcctcgccttttcgactcttcacaactttatagcaccgttttgcgccctgcatcaggatttgctgaggtttgcgcgcaaaaccgcaggtcaacgagctgtcataccagcaaaatggcatttgtcaacttgtgtagttcttctgcgcatgccgtgtagggcatgttggcagaccgtggaagaaatgtcgcatatcctcgcgccgcgggtctggccgctagaatcctcgccaatgcgttagcactatcgcgcttttaacgaattacaaacccacgacgcaggagatggttctacatcaaggtttcagtgacgcgctccgttgggcgcaccttcgcaactgccgggctggctttggcattggcgggttcgtgcatccccgtgcacaccgcgctggcccagcccctcgacgacacgacggcatcgcaggggctcgagcaggttatttccggcgcagccgagagcacgcaatcggcagggaaggccgcttccctcgtcgtcgcagcggcacaggcagctcagcccaccactggcgagcgtgccgtaaaaatcgccgagggctacatcggcactccttatgtgtacggtggcgcgacgcccgcggggtttgattgctccggcttcaccatgtactgctattcgcagctcggcgtctctttgacccacaacgcgcaggcgcagtacaacgcctcctcaaaggtctcgacggcagatctgcagcccggtgacctcgtgttcttcgggtcgagctcgtcgtctatctaccacgttggcatgtacgtgggcaacggccagtacatccactcgccgcagacgggcgagtcggtcaagatcgtgagcctgtcgagcgcccacaactatgtcggcggaggaagggtcgcctagttttcgggcgcatgcccttcgagccagttgatgatatccatgctctcgtatagcgggtccccgtcgatgaacaggcaggggacctgctgctttccgcccacctcgaccaagcgccggcggttctcgtcggattcgatgatgtccttgtactcgacgtcggtgcgtcccgactgctcgatgtacgacatgacacgacggcagtacgggcacgtgtccttcttgtagagttcgagtttcatggggtacctcctaggttgggaacggttgtgccgcacgtggcggcacgaccttagaacatcatgaacactttggcgagcgcccaaccgataaagccgcagcacgggaacgtcagcacccaggcgagcaccatgtccttggccacggaccacttgaccttatgcgggttcttggaagcgccgacgcccatgatggcggcggtcgagcagtggctcgtcgagacgggcatgcccgtgagcgacgagacgagcagcgtgatgacagtggtgagcgacgcggccacgccctggtacttctcgagcttgaccatgtccatggcgacggacttgatgatgcgcttgccgccgatgagcgtgccaaacgagatggcgagcgagcacaagatcatgagccacagcgggaaatcggtgtcaccgctcgtttccatgccaaacgagagcgcgatgccgagcagcgcgatggacatgaacttctggccgtcctgcgagccgtgcagaaacgacagcatggcggcgcagacgtcctggacgacgacgaagagctggttggccttgtggcgggggaccgcgcggaagacgaactcgacgagcttgaccatgagccatccgatgatgaagccc

SEQ ID NO: 499 - DNA, 16567 bp, Unknown
  16S sequences of unknown bacteria
tccacacttgactatcgtcgtcctccacacgggggacgtggattgaaatgcttgccctggtcgatgatgacctccttggcgaggtcgtcctccacacgggggacgtggattgaaataaaaaattaaatctgttccgccggaaaacgcgctgtcgtcctccacacgggggacgtggattgaaatgcgaacgcccgttgagaaccaacggcgcgacagggtcgtcctccacacgggggacgtggattgaaatttccgtgtccgtcaccttttccgacgaggggacggtcgtcctccacacgggggacgtggattgaaatgtcgagggtgaggttttctccgccgagaactgagtcgtcctccacacgggggacgtggattgaaatcagatgtagtatgtttttttcatgatgttctcctgtcgtcctccacacgggggacgtggattgaaattttttataattgtagaatgacgctgacctatacgcgtcgtcctccacacgggggacgtggattgaaatgagatatttttcaaaaatcattttcaccccgtcaggtcgtcctccacacgggggacgtggattgaaattatgccgtaaagtgagctttcttcgacaaccgccgtcgtcctccacacgggggacgtggattgaaattttttgcgcccggggcaggagtagtaattgtatcgtcgtcctccacacgggggacgtggattgaaatctccccgatgaggtttgatttgatttcttcgtaagtcgtcctccacacgggggacgtggattgaaatctcggagacttatgaggaagagacttgggactccagtcgtcctccacacgggggacgtggattgaaatcgacggcgacgacaatcaacgctcccgtgtacgtcgtcgtcctccacacgggggacgtggattgaaatgcaatctcgacggatgagtccatatcgtggagcggtcgtcctccacacgggggacgtggattgaaatgccgacgttcccgcgtccacccaagatagagcgacgtcgtcctccacacgggggacgtggattgaaataaggattcttccgttgatggcaaaatccattgcatgtcgtcctccacacgggggacgtggattgaaatatcttcgagagtttttttgacgaacatctcacctgtcgtcctccacacgggggacgtggattgaaatccgaaaaagaactttggaagtattcttcgttttggtcgtcctccacacgggggacgtggattgaaatggtttcaacgagattccacggggcgaacagctcagtcgtcctccacacgggggacgtggattgaaatcacgtcagtctcaaaagcaccatggagcgcattcgtcgtcctccacacgggggacgtggattgaaatttcttcctgctttctttaaatttgcggtaagcgcgtcgtcctccacacgggggacgtggattgaaattgcattagtattgcaaaacaaacactgtatttggtcgtcctccacacgggggacgtggattgaaataaactatacgtcgagggcgagaaggaatttaaaagtcgtcctccacacgggggacgtggattgaaatgggatagtctactatctccggcttgccgaacgatgtcgtcctccacacgggggacgtggattgaaatatcgaccattatcgaaaactttcatgggggccgttgtcgtcctccacacgggggacgtggattgaaatgtgtttaacgatattagtagtgttttccatttggtcgtcctccacacgggggacgtggattgaaatccatttgttacctctttcgttttttaatttttaagtcgtcctccacacgggggacgtggattgaaatatcaggataaactgattgaggaggctatagggcttgtcgtcctccacacgggggacgtggattgaaataacggtagacgataccataatgcgtacaacagcggtcgtcctccacacgggggacgtggattgaaatcggcaaaggcaaaggtaaagccgatagatattatcgtcgtcctccacacgggggacgtggattgaaataaatgtaaagaaagtccgcttgagattacatatagtcgtcctccacacgggggacgtggattgaaatccgccgtttgtgggcggattatagagaggatgaggtcgtcctccacacgggggacgtggattgaaatgctaaagaaaacccccggtcatccgtattacgacggtcgtcctccacacgggggacgtggattgaaatagacgatacctgattaaagaaaggaaatataaagtcgtcctccacacgggggacgtggattgaaattcggagagttttgccgtgcgcaaaaatgtctccgtcgtcctccacacgggggacgtggattgaaatataaagattatttgggctactcgctcatgggctttgtcgtcctccacacgggggacgtggattgaaattgacggcggacattatgaccacagcacaggtgatgtcgtcctccacacgggggacgtggattgaaattttgcggtttacttggagaaattgtagagccacgcgtcgtcctccacacgggggacgtggattgaaataacgtgcgccagccaaacggcgaggttactttaagtcgtcatctacccaggggacgtggattgaaatgacggagatgtatcaggatttatagaccactataattcgttctacacatgtgaaaattggattgaaatatctgcggtttttgtatgtatttctttcgtgttgtcatccccaccccaagttgaatcagattcaatttctcttatcaatgctaaccctcgttcggcagcatcttccacaaatccaccacacaacattcgtgcaaaatcaacattgcaatccgcaaaattatctgctaaaatcaaatccaataaactgccacccaaaacgccaaagagaaagaaatcacatgaatactcgcatcatcacccccgaactaaaactaatcccatattaccccaatccggatgtcgcgctggcgtggtatcaggatccggacgtttgcaagcaggtcgacaatatcgacttcacctacacgctcggcagacttaacgcaatgtataattacctcagcacacacggcgattgctattatatcgaataccgcggcgtgcttgtcggggacgtgtcgctgagagataactgcgaggtcgccattgttgtctcaaaggaataccagaaccgccacatcggacgacagtgcatagcagatatgctgtgccttgcccgagaaaagggaatgcagtccgtcaaagctaacatctactccttcaacacgcagagccaagccatgtttttgagcctcggctttaagaaaatttccgacgaatggtacgaatataatttataaatacagctccgcttacttgacgcacacatcaggtaacggagcttttttgcgctgtttgtgttgacatcggctgtaccccatgatataattcttataatactatgcttgacaactcacgcaatattgtcaaaaatgcttgaaatttacatcatatcaaaaggagaaaagccatgtacaagagctacgagaacgacaaaattctggtgaaaactcatccttctccgcgtcagcttgcggttgaagagatggagttttacgctttcgcacatttcaccgtcaataccttcaccgataaggagtggggagacggtactgagccggaatcggtgttcgacccgagcgagcttgacgcaaatcaatgggttgacgcgctcaaagccgccggggtaaagggactaatcctgacatgcaagcaccacgacggtttctgcctgtggaattccgcttatacggagcattctgtgaaaaacagtccgttccgcggtggaaaaggggacgttgtgcgtgaggtttcggacgcttgccataagggaggaatcaaattcggcgtctacctctcaccttgggacagaaattcgcacctctacggacagggcaagccttatgacgactacttctgcaatcagctgacggagctttgctcaaactacggcgagctttttaccgtgtggtttgacggagcgtgcggtgaaggtcccaatggcaagaaacaggtatatgactgggagagatactacgcgctgatacgaaagctgcaaccgaacgctgccatctcgataagcgggcctgacattcgttggtgcggaaacgaggcgggagacacaagaccgagcgaatggtcagtcctgcctaccggattctactcccccgaagaggttgccgcgagaagccagcagagcgatacaaaggaattccgcgagaagaagatcggcgaaatggaaaaagacctcggaagccgcgaatttcttgaaggtgcgaagggttacaaatggagccccgcagagaccgacacttccataagaccaggttggttctatcatgcgtcggaggacgacaaggtgcgctcacccgaaactctcatcgacatatggtatcgcacagtcggcggaaactcaacgctccttctcaatatcccgccggacagacgaggacttttccacgagaatgacgtaaagaatctccgcgaaatgggagactacatacgccgtacctttgccgtgaatcttgcggaaaacgccgagataaccgccgaccgcgacaacggctacgacctgcccgagaacgtcaagaccgacagctatgacacatactataagccgtttgacggagaaaacgcggttacactgaacataaagctcgccgagccgcacgacgtaactcatgtggtgattaaagagaacatcaaaatgagccagcgcatcgaagagtacgttatcgaagcaaaatcaggcgaaaactgggtccaagtaaactgcggaactaccgtaggatacaagaaaatcgcgcatttcgacgccgtcacgaccgatgagatacgcataaaaatcctcgattcgcgcgtttgccccgtgatttcgttcgtcggtatttattgatatatgagcgacatcagggaaaatcctccgatatactattctcaggtgaacaaaaccgccgaaaagttcatggaaacctgttactcaccgagcgacatgagcaattccgaaatcggaaaatacagcgcggtagtgaacggcaggcggcaggatgagccattcggagtgataatcgacgccgacggagacgagatagaggttttgtcaagcggcagacgacttagaacaaagataaaaggcggaaaagccgcaatatacaatattcccccgacaaaggacggagcggagtacctcatatataaaagcggcgctgtcgtcagtcgcggaaagctctatcccaccggaaagctgcgcatgatacgctcgggaggaaagccgttcaatatacgcgacctcggcgggaagaaatgcgacggaagcgagacaaaatacggcattctctatcgcggagctgagctgaacggtgactactttcacgttacagtgacagacgcggacagggaagtgctttgcggattcctcgggataaattgtgagcttgacctgcgcggagacagggaaacctacggcataacatcgtccgtgcttggcgagagggtgaagtatgagcattatcctgtcggtgcatacgcggatggagtaaggctcgacggtgattttactaagctgtatgggacgctgctcgagagcacaatatcgcattctctggcaggagacgtcacatatatccactgtatgctcggcggggacagaacgggaacattctgcgcaattctcgagggactgcttggcgtggacaggagcgatattgacaaggactacgagctgacttcccttgcaggcggaccgagacagagaaacagcgataactggcgtggcttcatagagtatatgaactcgttcgacggggacagcttccgagacaagtgcgtgtcgtgggctttggcgctcggcgtggacaaagacaaaataaacgcctttcgcagaatcatgacagattcaatttaacaaaaaaaatgcagtacttccgattaaagaggcactgcattttgtattaacttaaattctatcagccggcagcttcaagtgtagccttgaggtcagcgaacttgcttatcattctttctgtctgcttgttgatagccttttcctgcttagcatatgcggaagcgaggtcggtgttgccgctgtctgccattgtgtagaggaagctgctgaagccgagaccgccgagataaccgatgtcgtatctgatggtgtcaacgataacttcaagggactgctgagactcttcgtcacgggaaaccttaccctgaagtgtggtgttgaagtaagcgggagtaagctcgttcttggaagctgctccgagagcgtccattatataaccggtcttttcgtattcaacgttggtggaaggaattacataggttgcgcatacgttcgggtttacgcagtgatgatatccgtcctggttttcgtcgtacttaggcatgggcatgataccgaattcggactccatctcacgcattgtagcaactgcatgaagctcgccgtagtagaagagggacttgtctgtctggaacatcttgaacgcgggatcttcgcctacgccgttcttggaccagctgtatgtgaggttggtgtcatacataagagtaccgatcttttcgagaacggatacagtcttttcggagtagaatgtgttctgcggaacgtcgtctgcgtcctttgagaagaactgaatgtcgcatccgatcatggcaagaggcatcatatcgcagaagcagataagaccgtactggtcagcctgagtcatttcaccgtcgccgtcaaggtcgtttgaaacggttttacccatctcaaccatcttgtctatcgtccacttaccggagttcatgagttcataagggctttcaagctgattctggttgagaattaccttgttgaacatcatagcgccgatggacttcttgtacattgtaccgatatcgcctgtgagagcgaagttcatgttttcaacggacatatccttgaggatgttctggtcccaccacggagcggtaaggtcgagagtacccttttcggagaagttgttcagttcctgtacgtttccgttctgtgcggaagagaaggttgaacctacattaagggtgtaaagctgataagcgttgtcctgagacttaacggaggtcgcgaggagggactggtcgtttgcgcctgttgagtaaaccgtaacgatctcaacgccgagaagatcttcaacctgagctgtacgggcataaaccgcgtcgttcagtgtttcgccggtgtattcggttgcactccagtcaacgtcgccccagataccgccgtcattgggataagtaactacggtgaatgtagaaccgtcgtactttgtgcctgcgggaatgttagcctcatacttggaaggctcggtttcttcgggagttgtgtccgcggtgctcgaggtttccgtgtctgctgtgttgttgttctgcgtcgtttctttatttgtgtcgtttgagttgtttgaacagcctgcaaaagctgtaagaaggaggcacagacaaaggacaagagaaatctgctttttcattagtataccaccttaaataatatgaaatcttgaaaatcgggtgaaagaaacccctcaccctgcttacattattatacttgtgtaaaacacatttgtcaacgagtttcaatgattattaataaaaaattgacataaatagaacattacaactaaatgtaagctcattcgcaacatttatttgcctttgcaaaaacaaatcttatgattaatatacccgagtaaaaaataatttaaacataagatacatatgaaaactcttccgttcattgtattttgcgggcttttgtgttataatttacaaaactctatattgatggaggacaaaatgaacgtatacgaacttttaaacggaataaaaaagcctgagcctgccgtgagcggagaggaattctgctttgccgctgtcggacttgaccacggacatatcggcggaatgtgctcgggacttgttcaggcaggcgcaaagctcctctatgtgtgcgaccgtgacgagaacaaagcgagagagcttgccgcaaagtacggtgccgaagtggtatcttcgcttgacgagatatgcgcggacaaaatggtgaagatggtagcgtcggctgctgttccctctgacagaggaccgctcggatgtgaggtaatgcgccacggacttgactattttgtcgacaaagcgcccttcaccacactcggacagcttgtcgcggctgagaaaacggtaaaggaaacaggaaagcgctatttcgtgtattattccgaaagactgcacagcgaatgctcgattttcgcgggatatcttctcgaaaacgactttatcggtgacgtcgtgaacataatcggcacgggacctcacacgataaacgctcccaccagaccggaatggtttttcgacaggaagaggtacggcggaatcctctgcgatatcggctcacatcaggcggagcagttcctctattactccggctcggacagagtgagagtggacgactcctccataggcaacttccgctacaacgaatacccggagcttgacgacttcggagatatgcacctcacagccgcaaacggagttaccggataccacagagtagactggctctcccctcgcggtcttaaatcatggggcgacggacgctgcgttatcgagggaacaaaagggtatatcgaaatgcgcaagaacatagatttgactgtaggcggggggaatatcctctaccttgtgaatgacgacggggagttccgcatagacgccggaggaaaagtgggagcgccgttcttccgcgatatgattctcgactgcctaaacggaacagagaacgccatgacccagtctcacattttcgcggcggcaagagtatcgctcatagcacaggaaaacgcgcgcgaccttactcccgatgtaccgaacagaagataacggagaacattattgaaaaacagtacccggaataaaaaacacacggctcgcaattttctcgtgacctcggcggcggtggttgcactcttgcggatagcactatacaacggacttacggtaaaaaactacaccgtgacaactccgctcgtgtcggaaagccatgtgttcgcacttgtgaccgacctgcattccacactctacggagagaagcaggaaaatctgattgcaaaaatatcgcgatattctcccgaagccgtttttttcgcaggagacatagccgacgaccaacgtggtttctacggaacgcgcgtgcttatcgaatctctctcgaagaattacccatgctattacgttgccggcaatcacgaaagatgggttgagtataccgacgacataaaagggctgatatcaagctgcggcgcgactgtggtgtcagatacatccgtgaacctcggcgacaacatcacgctatacggaatagacgacccgctgttctaccctaacgaaggattttttccctcactctcgtcactttctcccgataaggataaattcaatattctcctgtcccaccgacctgaatacgcacccgtgtacggcgagtacggctttgacttgacgctatgcggacacgcgcacggaggacaggtgagaataccgcttttattaaacggtctttacgctcctcatcagggatggtttccgaaatacgcgggaggaaattattccttcgacaacggcagccatgtcatagtaagccgcggacttatgatagacaatcttccgcgagttttcgatccgccggagcttgtcatagtgaatataactcccgcaaaatagaaaaaagtctcttcatcataaagacggagagacttttctgttttaaaaattacttcttcgggataagaacttccgtgccgcccatgtaaggtctgagcgcttcgggaatcttaacgctgccgtcagcctggaggttgttctcaaggaaagcgatgagcattctcggcggagcgactacggtgttgttgagggtgtgagcgaggtacttcttgccgtttccgtttactctgatgcggagtcttcttgcctgagcatcgccgaggttggagcaggatcccacttcaaagtacttcttctgtctcggagaccatgcttcaacgtcgcaggacttaactttgaggtcggcaaggtcgccggagcagcattcgagagtacgaacgggaatgtcaagggagcggaagaaatcaacggtgttctgccaaagtctgtcgtaccacatcttggagtcctcgggcttgcagacgactatcatttcctgtttttcaaactggtggattctgtaaacgcctctctcttctatgccgtgcgcgcctttttccttacggaagcagggggaatagcttgtgagagtgtagggaagctcttcttcgggaataatctggtcgatgaacttgcctatcatggagtgctcggacgtaccgatgaggtagagatcctcgccctcgattttgtacatcatagcgtccatttcagcgaaactcataacgccggttacaacgtcggagcgaatcatgaacggtggcacgcagtatgtgaagccgcgtccgatcatgaagtcacgcgcataggaaataaccgcggaatgaagacgagcgatatcgcccatgaggtagtaaaaaccgttacctgcaacacggcgcgcggagtcaaggtcgataccgttgaatctttccatgatgtcggtgtggtagggaacttcaaaatcgggaacaacgggctcgccgaagcgttcgatttcaacgttttcgctgtcgtccttgcctatcggaacggtgggatcaatgatgttcgggatggtcatcatgatgttcttgattttttcggcaagctccgcttccttcttttcgcattcttcaagtcttgcggactgttcgttaacctgagccttgaccttttcagcctcatccttttctcccttagccatgagaccgccaatctgcttggagagcttgttgcggttggagcggagagtgtcggcttcctgcatcgtagcgcggttttcagcgtcgagagcgattacctcatcaacaagagggagcttgtagtcctgaaatttgtttttgatattctgcttgactacatccgggttgtcgcgcagaaatttgatgtcgagcatttttgttacccctttaaaaatgatgttttgggagagaaataaaggcattgccgctgggttctggtggtgcaattgcgctgtcagatttttcgtcaggttaaacaagctgaggaagcaagagtaaatcctctgctgacgaagcttgtgacacatggcggaaaagatgcaagcaagtgtgctaccaaggcgttagccgtgaacctagcggcactgcctcaaaaagtcccctcccggtatattgggacgagatactcgtggtgccacccaaattcgctgaaaaaatcagcctcattctatataaaccgcagctcggaaggcggaaagcgcacatatttttaccgggatcgcaccacacccggctctctgagaaaaataaaacgcgcgtattcttcgtcacagccgaaagtttacttattacagtgtcagtatagcaaaaccgaagaaaaaaatcaagtggttttacaaatttcatatcgaaaatattgttgaaaaagcatttacaaaattagttatatgtgttatactataatcgtacaaccgagtagagttcgcagattcgacaatgataaaatgacttacggaggagtcagctatgaaaaactcacgaataatacttgcattaatacttattattacaacattgacagcctgccgcagtgcagattccaatgaacctgtaaacatggatgaactcatgaaaattcgcatatggatgcttgacaaggatttggaaggcaaagggcgttggggatatactgaagatattgataacggtaacggatattggattcccgacgacggtgtaacacaggttgcgaacgaggatgtatttgtatacgaggctctcgaagtcggtgtaccgcgaactacggctccaatgacttgtcatatgagaagagaaggaaaaaaagctattggctatgcaaattttgtttttgatgtagattatgatgggcttatcaaagttgaaaaaatagagccgaaagacagcagtctgcaattgagatatgctttaggtggcagggctgtaaaggcagacagttttactgttcaaggacctagtgatatagaggttagtccgataggaagagtagttcccggagaagaggaaagcgatagttattatgtggctcgagacacagttgccggaaaggaatatacaatacaaattcaggcatgctcactggctggagaccccattgtcaccgctaagataaagctgacgactattacagaccctgaatatccatgggagaatattcacaaaggcagatatgatgaactatacgaatacggcgaagagcgcactcgtttttgcacagtcgagcttttgtcatacacctacagcgagatgtatatactcggcggcgcgataggtaaaatagattaaacaaacgaaagaaggatacaaaaaagatggataaatggattttttcatgcccggctcccgaatgcggcgagatagtcgaaggattttataacgcaggtcctatgctgaaaaacgacaaggacggcttcacagacgaagactcgaaaatgcaaattgtaaagggcgtgacaagggctgactttgacgaatacaagaaaaagctctcttccaccggatataagatagaatccgagaacgaaataggagctaacgcttactttgatttcggcgaatatcacgcggcatttttcgagaagcgcggcgagataagagttacggaagacaaagttaaaactcccctcgataagttcggctatacctctcacagcggaaaaacaaccgtttatcagtacggtctttactacgataaaaagaatcagtgtaccgaaacgacagtcaactgcggcatgatatatgtgataaagctgtgcgacgacagtcttgttatgatagacggcggacatctcttccagtggaacgaggaagccgaggaaggactgtgggatttccttaaaaccataactaattcgggagacggcaaggtaagaatagcggcatggtacttcactcacgctcacgacgaccacacggacggatgcacaaagctgctcagacgacacggcagtgacatttcgctcgagagagtcatgttcaatatgccttcgtacaaaaccgttcgcggaagctactccgacaccgtgttcgacatgaaaaagactatagccgagctttacccgaacgccatgcttctcaaggtacacagcggatataagttcacgctcgccgacgctgagtttgagtttatgtacgcgcatgaggacgccgtaaacgctgaaaatcccgcagtgttcccgccgagagattttaactgcacttcctccgttttcagactgaccgtggacggaaagaccgtgatgttcctcggcgacacaaacgttgaaacagagaaaatactttccgagataacagaacgcgtgtcgtggaagtcggactttgttcaggtagcgcaccactgcttcaactaccttgatacgctgtacgagtggatagacgcgcccatcgcaatgcttccgaactcatatttcggcggtcacacacccgagaacaccccgaagctcgccggagtaataaagcacctcgaaactcccgacaacatatattacgagggcgagggtacatacggctttgaggtagtcgacggcaagtggaagaaggtatatgaagctcccgtaacaggcggcgaatacgaccattcgggattttgacgaaaagggaatgaaagacagcaaacgcagactgataattatcatcgagcacgtactgattatagcggctctgctgttcgggttctgccgttacagtcatatgaatgattttacaaagagcaaatggcaagagggattcagcggggatgtggtatacgacatgatggagaattatgtttatccgggagttccgatgaccgacgttgtcgaaaatctcggctcggaaaccaataagatatacgacaaagaaaaatatctgtcactgttcggtttggacggcgcggagtattacgttatgatattcaatgtcaaaaaagcaatcaaagacgacggcagtgcggtgagcagatattttgtcgtaatacatgacggcagtgttgtcgtgaagaccatgcttgtcgaggagatagattaaattcagtccacatttgcgtcaataatacaagtgagcggcattatctttcgggtagtgtcgcttttttatatcccagccgtgccgagcttctccgcacattctctcgagcggctgtacaggcttgatgtgtcgatctctccgatgcgcaaaagctcctccgagtatggcagagacgcaccgccgccgagatatatcagctttcggttgagctccattctctcacgggacgattcaagagcttttttggtggcggctcgctctacagagtcaaggttttcgtaaatcccgtcgagactgtcgtactttttgagaagttctgccgcgcgcttcggacctactccgggaacgccgattatgttgtccgacttgtcccccacaatgcacttgaaatccgcaaactgtgccggagttacgccgaatttcagctcaaccgtgtgcggagttacgagagtgctgtcatagccgcggtagttcagtacagatacgctgtccgatataagctgccagtagtccttgtccgtcgacattatgataacatccatccgactgccgtattctatggcgtaagacgaaagcacatcgtccgcttcacacccgtgaatttccgcgtacggcactcccattatcccgagcatttcatatattgccggaagctgagtgaaagggcattcgttaggctctgcgtcagaaaagtcgggacggttagccttgtacgccccgtcaagctgtcttctgtcgccgcattcgggtgagtcaaacgccgtgaaaatatgggttgggtgtatcatatccactaccttagccatagcggaagtaaagccgtatactgcgttgaactttacacctccccctgtgtagaattcatccggcattccgtaaaacatacgaaacaaaagattgtgcccgtcgatgagcaaaaggcgttccttcattattatacctcgttttaagcaatactgatattctaccacaaaatcccgcccgtggcaacataaaaataccgtcctctgcacaaagaacggtatctgcgtatgttttattaaattatcggttgaaaatcccgcgcggataggatataattattattaagccttaactccgccgaagccgcatatgaatcccctcacgtcagaagagcaaaggtcgccgccaatcacgcgtgtcttgtagataataacgttagccatgacctcgccgtcgtagtcgggatagtttttaacgcggaatgtgtatcttgtgacctccttaccgcggtacttcgataagtcaagtccctgaccccgctgtaattcgttgtaggagttcatcaccttgtcaaattccatcgggatgcgtatcttcacctcttcaagcggagtgccgtcgacttcccatccgaattgtgacagaaacgatactatgtcgtcgcttgttttaattttgtcgtagctgtattttgcgctctccgcggctactgcttttgttgaaacaggcgtatattcgggaatagtcagtataacggcgcacaaaaccgcaaccgagagcgcaataacacaaaagaatttcagcgtgcttgcgcgtacagtataaataaacatatctcctccgttttttgtttcgtattgctctgttcaagagtatgtgaaagcggagatatatagaacaaaacattttgtataggagctttattatgttcgagaaagttaaacagctgaccgagtcctgctcatgcggaaaaaagcacaccctcatgacggaagagttcgccgtggaaaaggacgcgcaccttctcatggcggagtatctgaaaaagcacggatatacctctcccgccgtgatctgcgacgaaaacacacacgtcttcacgcatgatatcacaaaaagcattgacgtaaaagcggtgcttacagtgtccggcaaggctcacgcaacggaagtttttgccgcagacgccgaggatttcatacgtaagcattcacctgatgttcttatagcctgcggttcgggttccgtgcatgacatcacgagatacgccgcgcatacgatgaacgtgccgtttgtgtcctatcccaccgccgcgagtgttgacggttatgtctccggcgtcgcagctatgacgtggtacggacagaagctgacgtttgaagccgttcctccgaaagcagtgttcgcttctcccgaggtttttgctaccgctcccgagagacttaccgcgtcaggcgtcggagatgtgctcggcaagtacaattcgctctttgactggaacgtaggaagaatattcacgggagaatactactgccccgagata

SEQ ID NO: 500 - DNA, 2756 bp, Unknown
  16S sequences of unknown bacteria
aaaaggcgaaaagcctaaataaaataataaaacggaggataagttttatggaaaaaaacaaaacagtcagcggcttgaaaaagcagttggcagcagctatagcaatggttttggttgcagcaatttccttgggcacatcaacttacgcttggtttgttaataatactaaggttacagccggtacaaccaaagtttctgcaacaactgcaaacactttgctcattaaaaataaagataatgaatgggcaactacatatacctttgatgatacaaacacaagttttgttcctgtatcgacaataggtaaaggtgatgcaacagcatttgatttctttacacaaaataattgggcaaaagacacatcaaatgcaataactgttaataaggtttcaaatgcaacgacagatagctattggacaaagaactttgaaattaaagcgtcacaggcttgcaaattgtatcttgatacagatactaaatttgaagccgcaggtgctgacaatacaatgaacaaggttcttcgtttggctcttgttataaaagacagcaatgacaactggaagaaaaccgtaatttatcagattgaccatgatacagatgcagataatacatacaatacaacattggaagctttgtcagcagacggtatcaacaaggctatttccggctttgaaactacgggagaaggcaatagcacaactgcaggtacagcaaaggccggagcccttgtttcagcggctacaaagcagattggttcttctacttctcggaattacgctttggcaactgccggtgctgataacagtttggatgctactgttggtaatgcagatgagctttatgcctttacacagaataatgaagttgttaaaattacagcatatatctggatggaaggttgcgactatgattgcaacaacggtacagtagccacaattacaggtgccgctaatactgttacagcaacacttggtttctgtgcaggtagtgctaactaacaactaataaaatatttttaagcaatgaataaaagcactctcggcgtggcacgagagtgcttttaaatgtcctatattacttctgttcagatgtggaattgttatttagtaatgtgttcgtatcggattttaatgagagaagttctttacgcattgaatttattgactttgccacctttttcagtttacgctttagtcttttctttttactattgtactcgcctatttttttagttaggtgcttggctttatgatttaaatttttaatagttgaactatctttgttattaaattcgttgtttgacgtgtattggataattttgttgagaagttctttcatttttttgtccgaaaagtcttcacgatttattttcgttaactgccaacattttaggccttcgtttatttttgcggttggcgacagcatattgtgaaatgctgtgtatataatgtaagcggcaaaaacaaataataacaaataaataataagtgcaagggtcatacttctgttttcatttgaaaacatggtttcaaggataggcagtattattgaattggtatttacaaaagctgttgatccaaatataaggaacaaaatgaattttataaagcagtcaaactttgcatttgtaaaatccatagcgtcttttatttttttaaatatagaactcttagcagaaaatgttttttgaatatcttcaatagaaatgccggttaccgtagaagtaagacatagagccttaactaatctttcttgatagttgttaagagtgaatagtgcgttcattccttgcccgctggataacacttttaaaaaatctcttgttaaaatagttggtgaacttgtggaaatatatatatatagaattagtgctataatagataggaaaagtgaaatatacatataaatactggttggtgatattaaagaaattttacttttaaaaatccatacacaagcagtaaatataattatgtagagatatgaaatgtaataaaaccaaaaatgtctaatttgtaaagaggaataattttccccgccatgtaatttaacatcttcttcctcattttccatacgggacaaaatattattaaaaattttaaaaatttgctcaatgtcttttttcataaatatctccttttttagatagaacaattataagttgtttataaatttttaatttacttatggtgatattatgtctttaaaaagtgaaatagttgtgaaataatttttgcctttttactattatattatagccgtgtatccttagcagcacaagaagtcttttgaacagtatctatctaccttttgcaatattttataaaactttcttgatactaccgtaccgagattttgcctatatcagtaaaaagtgtttggcacacaaaaccgtacagttcacaacaaaaatatgaaatctgttttaatttctgtgtaattttgaaaattcttgatgttgcggcatcaagaatttttaatttttgcattttcataagtgtattggctttatttctcctgttggctttttcaacaagactgttgcacttggcttgacaatttgaggaggcaaaatataggctctctttggtaaagagagctgtcagcgtagctgactgagagattgaaaaacattttgtttacatacgatattcgcttgtaagtttggctgaaaattcccttgcaaatcagtttatcttatcaaggtcaatccctccgatttttcttacgaaaaatcacctccctttaccaaaggg

SEQ ID NO: 501 - DNA, 5935 bp, Unknown
  16S sequences of unknown bacteria
gccgcttcgccgagctccttcatcagctttattgcgccctcgcgcgaaaatatatatttcgtcttttccgaggcacacaccttggtctgcggccatctgtcaagcacatacggaagcgctcccacatggtcgtaatgcgaatgcgagaggaatatataatccacgctctttcttcctttttcagccagcgctttttttatgttagatacgaatttgtctccgcagtaagccataccgcagtccatcagcgccgtcttttcgctgccgaacacgagcactccgtctccgcccatccctgcagtcacgtttaccatattatacggaaacttccgcctgtcattttcggcaaaagcctttatgtaatcaatcattttatttttcctccctgtcgttcgccgaatcttctcagctcggtctgcgattttcctttatttctcccgcggtaaagaatactattccgatccatatgagcacaagcgcggcaaactgaagcttgtcaaacggctctccgaacataaaaatacctataacaagaatcatagtcggcgatatgtattcggtgatgccgagcgttatcatatttattctcgcggccgcataggcaaacgccgtcatcggaattgccgtcattatgccgcagagaagaagcagtatgtactgtcccggcatttctatcatcgaaagcgcgcctcttccgccaatttcaaggtaaattatcgctgccagcgccggcggcatgagaaacatagtttcataaaacagcgacagcacgggcggcatcggaaactttttctttacggctgcataagtcgcaaaggtaagagccagcgccagtgaaatgaccggcagctttccaaaatggaaaaccataactgccactgcgcctatgacaaacaaaaacgcaatttttttgagtccgttcatattttctttaaagattataataccgaacagagaaactatgagcggctccatataatagccgatgctcgtctctatgacatgtccggcgttcacagcccagataaaaatgctccagtttaatgttattacaagtcccgatataaaatatctgagcattatgcctttttgtctgagcggctccgttattccctttaggccgtacatcttaagcgccgtcaaaaaacagcaaagccccgagagaaacacacggtaaagaattataacccgtgaatcgacgcattctatccagcgccaatatatgggaagcactccccacagcaccgatgttgccactgccgttataagtccgattttgtattctcttgcctcgctgcccgaagtattcattttctgctcctttttatcctgtttttcgtatattgaaagtatattaagacacactcaattatcttatcatcagcgcacaaaaaaagcaagcagctgcttgcttttagaacagtccaccgaaaaggccgcctcttccgtttccgcccgcacagaaaagtaagtaaagtataacgagtatccaaattattgaaagtccgccgttgttgtcatcgcagcagcaatcatcacggcagcatctttcctggcattctcttacgcattcacgctcgcagcagtcgtctcggcagcatctttcatctcccataaaaaaacctccttagcataaactattagtttatactatgaaggctgtttgcaatgtgtgcataatcttattttttcatgcatgttttaaatttcatcgtcgtacacgaacccatccgcaagcacgctttcatccgcaaatccatatgcaagtccctcttttctgacaacacgcgcgctgtcatcatcaggatcgtggtgatgctcatgtccgcagccacaatcgtgatcgtggtgatgatggtgcccatagtcatactcttcatcctcattgtaatgtctgctatcttctgcatattccgcagcgacaagttctccaaatgacatcacataatcactaagctgataattcagcgcctgctcaaaattataaacagactttttcttcgtgcttggctcgcttctgtattccgcaatagcctctgccaccggcagcaccagcgtttcaccgtatttcggatcttcgcataccacttcagtatcgaataggtaccacattttaaatttattgaattcttctgcaagtaccgcgagattatgctcctcttcctcttctttacccttcgccagccctatgagattcataccaatgttatttataagaagatatatttcatcctgattttccggaagatgctcgagtatatcagagaaatagttttcgataagctccgcaagtgtctctccatccacatagcgaaacagattagctatcgccgcatccgatatggtatattcacactctatgagatccgccatattttcaaaatattcaaattcctcaggttcagcaatctccaaaattttcataagctgtttatattctattgtactcgcttttctatctcttctcatctctatcaccgtatctcatcgtttctatctcatctttttattaatttcaatcgttcaatttctatttaaccatctcgttcattattttttgtgctgtttatatctatcaaatcgagatttttaaaatgcacctttacaggagtgtgcgcaaatattgtctctatcatattcgtaaaattctcagataaatcgctcgcataaaacatattttcaagatctgatcctgacgcaagcatatcgcgttcttcgagtatttccttaatgctgtttattatttcttcagaaggatttattattcttaggtcaggatagagtctttctatactgtcacgtatcagcggataatgcgtgcacccaagcacgagcgtgtcgattctattttcgagaataaaatcgtctaaataatattttatcgtcatatccattatgtcgttttttattatgccctcttctataagaggcacaaatgccgggcacggtgcagcatgcacttcaagctccggtctgatttcatttatgagcctgttatatgcctgcgagcgtatcgttaccttcgtgcctattattcccaggcggcaatcgctcccgcagctccttgcaacccgcttggccgccggatctattataccgacaaccggaacctgcggaaatctctcctgcaagtccgaaaggcaggtagagcttactgtattgcatgctataactatcattttcacatcgtttctcacgagaaaatcggctatctgcatcgaaaaagtttttattgtagacacagcctttgagccgtaaggcgtacgcgccgtatcgccgaaatatattatcttctcttcgggaagagcggccgtaagatatggtatgcaggtcagcccgccaagaccactgtcaaaaaaaccaataggtctgttgtccatttttatgatatccttccaattttgtggtatagtaatattatacagatttaatcgtcaataatcaaattattattatacacggaggcagtttatgtgtaaagaaaacaatttaaaaaaattaagagagcgaagtgaaattgaaaataagtacaaatggaacatcgaagcgatgtatgccgattccgaggcttgggaaaaagattttgcagattgtctttcagcgggcggcgcatacagccgctatgccgggcatctcggtgacagcgcggatactctgttaaacgcgctcaggacaaaagatgaaatatggcagaaactcgaacgtgtctacgtttatgcccgtatgaaaaaggacgaggacaacagagtctccaaataccaggctatgaacgaccgctgcaatgcactcatcgccaaggtttcatccgcaatgtcattctttactccggagcttctttccgtgccagaggataagattctcggatttattgcggaaaatgacggccttaaagtttacgaatttcttatcaaagacacgcttcgtttaaaagcgcatgtgctttcggaagccgaggaaagcctgcttgcacaggtcggtgaggtgctgtcagccacaaatgacatatttacaatgctcaataacgccgatatgaaattcggagaaataaaagacgccgacggtgatatggtagagctcacgcagggcaattacatttcttttatggaaagttatgacagaaatgtgagacgcaatgcgtttacagccaagtacaaggcgtatatggatctcatcaacactatcgccacgacatacaattacaacaccaagacagacgccgtttcggcgcgcataagaaaatatccttcatctctcgaagccgcgctctcaggagatgacattccaaagtcagtgtacacgaacctcatcacggctgtacacgatggtcttccggctatgtacaagtatatggaaattcgcaaaaggctgcttggcgtggacgaactccatatgtacgatgtttatgtgccgctcatcgaaattgaagaaaagcctgtttcctatgaagaggctgtggaaataatgaaggaaggtttatccgtactcggcagcgagtacatcgaaaggctttcgcgcggaattgctgcaggctgggttgatgtctttgagaacaaaggcaagacgagcggcgcttacagtttcggcagctacgacagctttccttatgtattgctcaacttctccggcaagctcaaggatgtgtttacgatcgttcacgaaatgggtcattctatgcattccagctacacgcgcgagacgcagccgttcgtttacggcggtcattcaatttttacggctgaggtggcctctacagtcaacgaagcgcttcttatgaagtatctcatcaaaaaagaagaaaatcgcctgaaatcggcaaaaaaaggctctaaagagtacgaagacgcgctcaatatgaaaaaataccttttgaatatgcacattgaggaattccgtaccaccctcttccgtcagacgatgttcgctgagtttgaaatgctcacgcacgaagccgtagaacgcggcgaggtactgaccgctgaatggctgtgcgaaaaatacgctgagctcaaccgcctgtacttcggagacaatgtcgtctgtgaccctgaaatcgcctatgaatgggctcgcataccgcatttctaccgctcgttttatgtttataaatacgctaccggatattccgctgcaacagctatttcagatttgataataaaaggtgcggaaaacaaaggcgatattgattgtgctttagaaacgggcagctccgtcgatgctccgaacagcgctcgcgacgcttacaagaaattcctgacgacgggcgaatccgatcaccctatcgagcttctcaaaattgcaggtgtggatatgggcaccgaagcacctgtcaagaatgctatgcaggtattcgcagagctcgtcgatgaattcgaccgcattacacgcgaatagcataaaacacggctcaaacctgagtctaaggcaatttttttcgcattttatatgcgccatatgaagcttcatatccttcaggtatatagccccaaattcgtcaggcatataaccagatataaagaatttacaaaaattatctgtgctcaaaaaggatggttcgccgtccttttttaatgccgcttttccagtcacttgctttgcagtgacgcttttgcaattgcctgcattttattccttattttcacacaaaattatcttttttcactgtaaatcacaaaaaaagacattttctccgcagagcacccgcgcgaaaatgtctttttattcgcattgctgaaatttaagataactttaataattttaatattgtcccgtctatttctcgtatactacctcgccgcgcacaattgtcagttccgaagtaatatcgagtatttccttttcagggcaagtgaagatatcgtttgacatcagtaccatatccgcatagtatccttctttgattctgccctttctgtcctcgaggaactgcgcataggcg

SEQ ID NO: 502 - DNA, 25885 bp, Unknown
  16S sequences of unknown bacteria
cttgtccggctttcaaaattcacgaccctatgtcgtgaaagtctcaaaactgtttagtctgaaaatttattttcagacttattcctcagtcgaatcgtcagtgtcgaggatcctgatatcgagctcctcgtcgtccggatcgacgctgtcctcagcgtcctcctcgacatcctcgccgtagtccttcgcgagcatctgctcgacgtcgtcgcgcttcgacttgatcttgtccgctatctcctccataagcgcggggttcgcctcgaggtactttctcgtgttctccttgccctgcgctatgcgctggtcgccgtaggagaaccacgaaccgctcttctggatgatgccgagctggataccgatctcgacgatctcgcccgagcgcgcgattcccttgccgtaaaggatatcgaactccgcggtcttgaaaggcggagcgaccttgttcttgacgatcttgcacttgatgtggtttccgtagatctcgttgccttccttgagctgctccgcgcggcggatgtctattctgaccgacgcgtagaacttcagcgcgcgtccgcccggggtagtctccgggtttccgtacatgacgccgatcttctcacggagctggtttatgaatatgatgacacagtttgtcttcgctaccgcgctcgagagcttcttgagcgcctgagacatgagtcgtgcctgcataccgacatgggacgccgccatatcgccctcgatctcctgctgtgtgacgagcgccgcgaccgagtcgacaacgactacgtcaatagcaccggatcttataagcgcctcggcaatatcgagcgcctgctcgccgctcgacggctgcgaaacgagaagcctgtctatatcgacgccgagcgccttcgcgtataccgggtcgagagcgttctcgacgtcgatataagccgcctcgccgccggacttctgggtttccgcgacgacgtgcagcgcgacggtcgtcttaccggatgactccgggccgtatatctcgacgattcttccgcgcggaactccgccgatgccgagagctaggtcgagggtcagggaacccgtcgaaatggcgctgacctccagttccggagcctcgcccatgcgcattatagcgcccttgccgaaattcttctctatctgaccgatagcgccctctatggcctttttcttctcatccgcgtcggtgatatgtaccggtacgggcttggacggtgatttacccttcatattttttaccatgcctttctcgttttgatttcgggagaacaaaatgtatacagatcgcgccaaaacagagtttttacgcgaacatattttctttacggatactattatacactatatccgcgcggatttcaagtactttcgggaaaataaatcagaacaacgtcggatttttgtgtcccggataccaaagtgcaccattcatgggtgaacgttgatcaccagatcgacgaatcgatcagccactcgccgtcgtatttctcaagcaggatgtagaaagtctcgccgtcgcgctcgaccgtgacctcagccttgaagcggctcgatctcgcgaccttcgccgtcgaaagatcaagctcggtcggctcgccgaaatgctcggtcgattccgggttgacatacagcttcccgtccttctcgatgaacttcgccgagatcgacacgtcgtcgctcgtcgcgccgttcagcgcggtgttctcgaggacctttatatacgactgcgtatatacctcaccgagagcgtttttcagatcgtttatcgactgtatctccgaatcatcggaaacagcgtaatattttccgctcgacggctccgcctcatgcgggagaacatcgtcgtagatgacctccgcgagatacagcgccttcggatacttttcggacagagcggatagtatctcggcgtcgttctttgccccgcaggacacgagagcgaaaagcgacaccgcgatgacgacggcgagcgccgccgtcacctttcctctgaatttcatggaataccgtcctttcaggatgcgtgttcggatgagtctccgttatcagatatcatcgtcctcgtccggcttgtttccggcgcctccgccgagatctatctcatcctcggtcggatcgaccttttcgtcggattccgccggagctatcgcagcggttcccgcgtccgacgccatgccctcagcctcgagctcctcgtcgttctcgagtctcgcgaagttcacaagtgacgagccctcggacagcctcatgactatgacgccgcccgcgcttctgccgtagaacggtatgccggacactggtgtgcggattattgttccgtcgttcgttatcatcatgatgtcgtcgctctcgccgacagcagcaatacctgcgagcttgccggttctctcgctgatgccgtggcacatgacgcccttgacgccgcggttgtgcgccgagaagttgtcgaactcacagcgctttccgaagccgccctcggttatcgtgagaagcgccttgtcctccgagatgaccgcgcatccgacgatataatcaccgtccgagagggtcatgcccttgacgccgcgcgcgccgcgtcccatcgggcggacgtcctcctcgccgaagcgcgcggagagaccgtcgtgagtcgcgattatgatatcgtcgtttccgctcgtgtgctttacatagacaagctcgtccccgtcgtcgagagtcagcgcgatctttccgcccttcctctggtactcgaactcggagagcagcgtcttcttgacgatgccgcgctttgtcaccatgaacaggtattccttgtcgctgaagccagggactgagattatcgccgtgaccttctcgcccgcctcgagctcgaggatattgacgatattcgagcccttcgcggttcttccggcttcgggtatctgataggtctttctggtatgaaccttgccggtgttcgtgaagaacatgagaagagcgtggctgttagccgcgatgacgtcctctacgtaatcctcttccttggtcgccatgccgatgatgccctttccgccgcgcttctgcgccgagtaggtatccgccggctgacgcttgatgtatccgccgtgagtcatcgtgacgacacaagtgtggcgctcgatgagatcctcatagacgatatcgtcctcagcggcgacaagctcggtccggcgcggatctgcgaatttcgcctttatctcgagcatctcggtcttgatgatctccttgatgcgtccctcatcgttaagatccgcggtcagctcctcgatcagcgcgtaaagcttcgcgagcctttcctcaactttctgtctctcgagtccggaaagacggccgagagtcatgtcgactatcgcctgagcctgtatatcgtcgagggagaagcgcgccatcagcttttccttcgcgtccggtatcgacgccgacttctttatgatctcgatgacctcgtcgatattgtcggtcgcgatacgcagaccctcgaggatatgcgcctcgcgcttcgccttttcaaggtcgaactttatgcggcgggttatgacgtcttcctgatgctttatataataaccgagtatctgcttgaggttcagcacgcgcggcacgttgtcgacgagcgcgagcatattgaacgcgcaggtatcctgaagctgggtgtacttgtagagctgattcagtatgacctgaccgttggcgtcgcggcggtaatcgacaactatccgcattccgtctcgtccggactcgtcgcggatatccgtgatgccctcgatgcgcttgtccttgacgagcgccgccatcgactcgacgagcatactcttgttcacctgataaggtatctcggtgacgacgatacggtgcttctcttcctcgatattgcacttcgcgcggaccatgactcttccgcgtccggtcgagtacgcctcatatatgccgttcgagccgtaaagagtcgccgcggtcgggaaatccggtccttttatgaactgcatgaggtccctcaccgtgcagtccgggttctccatctgatatatcgttccgtcgatgacctcgccgaggttgtgcggagggatatatgtcgccataccgacagcgataccgatcgagccgttcacgagcaggttcgggaaacgcgacgggagtactctcggctctttcaggcggttatcgaagttcgggtcgaagtcgacgacgttcttgtcgatatccgacatcatctcgttcgaaagcttcgcgagtctcgcctcggtataacggtaagccgccgcggggtctccgtcgaccgaaccgaagtttccgtgtccctcgatcagcggatatctcatcgagaagggctgagcgagacgcaccatcgtatcgtaaaccgctgagtcaccgtgcggatgatagcgtccgagcacgtttccgaccgtcgtcgccgacttgcggaacgccttgtcgtaggtcaggtgatcctcatacatagcgtagagtatacgcctgtggaccggcttcagtccgtcgcggacatccgggagcgcacgggacatgatgacgctcatagaatacgcgatgaacgagttctcgacctcatgccgcatctctatcccgactatcttctgatccgggaattcgagattctcctgtttatctttatccttgtgttccattataatttcaaatacctttcttgacagaagagcgttcaaaacactctttcgtccgttctcagggtcatcgccgcgcggtggaaaattttctacgtgcgctgttgacagatcttatttttatgcagttctcaacaccacgcgccgcgcgtctgtagatttattttccaacagccatgggcgtcgttttttcataaatgaaggaatcttttaatcagcgcgaaaattaaattccacgctctttcattaaattcttcacagccttttctacagcctgtggaaaaaactttaacattaaaatcggtgttgataatatgtcaaatatcaaggttcgtcgcgtagaccgcgttctgttcgatgaactcgcggcgcggctcgaccttgtctcccatgagtatcgagaaggtctcgtcgcaggcgaccgcgtcctcgatgttgactttcagaagagttctcgtctccgggttcatcgtcgtctcccagagctgttcaggatccatctcaccaagacccttgtatctctcagcctcggcgttgcctccgagttcagcgatcctcatatccctctcggcgtccgagaaagcgtatctctcctggtttccgcgcttcaccttgtagagcggcggctgagcgaggaaaacgtgtccgtcctcgatcaacttcttcatgtgcctgaagaagaatgtcagcagcagtatgcgtatgtgcgagccgtcgacatcggcatccgccatgaggattatcttgccgtatctgagcttgtttatatcgaattcctcaccgattccgcagccgagtgcctggattatcggtatcagcgactggttcgtgtagaccttgtcaagcctgctcttctcgacattgagaaccttgccgcgcagaggcagtatcgcctggaatttcgagtttcttccggatttcgcggagccgcctgcggaatctccctcgacgaggtagagttcggtcagctcgacgcgtctctcctggcagtccgcgagctttcccgggagagtagagccctcgagcaccgactttcttcttgtcagttcccttgcctttctcgccgcctcgcgcgccctcgacgccgcgagcgatttttcgagtatcgccttcgcggagttcgggttctcctcgaggtattcgctgagtttttctgtgacaatgcccgaaacgagcgtgcgcatctcggagtttccgagctttgccttggtctgcgactcgaactgcgcgtcggtgagcttgacgcttatgaccgcgcagagtccctcgcgtgtgtcctcaccggtgagattcttgtcgtccgccttgaggatgccgtgctttctcgcgtaatcattcagcacagcggtgagcgccgttctgaagccggtctcgtgggttccgccctcgatcgtgtgcatattgttcgcgaaggacatgatgttctcgttatagctgtcattgtactgcattgcgacctcagctatagagtcgttcttctccccgcgcatatagattacgtccgggtggatcatcgcgagtctgcgcaccttgttcaggtgctcgacgaagctctttattccgccctcgtagcaaagctcgacctccggcttgccgatcagcggagacggcttctcgtccgcgtcagccgcgctgtcctgagcctttgccgccatgtcctcgctgtcaagagcgttctccgcggcagcgttttcgtccggagcgtccgcctcgtcctcggtgcggagcttttcctccgccgcctcctgagccgccgcagctgccttcgccgcctgagaggctcccctctcgtcgcggaggattatcttcacgccggcgttgaggaacgcctgctctctcagacgattgagaaccgtctgataatcgaacacggtctcctcgaagatcgtaggatccggcttgaagcgcacataaagaccgtgctttccctcggaagagccgacatgagcgaacggtctcgcgaccttgccgcgctcgaagcgctcggtatatctctcgccctcgtagcagttgtctatctccatccactctgagagagcgttgacgacagaagcgccgacgccgtgaagaccgcccgcgatcttgtatccctcgccgccgaactttcctccggcgtgaaggacggtgaagacgacctccattgtcgggagcttgaccttgtggtgtatctggctcgggacgccgcgtccgtcgtcctggaccgagacgctgttgtccgggtaaagcgtgacgattatcttgtcgcaccagcccgcgagcgcctcgtctatagagttgtcgacgatctcatatatcaggtgatgaagaccgcgtatagaggtggagcctatatacattccggggcgttttctgaccgcctcgagaccttcaagcacctgtatctggttttcgtcgtaatttatgtttttctgctctgccattgtgattcctttcgtttaggacacaccgaacgattcgttttttcacggaaaaagcctttgatttacgcgcccttcacgttaaagcgacctctgatcagtgttttatttatactgcacgcgccgccgacaaagacgcggcgcgccgtcactcgccctctctgctgcgcccgatgagagctccgaccgagagctgcgagacatataccttctttccgggatcctccgtgatgatgaacgacttcggcagctcctcgcggatattgacgagccgcccgtccttctccgcgcgctttaagaactccctcgtcgccggagccattgtcgccgtgtccatatcgaatatcccgattatgctctttgtcctgataatacggctgtttcccgcgtgtacatacatcatgtcgcgccgcctccgatcccgttttcattttccggttctttccggaccgtcatatctacgggcggaacgtctgaatagtgcccgtcctcgacgtatatatacctgacgttcctcgcgaacggcggcggagtgcaggcggtcatgataacctgtctgtccccgagccttgaaagcagaaacctctgccttgtcgggtcgagctcggaaaggacgtcgtcgaacaggaagaccggatgctccccggtgtattccatcgagatctctccctctccgagcttcatcgcgagcgcgagcgatctctgctgcccctgtgacgcgtacagacgcgcctcacgacagtcgagggatatctctatatcatccttgtgcgagccgtacagcgtcgctcctgcggcgatctcgcgcgccgtgttcgatgtcagcgccttcagatagagcgaatacgcctccgcctctccgatcggctcgtccgtcttcaggctgttcttatataccagcgccggcgtctctgacggtccgccgtccgacagctcctcgaagaagcgtttgacgcacctgtcgagctgctttatatacgcgcgtctcgcgacgaaaatctgcgacgccgacagggacagctgatccgaatagacgtcaagcagcgaaatgtccccggcgccgtcctgaagctgcttcagaagagcgttgcgctcggagagcaccttattatgccttgatagcgccgctagatacgacgggctcagttgacagagcgctatgtcgagaaagctgcgccgctccgcgggtcccgccttcacgagcataagatgctccggacagaaaagcaccgcgcggaagcatccgacgagctccgcgagccttgtgaccggcgccccgttctttctgcattcccgccgtttcgcgacctcctgtgagtacgcgcggaagattatctcctgctcccgtctcgaatccttcatgtcgagcgtcacctcgaagaaaggactgccgaacttcaccatctcgcgctcacgcggcgtgcggaagctctttccggcggccatcaggtagatcgcctcgagggcgttcgtctttccctccgcgttatttccgaggaaaacattcactcccggagagaaacttatatccgcctcctcgatattacggaagccgcggcatctaagccgttccgcgatcatttaagcatcctgaacggcacgacgaggaaggtgaaccgatcgttctcgtccgcgtcggacggctctattatcatcgagatgagcggcgtcgacagtgacagcctgaccgtgtcgcactgagccgcgcggagggcgtcggtgaggtagcggcagttgaagccgatctcgatctcgccgccctgctgggtcgtcggtatctcatcgtggacctttccgctcgcggagacggaggttatctcgaccttgttgtcatggaagaagcagcgcgccgaggactgattctttcccgccgcctcatcggtgacgacagacgcgcgctcgagagcgccctggaagcttgccgtatcgatctcgacgaagatcgcgctgttcttcgggatgatccgctcgtaatctatatagtcgccctcgataagacggctgaagaagacgatatcacggttctcgaagcggaatatgacctgcttgcggctgacgtttatgctgaccgtctcgtccggctcattcaggagcttcacaacctcgccgagggtgcggccgggaacaatgaaggacatatcgagttcgccgtccgcatccgtcgtgttctcaaggtcgcataccttctcgcgcaccgcgaggcggaagctgtcgcagccgaccgtcgttatcttcttgccgtttattctgaagagcgcgccgttgaaggtcgcgcgcgcgtcgttctgcgccacggcgaagagggtgcgggtgatcatgtttttgagatccttctgctttatgttgaagcccttgcggttcgagatgtccggaagagtcggatattcgcgcggatccatgccgtttatctcaaattcactgctgccgctcgagatcttcgctctccatgtcggtccgacctctatggatacctcagccgccggcatgagcttaattatggaattgaggctcgcggcgtttatgacgcaggcgccctgctcgattatgtccgcgtcgatctctatgcggatacctttttccatgtcgtagccgacgatgacagcgcgctcgccggtgcagtcgaggagaattccctccgccgacgcgatggtgctcttggttgaaacgcaggagagcgccgtcgaaatggcacttccgagtatgtctttattaaaattaaccttcatgattttcaaacgtctttaatgacgtcctctctttttaatgattctgattggcttccccaaaaaattaaaattaattaaagctggcttgggatttccacactctaatataaaaattaaaaaatgaaattcaaagaaataaaaactaataaagattaaaattagtagtcgtagtagtaggcactgtagaaattgttgaaagcccggtaaaccgcgccgcgcctggatcttcacgccgagattcttaaaaatttcctgttgctctcccgtggatacgctcttgaaaactccaggccccgcggcggcgttcctgccgcctgtggacgaatgtgaaccgatcactgtttatatgttaaaaacgctgtgaaaagacgacgggaatccggaccacacggcgaaccggtcggttgaaactgttgagccgctggatgttgatatcaggcatgccgtccggattcagggacgcgttccgacagccatgtggcttttttatcaacagaccagcggcgtcggaaactgtctgtcccgcgccgtttccggcaccatttcaccggcttcttcaacaggatatcaacaccagcgctgctggtgttgataaagccttggcggtgtatgtaaaacctgtatacaccggctttttttgtttgtcagcccttgatttccttcgtcaggtccgctatgtcaatgtcggtgattgagttcgagccgagctccttctcgatcgtcttgagtgaatttataaccgtcgtgtggtcgcggttgaatatcttcccgatctgagggagcgacatatcagtcagcttccggatcaggtatatggatatgtgtcttgcccacgcgatctccttggtgcgcttcgagccgcggatatcctcggtcgagacgccgtatttcttcgcgaccttctcgaggatgcggtcgatcgtcactccgaccggctctccgcccgtcatgagatctgcgatcgagttcttcgcgagctcaatcgttatcggggtcccggtcagcatactgagcgcgccgagcttcttgatcgcgccctccatctgtcttatgttcgacttcaggttctcggcgagaaaattgacgacgtcgttcgagagctttatgtccatcgccgccgccttctttttgagtatcgcggcgcgcaggtcggcgtccggtggctggatgtccgccgttatgccccattcgaatctggtcttgagcctgtcctcgagagtctttatgtcgcgcggcggccggtcggacgtcaggattatctgcttgtgatcctcatagagcgcgttgaaggtatggaaaaactcctcctgagtcgagtcgcgtccggcgatgaactggatatcgtctatcaggagtatgtcgaccgtccggtacttctgtctgaactgctcggtcgtcttctttgagatggcgtcgatgagctggttcgtgaactcctcgcccttgacgtagactatccggagattcggccggctcttgtttatgtgattgattatcgcgtagagaaggtgcgtctttccgagaccggacggaccgtagatgaacagcgggttgtaggtgtaagactcgacgttagcgttgcaggcgggatcattcgcgaccgcgaccgacgctgcgtgcgcgaatttattcgagtttccgacgatgaagttgtcgaacgtgtactcgctgaggtaagtctggttctggagcggggtctcgggacgcggcacttcgcgctttacctgttcgccctccccgctgtcggcggattcttcggtttcctcctccgccttatcgggcaaagcgggggtatccccggaaatatcccccacatttgtcgaactacgttcgtcggggaattctatctcctcatgaacatacttgtcatactccgcggggtctgcctcccggttgacaatgatgacctcgaccgcgaagccgagcaccttttcgaaggcttcgcagagggtgtcaaggtatttgtttgtgatgaccttgtatttgaaagcctcgtcgcagatgaggacaacgtccttatcactgaccgagtaaagggtcatccgtgagaaccaaagctccacgagcgatttcgacaggagcttcgcgagctcgtcaagaacgagccgccacagatcttcataatgggcctgcataaaataatgaccatgcctttcgcacatactacggtcccgtatccgcttcctatccggattcttgacgcgctgaccgagaattattacatctatataaatatatcaaataatattatagcataaaaaccgtcaaaaatcaagtggcaatacgatgattttgcgctccggagcgactttttttgcgaaacccgccgcgttctgccgggcggcgcggaaaaagacggcagaggggtgatccgcgggtcttcaaacggggaacaaatcgtaaattttttgaatttcggagttttttttcgaaaagctcttgacaaacccggtgtgatacgtgtataatagtaggtgttattgtgtaatttcaaagtcatatccgggtccggactgtccgggcgcgatattgtttgaatcaatccgcggtctttccggggcttcccggggaggcgcgatttgaaggaggtgtcaaaatgcttagaacataccagccgaagaagcgtcagagaaaggttgagcacggcttcagaaagagaatgagaaccgctgacggaagaaaggtgctcaagagaagacgcgcaaagggcagaaagagactcacctactgagttcttttatcttcgaaaaatcaacgcagccgataccgaccgatgacagaccggaatggtctgaccgttcgcggcgaatcgggacgtatcgggcttgcggctctgctgtggtcagagctttggaagacaatagccaacgagcaagaagaaaccgccgaagagttcggggaagatcccgtatttcgggggtttttattgtaatacggcgaaatatcgccgacattgaaaaggtcctttatgaaacttcgcgctataagagagaatcatctcttttcaaaggtatacgcaaaaggaaagaaatttgtcggacgcagggtcatagtttatgtcctgccggattattcgggcgcgcgtataacgagatctgacccgatgcaccggcgcgtcaaccgcgtcgggatcactgtgacgaagaagctcggcggagccgtcgagagaaaccgcgcgaagcggataatacgcgacggatacaggcttgccgacaagaagtccccgctgaaaaaggggctgctcgtggtgatcgtcgcgaggagctcgattgccggcgcgaaggcgcaggatatcgggaaggatatctccgccgcgttcgtgaagttccagaacgagtgtcagaaggaaccaaagcgttccggcggtcggagacccgactcacagagcggacaggttccgggcggacatgagtccggcgggcaggggtctgacagacataagtctgtcgatgcgcctgtcactgcgaaagaatgatccgcgatgaagcatataatggtctttctcgtgaagctgtaccgcaggttcatatcgccgctgaagcctccgtgctgccggtttgttccgacctgctcgcagtacgcgatagaggcgtttgagaagcgcgggttctttgtggggctggcgcttacggtgtggaggataatcaggtgcaatccattctgcaagggagggtttgaccctgttcctgaaaaaaagaataaaaagaatacttaggagtgaaaacacaacaagatgagcagtatctgggatacgataatcaacagaccgctcggatggataatcgaaatcagctaccggttcacgcataactacgcgatagcgctgttcatattcgcgctggtgcttcagattgtcctttttccgctcggtatcaagcagcagaagaactcggtgaagcaggcgtctctccgtccgaaggagatggcgatacgcaagaagtacgccggacgaaacgacaagccgacacagcagaagctgaacgaggagataatggagctttaccagcgggagaacttcaacccgatgggcggctgtctgccgatgctcatccagcttccgatcctcttctcgctgtataacgtcgtcataagcccgctcaagtatatatgcggattcggcgccgagacgataaagaatatccagctgaaggtctatgagatacttcaggcggcgggcaccgagggttttgaggcgttcgccgagggtaagacggtgtctcagatcaatctcatcacaaagatgcgcgagctcggactcacgaatttcgtcggtgagaacggacaggcgataaccgagagtatgctcccggatttcactatattcggcggaaagctcgacctttcgatgataccgatacagcatctctggagtatactgcttctgatcccggcgcttactctcgtcgtgacctatggaagcacatggatctcgagaaagcttatgtataacccgaatcccgaggcgcagaacgatatctcgatgaagatcatgaatctttcgatgccgctgctttcggtctacatcagtttcactgttccggcgaccatcggtctttactggatattcagaagcattctcggcgttctccagcagctcgcgctgtcgaagatgttcccgatcccgaaattctcggaggaggactacaaggcggctgagcgtgaggcgaatttcaaggcactctctaagaaccagcagaagaagcagaaggtccgctcgctgcatcacatcgacgacgatgattacgaacagcccgaacagcccgtcgacaagaagccgcagctgaaggacggagtcgataagaagaacgctccggtgctcaaggaggacaagccttcacgcgaggaaaagcaggaggacaagcccgacgataagtccggagaagacaataaggacaataagtgatccgacagatcaagagaatgacggaaactgaataaacctttgaaaatgtttcccggcggaaaccgggaaaaggaggtggcgggctgctgtaagcgtatggcttatgacagcccgcgacttgaataacgatcttccgaacagaaaggagataaggcaacactgatttaaggttgttttcgcagaaaaaagcccataaatccggggacttttttctgcgaaaacccgagttattcagtgtttccgtaaagcaaatgaagcaggaaataatttacaccggaaaaacggtcgatgacgccgtcgcggcggcgtgcgcggagcttgggtgcgagcccgataagctcgaatacgaggtcgtcgaggaggcgaatggcggacttctcggtatcggcgcggtcccggcgcggataaaagtgacttgcagcccggacggaggcaaggcggcgaaggatttcatcgagaccctgatacgtgacatggacctcgaggcggaggttgagctcagcgtccagaagcgcagcgacagacttatcagcataaagggcgaggaggcaggtatcctcatcggtcatcacggggacactctcgacgcgctccagtatctgacgaacctcgcggcgaacaagcgcgaggaggaggagtcccgcgattatgtccacataactgtggatatcgagaattaccgcgagaagcgcgaggcgacgctgagagcgctcgcgagacgcaccgccgataaggtcagaaagtacggcaagagcgttatgctcgatataatgcctccgaacgagagacgcatcgtccactccgagatacagggcatcgagggtatctcgacgaattcgatcggtgtcgagggctcgagaagagtggttgtgtatcttgagagcgccgggttcagcgttccggctgaggctcagacagaggcgcgccgcggggacaggaagcccacgaagcgtggcggacattctgattccggaaggaacggttcctccgacagacgcgcgcgccgtccgaagacgcaggacaagcccgcgaaacccgccgctccgaagtataacgacggcgaggagatgagcgcggaggagctgagcgagcttatctcgacctacggaaccaaggattccaaggaaaagaccccgcgtgatcagccagcgaagttcaagagcttcgacgattacctgaacagccttctcggcgattcggacaaataaatagttcgaggaggctgccgcgctttgcacggcagcctcctttacatggaatggagatatttatggagaagaccatagccgcggtatcgacggctttcggcaagggcgggatagcggtcatacggatatccggtgaggacgccgtcggcgtcgcggacaggatgttcagaccggcgtccggaaagccggtcattgaatatgagagcggacgggcggtctacggagatataataaaaaacggcgagcgtatcgacgacggcatctgtacgatattccgcgcgccgcgttcgtataccggcgaggacacggcggagataagctgccacggcggcattctcataacgtcgagggttcttgaggcggcatttgagtgcggtgccgttcaggcgggcgccggggagttcacgaggagggcgttcacgaacggaaggctgtcgctgtcccagaccgaggcggtcgggctcgtcatcgacgccgtgacagacgagcagctgaagatagcggcgtcacaacggcgcggaaacctcaggaagaaatgcgatgagctctatgaatcgctgaaaaatgtcgttacgaacatttacgccgggatagattttccggacgaggacctgacgcttatgagtgatgacgaggtgaaggacaggcttgagacgatacattcggagctagaaagcctgagaggttcctacggagccgtcagagcggcgtctgaggggctgcgctgcgttatagccggaaagcccaatactggtaaatcatcactgctgaaccgccttgtggggcgcgacagggcgattgtgactgatatcgccgggacgacgcgcgatacgatcgaggagactgtgccggtcggaaaggtgctccttcgcctgtgcgacacggcggggatacgtgagactgaggacacggtcgagaaaatcggcgtcgacagggcgcttgacgagctgtccggagcggagctggtgcttgcggttttcgacgcttccgtggatattgacgatgatgaccgcgcgatacttgaaaggctctcgggaactgattgtgtgaagatcgcgctgataaacaagacagacgccgcggatgccgatggtataggtgagtgtgagtcatgtgtcatgtcttccggagcgggctttgagtgtgcggttcgcatatccgcgaagagcggggaggggattgacactctgagcgcgagaatagaggagctttactctggtggtaagattgattacgatacggcggcggtgcttgtgaacgcgagacagaacgcttcggtgactaaggcttcggagtgtatagcgagggcgctcgagcggcttcgcggcgggtctgagtcggatactatcgggtttgagcttgaggaggcgctgtgtgagcttggtgagcttgacgggcggcgggtgtccgaggagatagtcgacgggatatttcatcatttttgcgtcggaaagtgaggagctatggaggagaagagatttcagaagaatgacagcgggtttgtctgccggaactgcgggtttgaggtggagccgctcgggactacttcgcgggatcattgtccgaggtgtctgtgttcgatacacattgatataaatcccggggacagggcgaatgagtgccttggtacgctgagaccggtgcaggtgctgccggacccgaagaagggttatataatcgtgtataagtgtgataagtgcggcgccgtcgtgcgcaataaagcggcgtacccggcaaaggtccagccggacgacatagatttgcttataaaattgacggtagcccgtgattgaaaactcccccgctcatatggtattatcccatgtgagcgggggagccttttttgaagtttacgggagggaggaggtgcaggaggagggaggacgcttttcaaagcgtcctccctcctcctgcgttattcttctttgacgatcttgccgttttcgaaagtaccttcatagactcttccgctcggccaggtgtatttgcctttaccggacattttgttgtctacgaatgagccttcgtagaattcgccgtttgcccaggtgtatttgccttcgccggtgcggacgtcggctttgaagtcgccggtgtagacgtcaccgttggcgaatgtgtaggtgcctttgccttctttgagttcgtttacataggtgccttcgtaggaggagccgtctgcccaggtgtatttgccttcgccgtttttcatgtcgtttgtgtagctgccggtgtaggaggagccgtcgacccagttgtaggtgccggtgccgtcctttttgccgtcaactaaggtgccttcgtagacgtcgccgttggcgaaggagtatttgcctgtgccggtgagtttgtcgtttacgaattcgccttcgtagacgtcgccggaggcgtatatgattttgccggttccgttctttttgaggtcggatatgccgccttcgtagatgtcgccgtttgagtagactatggagtttttctgcatatcgacttcggcggtcatgccgtctgagtagtagagcttgccggtgaggagggtgccgtccttgtcgactctgccgaagtatttgattgtaaggccgtcttcggtgttgctggttatgtaccgtatgcccgagaagtatattccggcggcgatcacgccgaccgttacggcggcgattattaggatcgtcaggaatattgacagggcactgcggtgtctgcggactcgccgcggtggggttttgtagtccatgttttcaagaccattccttttgcagactttgttttgtcagagtatcctgcttgacggagtcacgtctgagatgaagttggttagcatctggataaggttcgggatgacaaagaaggatatcagaacaacgacgagaaacgcgagcacggacagaactatcgagagaaggctggtgccggagttgccgtagattacttccgcgcggtgtatgttctcgtcggggatgtagaatttgccggacgagacgtttttctgacagcgttcctcgggggtgtcgcccaccatgtagacgattcgtctgagtgtgccgctctgcctgagagcgaacttcacaaacgggttggcgcatccggcttcggcgacggttattgcgccgccttcgctgtacgcgcctttttcgatgaggcgtcttatcagtgagccgagcacgaaacggttgtagaccgtgatgatgatcccgatgatgaagccgatatagagcgaccatatgattatgttgagagttgttatcggattgtctccaagcgtaactttttcgccgcagattttgcttatgtcattccacagcgccgagaaaaattcccctaaaaatcccatcggaaacctccttcgtcaatggttggaccgcgtcgcctacgcaaagcatggtgacgcgattccgggaaaagttcgtgtaactcgaatcagacaggacggatgacgtcgatgccgccgagatatttgcggagcacttccggaacgacgacgctgccgtccgcctgctggttctgctcgaccatcgccgggaagatacgggaagtcgcgagaccggaaccgttcagggtgtggacaaactccgtcttgccggtcgaggctctcttgaagcggatctgtccgcggcgcgcctgataatcacgcgcgttcgagacggacgagacttccttgtagccgttcatggacgggatctggatctcgatatcataggtgcgcgccatcgaagccgagcagtcgcccgccgcgagcttgaccgtgcggaagtggaagccgagacccttgacgaggttctccgccttggtgacgagttcctcgaacgccgcgtcggaatcctccgggcgggtgaactggaacatctcgaccttgttgaactggtgtccgcggaccattccgcgctcatcggagcggtaggaaccagcctcgcgtctgaagcacggcgtgtaagcgaagaatttcttcggcagatcagcctcgttcagaacctcgtttctgtaaaggctcgcgagcgcagcctccgctgtcgggagcatatagtgtacacggtcgtcggtcgggttctcaatcttatagacttcgtcggcgaacttcgggaactgtccggcggtcagaccgcactcatactcaagcatatgcggcggaagaatgaattcgtagccgtcggcaagatggcagtcgatgaagtagttgagaagagcccactcaaggcgcgcgcccatgcccttgtagatccagaaaccgcttccggcgagcttcgttccgcggtcatagtcgatgagaccgagatcggtgcagaggtcgacgtgatgcttcggcgggaaatcgaacttgtgcggctcgccgaagtagcgtatcggctcgttgttctccttctcgcccggcttgaggtcgggatcgggaaggttcggcagagcgagcatgagattcatatattcggtctcgatgtcgcgcagcttgaggtcgtttgccttcgccttgtcggagagctccttcatctcggcgaagatcggcgcgacgtccttgccttccttcttgagcttcggaatctccttcgagaccttgttctgctcagccttgagggcttcggtctccgcgatcatcgcgcggcgctgaccgtcgagctcgaggatgcgggcgatgtcctcgcgcgcgtccttgcccttgcgggcgagtctttcgatgacgtcttcgggattttccttgatatatttgatgtcaagcattttttcgtacttcctttatacaagattgtttttatttgtcctcgagggcttcagagcatccgagaagacggatcagttcttcaagctcgtctgagtttttataggatatggaaatggatctgcggcgcttcgaacgtgagatccgcaccttgtgcccgagcgactccgtgagcttctgctcgagcgatgaataatagctgtcggcgacaggatcgttctttttcggctcaggttttgagttaagcttctttatgagctcttccgccgcccttactgagagctcatggtcgactatggttttcgcggcgtccggtatcaaggtcttgtcgttaagtccgagaagagcgcgcgcgtgccccgcggagagcgacttgtgcccgacgagagatatgacctcgtccggcagctcgagcagtcgcagcgcgtttgctatcgccgcgcggctctttcccacgcgttttgccgcctgctcctgcgtcaggttgtagtcttcgatcagcgatttgagaccttccgcttcttcaatcggattcaggtcctcacgctgtatgttctctacgagggcgtattcggcggctttcctgtcgtcggcgtcgattatgacgaccggcacttcggacagccccgccatgcgcgcggctctccaccggcgctcgccggcgactatcgagtagagtgccgggttttccgacgggcggacgattatcggctggatgagtccgttcgcggcgattgagtccgcgagggacgagagcgattccgggtcgaaagtctttctcggctggtcccgccgcggttctatgtcggataccgcgagcttgtctgttcgttcgggagagtcaggagtgttgtctatgaagatcgcgtccattcctcttccgagcgcctgtttctttggcatttggttcactccggaaatttttttgtctgcgggcttcgggggctcagagcgtccgctcgagtatctccttcgcgacgtcgttgtaagcgcgcgcgccctttgagtatttgtcgtaataaatgatcggttcgccgtagctcggcgcctcggacagcttcacgttccgcacgatgccggtcgcgaacagcttgtcggcgtagtacttcttgatctcctcgagcacctgcgcggacagattgagccgcccgttatacatcgtgatgagtattccggtgatctcgagacccgggttgtagagacgcttcacgttgcgtatcgagagcatgagctgcgagagcccttcgagcgagtagaactcgcactgcatcggtataatgacgccgctgctcgccgcgagcgcgtttatcgagagtatgccgagggacggcggacagtcgatgaatatgtagtcataatcgtccgctatctccgcgagcgcgtttttcagtatgagctcacgcttttccatatcgatgagctcaaattccgcgccggcgagggctatctgggacggtatcgcgaaaaggttggcgaacccggtgtccacaaccgcttcggacgcctttgcgcggccgatgacgacatcgtatgaggagagctttactcctctcttctgtatgccgactccgctcgtcgcgttgccctgcgggtcgagatcgacgaggagcgttttcttgccgagagcgccgacggccgcggcacagttgacggctgaggttgttttgccgacgccgcccttctggtttgcgagtgagatgatataagccatgcgacactccgtttgatggtatttaatgttacaaaagtaaagctgatacgcgttatatgcgtcgacgatacttgtacacataatattataccaagaaacttgtcaaatgtcaatcccttttttgtgaataaccggctcaaaccgcatttttatacgacttttttcagaaaatcagccgtgagtgccatgtttcacgtgaaacaactctatgcgacacgtttcacgtgaaacatatctatctgttgggtatccgtataatgacctctaccccgccctctacctcgttgcgttcgctcgacaccgcgatgcccgcctgtcttacaagcgcgaccgccttatctatcgaattgtagaatatgcggatgtccttgagcacgatttttcgcggcgagcgctgacggcgggacgagtcggattcggcgagcagtctttctatgtacgcttctgtcgtcgcgacattcagctgatgggcgtttatatagtcgattatccgcaggcgctgttcgaccgagtcgatcttgagcagtgcgcgtgcatggcgctcagtcagattgtaggcgagaatcttttcccgttccggcgcggtgagccggagtatgcgcagcttgttcgccacgaacgactgcgacattgagagctgtcttgcgacttcctcctgagtgagatcgtaaatgtcgatgagcgcggcgatcgagcttgcctgttcgaatatattgaggttttcacgctgtatgttctcgatgatggcgagctccgccgatttgcggctgtcgacgtcgactattatacacggaacggtccggagactgagaagcttcgcggcgcggagacgtctctcccccgcgacgacctccattcgctgttctccgagcgggagaagctcgtcctcttccattctgcgcacggtgagcggctggagaattccgtattgccttatgctgtctgcgaggcgtatgattgactcgtcctcgaactgacggcggggctgagacgggttcggaactatgcgttcgatcggaatgttgtggatgcgtccgtattcgtcggctttccgctgttttatgtcggcggcggtcttttcggctttcagagcggattccttttcggcgagctcctgccagcgtttgtcgagcttttcccgctcggcggcgagttcctttttcgggcttttgaagatgttcagcgcggtcatttttatcgtcctttctgttttgtcccctgatttccggggaattattttctcgggaaacattggctatgtgtttccctggaaatatcctgcccgataatgatatcacagataaggcgagaagcggcgcgatttttgagcatcgttttttcgcgcggcttgtcgaccgaccggaaaatcctgcgaagtatattccgcgcgaaaaaaagaaagccgctcagagcggctttttcgtgatttgtgaattattgcgcggatagttgtccggcgtgttctttacttttgagacgatgacgaatacgcgcgggagatgttcgtcaccggcgtccagtgtgaagtcgatgactttcgcggtttttccgccgagcttcgatatcgcgttttccgcttcctgaacctcatccgccgcgtgggccttcatcgctatgaatattccgctctttttgacgtagggaacgcagagctcagacagcacgttgagtctcgcgacggctctcgcgaccgcaacgtcgtacttttcgcggtaatccgggtcgtgtgagagttcctccgccctcgcggagatggcggtcaggtttccgagcctgagcatcgccgctgtctcgtttatatagttgatgcgtttcgctgtcgagtcgagagcggttatcctcaggtccggtctcgcgatggcgagcggaagtgacgggaaccctgccccgcagccgatgtcgatgatcttcgagccttccggaatatgctcagagaccgcgagcgagtcgacatagtgcttgacgattatcccgtccgtgtccgtgatcgcggtcaggttcatgtgcgcgttcacctcgagcatacggtctgtcagagcttcaaagcgtccggcgagcttttcatcggcgaatttttcaagaccgtttctgcacatggctgtgaggaatttttctgtgaattcagacattgtggtctcctttcacgcgaagtgtatgagcagcaccgagatgtccgcgggagataccccgcttatccgcgacgcctgccctatcgtgagcggctgtatgcggttcagcttctgcaccgcctcgatgcgtatcccgccgatcgtcgcgtaatcgaacggcgacgggagtttcttttcctcaagcttcttcatacgcgcgacctcggcgagctgacgctttatatatcccgcgtacttgatcttcgtttccgcctgaagtctgacgcgcggcggaagctccggacggcttttatcgacgaccgcgagcttgtcgtagttcagctccggacggcggagcaggtcggcgagacggacgccggttgtgactttcgtcgagccgttttcctcgagaagtctgtcgagctcgtctgacggtgataccgaggtctcttcaaggcgtctgacttccctttcgacctcggcgatctcttctttgaatctttcccagcgctcgtctgtgataagcccgacgcggcgaccgatcggggtcagacgctccgcggcgttgtcctgacgcaggaggagtctgtactcggagcgtgaggtcatgatccggtacggttctttcgtacctttcgtgacgaggtcgtctatcaaggttccgatatatgagctctcgcgcgggagaatcatcggttcttcgcctttaatcttcagcgcggcgtttattccggcgacgatgccctgcgcggcggcttcctcgtatccggagcttccgttgaactgaccggcgccgtagagtccgctgatcgacttgaactcaagcgtcggatagagctgtgtcgggtcgacgcagtcgtattcgatggcgtaagcggtgcgcattatctcggcgtgctcgaagccctcaagactgtgaagcatctcgacctgcacctcttccggcagagaagaggagaagccctgtatatacatctcgtcggtaccggtccccatcggctcgatgaagagctggtgccgctccttgtccgcgaagcgcatgactttgtcctcgatactcgggcagtagcggggacctattccctcgatcattcccgaatagagcggtgagcgggacatattcgcccggatgatgtcatgggtgtgtttgttcgtgtagacgatgtggcatgggatctgttcgcgtcggttcagctcttccctgtcgctgtcgaccgagaaaggatcgatgtccttgtctccgggctgtacctcgaggtgtgagaaatctatggagcggcggtgtactctcgccggagtgccggtcttgaagcgcatcagccgtattccctcgcgcacaagattcccagagagctccgtcgccgggagcataccgtccggaccggaggaatacgcgacctcgccgacgatgactctgcctcggaggtaagttccggagcagatcacggcggcgttgcagcgccatct

SEQ ID NO: 503 - DNA, 7072 bp, Unknown
  16S sequences of unknown bacteria
gcctcggtgacggcgaatctgcgcttcatggtgcatcagcccatggaggattccctggagaagctgcaccgcatcgccgccaggttcgacgtggagatggaggtgctggaggcgcacgattgttccccggtggtggacacccaatccgccgcctatcggtatgtggagtcctgcgtccgcaaggtgttccccgaggccggggtggcgccctatgtcatgcttggcggcaccgatgcccggcattacgcgccctatgccacggcggtgcgcttcgccccgctggtgatcagcggcgcgcagatggccgccgtccatggccgggatgaaaacatcgacacggcggccctttccggcgctgtgggcttttatcgctatgttttggagcattatccccaataaaatcgaaatgcagggaggaatgagtgaagatggacagtcaatggaaagaggcgctgcaaaatccgcccaaggcttaccgaccggtgcccttctggtcctggaacgaccggctggaaaccgaggaaacccgctggcagatcgctgaaatggacaaggaggggatgggcggctttttcatgcacgcacgcggaggacttgagacggaatacctctccgacgactggttcaactgcgtaaacgtctgcattgacgaggcgaaaaagctcggtatggaagcatggtcatacgacgaaaacggctggccgagtggattcgcgggaggaaaactccttgaagacaaggctaactttgccgtctgcattcgtcatgagactaccgagaaattccccgagcccgaccccgacaccattgccgtttacacaagaaacgaggacggcacgttcaacattgtagacaaggactgcggtgcgaaggaatatctccgtctctacaaaggctacgactcaagctatgttgacacgctcgacggcagcattacggaaaagttcatcaaggaaactcacgaggtctatctcaagagaataccgaaagaggacgcaggaactgttatgcccggattcttcacggacgagccgcagtactatcgctgggacaacccctactcaaacactctccccgctgaattcaaaaaagcatacggctacgagatttatcccctccttccggcagtgttctatgactttgaaggcgcggagaagttccgttacgactactacaagctgatgcatgagctgttcataaacaacttcgttaagaagatatacgactggtgcagcgctcacggaatgcagctcacaggtcacgcgatcgaagaatcctcgctcgaaggtcagatgatgtgctgcggcggaattatgcccttctatgaatacgagcacattccgggaatcgactacctcggacgcggaattgccgacgacattgcaccgaagcagctcggttcagtctgcgaacagctcggcaagaagaaagctatctccgaaatgttcgcctgctgcggatgggacgttactccgacagaattgaagagaatcgccgatgtacagtacgcaaacggagtcaacctcatgtgcgctcacctcgctccttattccgaaagaggtcagagaaagcgcgactatcctaaccactactccttccacaatccttggcagagccaccttgcgcagtttgacgaatacttcaacaacctcggctccgctctcacagagggaaaggaatacgctcccgtgcttgttatacacccgatacacggcgcgtatatgaagtacaagaagaatcagggcacgctcggcgaaatcgaaggcaagttctttgagctgtcccgcctgctcggatataatcaggttccgtaccactatggcgacgagaacatgatgaagacccacgcgtctgtcgaaaacggcaagattaaggtaggtaactgcacatacgacgcggttattgtgcctttcacatacacacttgacaacagcactgcggaactgctcaaaaagctcatcgcggacggcggcaaggtatggtgcttcggtcatcccgactgcattgacggcgaaaaggctgacatgacatggcttcgcgacacctgcacgaaggaagacatattcgctctccgtgacgctgtaataactctcgaaaacggtcagaacgctccgcagatacgcaaaatgacgcgcgttaccgatgaaggcaagctcatctacataacaaacgtaacaggcgagacacttgacagcgttcatgtaaagcttgacaagtcatacctaatgcacggcggcattgcagagcttgaccccgaaactcttgagctttcccccgtatgcggcaagacaacagaggacggagcggagcttatactgaactttgaagagggacagagctatcttctcgttcccgctgacctgcccttcaccacagaaaacgtcattcccgacactattcctactatagagctgccctccgtcatgaagatagcggaaaaacccgtgaacatgataaaccttgacactgctgagctttccaccgacggcgtgaactttgacgagccgctttccgtcatgggcatcaaggacaacctcctccgtgaaaggtacgacggcgacctctggctcaggttcacgtttgacgcatccgccgaatacatcaaatccgccgaaaacctccgcatttccgttgagcctatgaacgtaaaggaagtacgcatcaacggcagtgaggtttatgaaatccccggcgcatggtggttcgacaagaagttcacggtttatgacattcttccctacacaaaggaaggcaggaacgaaatcacgataaagctccaccactggcagagagactacgtttactatgtcctctacggcggagtttccgagtcactgcgcaactgccttgtattcgactgcgaggttgaagatatctatcttctcggcgacttctgcgtaaagtgcgacggcaagttcaccgatggcgagagaagaagcgtactcttcgacggcaagttctcactcgaaccccagcgcgacgagattcacatctccgacatcgtaacagacggctatccgttctacgcgggtcacttcaagtcctcgttcgtatataactacagcgagggtatgcctaccgtactgaagctcacaggcagatacgcggtatgcgacgtcactgtaaacggaagcgaagccggcactctcatgttctcgaactacctcgacatttccgaccacctcagagaaggcaagaacgagattatcctgaatatgtgcaactccaaccgcaacctcatgggacctcatcaccgtcacgaccccgaaccctacgccctcggtccgaacacgttctcatacgaaaaggaatggaacggcagagaatgcggcggttatgtcgaaagatacgcctttgtaagatacggctttgacgtaaaataagacaaaataaaatacggtttatctcaaaatcacacgacaagagataaaccgttattttttgttttgctttacttaagcgagagcttttccgagagccttgcaggatgcctgtgcgtcgtcgtcgggagcttcgttgcagataacgctttcgcacgcaagaaccgcaccgtcgcctacacagcgttcttcccagtttctcatccattcgccgtcgccccagccgtaagagccgaagagtgcgatcttcttgccggagagtgcagcttcacacgcgctgaacataggctcgaattcatcctcttcaagaacctcggagcccattgcgggacagccaaatgcgattgcgtcaaaggatgctgccatggatgcgtcaaattcgggaggtgtgagaagtgttccctccgctcctgcttccttaacgccttcgagaaccgattctgccatagcctctgtgtttcctgttccgctccaataaactattgctaccttgctcattttctttgccaacctttcttcgtcttatatattacaaccgtcggactatccttttacggtcagtctttcgatggtctttccgtttttccactgctcacagtatactttcgtacacttcttgtatttgttaaacaaaagctcggcggaatgcacgtctccgtaaaccttccagaagccggacattttgcactcgtgcgagttttcgataaatccttcaacgtcctccggcggatatccgaggaacagtcctatttcatgtggaaattctccgccctctctcagcagcttcataagtcttgtgacgcacattcccggcttttcgcactgataaccgcgcttttcgagaatatcacgcgccgcttcgtttttgatatcatcctcaagctttttcgggcggtatacgtagagaagcactctgttttcgttggctctcatcggaagcacgcgtattccctttgacgcaagcctttggttaagactgcgaacggtgtcttttatctcattcttctccgaatacggcgcattgaacaggcttccggttttcattcccgcgagagtcggtgaacaatgccgcagaaacagctcctcagacatctcagttagctcctacgtgttcgtccagtacgttcttcagcgcagccatcgagcttccgtgacatcttgcaaccttcgtaccgtttccgatatcgttcagcgcgcacttgaccattttgtgcgacattgtgtttgtcagaagaataagaagatcggggcttcccatgtttcttattccgttcgtcattttcggataacactttgctttgcagcggtattctttgcagaggtccgtgtatcttctcaccatgcattcatttccgcctataattacgacactcactttgtcgcctccttattaagtattggttagcagctgctaactacagattttaaaaaatatgtaattcccgagattttatattaaaaataattctcttctcttgattacggtattattttatcaaaaaatcggagcttgctccactccgaaaaggcggaacaatactccgattggatatttattatttagtcaggtatgtcggcgttgcggtattcgttcggggtcatgcctatgacatttttgaacgcactggcgaatttgctcgcgttgtcgtagccgaagcatcccgcgatatcaatgacgctgcgtttggtatgtcttagcattagcgctgcggagtgcattttctgcgttcggatgtacgaatataccgaaactccgtagactcccttgaacgaatttttaatctgcgtgccagatatatggaaaatgtccgatatctgcgcgagagtaattctgtcgtccatgtgctcggtgaggtatttgcacacgcttttcgcaagctccgtttggctctgtgagtaggcttttatctcggcagtttcgttctccggctccattccgctgaggtagagaagaagctcgagaatcttcaccttgaagtagcctttttttatgctctcgggaacggaatacagctccgagaagatatgcgcaatatacggcttcgagcgcgctatgtagcatccgtcctcaccgcagaattttttactcagctcatccggcgcaacctcaacatcggcaagcaggcacgagagacatttcgtcgcgtgttccgtgtcaatgagtatagtgataccgtggtagtggctgagcggaaaatacgacgagcgacccgtggttttcttccgcgctatcgaaaagtctccgggtgcaaggtagaagaactcatccctcagctcgcactccattcttccctctctgcaatggtttatctcgaggatagtatctgaaacggtgcgctcaatctgtccggacggcaggtgcacgtcattgtacgcgagagtaactcccgggagaacggaatagcttgtgattaccgcctcgccgttgtcgttttcgtacctccagacctcgcaccagccgtcgtcggaaatcagcttagcgtcgttgccgtagatttgcttgtgttttgtttgcagttcactcatagcttcttgcactcgacataggtcagcgggaatgaggctttgataatttcgcttttcactgccgcaagaccgtttttctttaaaaattcaaggtaatcgtccggcgaccatttactgtgaagcggaaaaccgaacagcttcatcgctccggctttaattttaccgaatatgcccatttttgcgtgagtgaacgtcggcgcgatgagaatgccgtcctttgacatcacgcgctttatctcggcgagagctttttccggctccggtattatgtgcagcacgttcgacgcgattattacatcaaagctgccgtcggcgtagggcaagttgaaaatatcctgcacggagaaatacagcttcgaggactgtccgagacgtttcgcttcctctatcatttcgtaggagctgtcggtcgcctcaaccatctttgcgtcgctgacaatgttccgcgctatcattcccgtaccggcagcaagctcgaggactacctttccgcgaactacgggacggatgagggtgtacattttctcgtatgcacgctcgtcctttttcatgaagctctcgtatatgccggcgtattttgaccagaacgatttcttctcgccgcttgcagagcagttctcttccgatttgattactctaaacagtgtactttttattatcagcagaactcctgcgagcaaaattaccgccaatattgacaaaacagcgtatttcatacattatgcttctccgcgagcttttcgaggtcttcttcgctcatttcggatatgagatagcacgccgcgccgcctatatcctctatcccggggaaattctcgcgcaggacggacgatatcacggagtagtatctgttgaagctcactgcggcttcacgtccttctttggtaaaatacgcaagaccgttttcgtccttcgacacatatccgaattcaatgaaggtctttatcatattgtggacgctcgacttggcgattccgagagatcccgcaagatcggtacagcgtatgcctcgtccgtcctcccccatcgcgctcatcgtaagcagatacctgagctgtgacggagttaatactttaggctcaatcatgtcttctcctttaagaaataaggagacgcagtgcaattaccacgcctcccatttcatattccttagtgtttgtggcagg

SEQ ID NO: 504 - DNA, 18540 bp, Unknown
  16S sequences of unknown bacteria
cagccagtgcgctgttctctggtctgcaggtcagtgcgacgtattgcatcggcggcgccatcgtgggcgaatggctcagcgcggccgccgggctgggctattatatgatccgggtgaagaacggctatatgttagacaaggtatttgcctgcgtggtggtcatcatcgtgctcagcctgctgctgaatctggccatgaagctgctggaacggatcattttcccgcatgttcagcgaaggaggaacaaggaatgaagaaaagatggaaagtattatgctgcgccttgctggcaggcagcctgtgcgcctgcggctctgcaggagatgaaggggaggatcgcgaagtgaccctgatcctcgactatgtgcccaacaccaatcacaccgggatctatgtcgctcaggaaaagggctattttgaagaggaaggcatcaccctcaatatcgtggagccgggcaacgatcagacaagcgctacgctggtcggcgccggacgcggagagttcggcgtatcttatcaggaagatgtgacgtatgcgagaacggcggaggatccgctgccgatccgcgcgatcgccacggtcatcaagcacaacacttccggcttcgtcagcgccgcatccaaggacatcaacagcccggcagactttgaaggaaaggtgtatgccggatggcagtcgcccagtgaggaggcggtcatccgtgcctgcatgaccaaggccggcgccgatccggacaagatcaccatcgtcggcgacagcggagacggctttgcatcgctggaaggcgatgtcgacatcaaatggttctttgagggctgggacaacgtcaaggcggagatggctggctttgagctgaactacatgccgctgaatgaatacgacgagcgtctggattactatacgccggtgctgatcgcgagcgaggacgtcatcgaaaacgatccggagctggtcagatccttcctgcgcgccgtgaagaaaggctatcagttcgccatcgacaatccggatgaatccgcggagatcctctctgaatatgtgccggactatgacatcgaattcctgaagaaatcacaggccttcttatccgcaaactatactgacgacaaagaaaactggggcgtgatggaagatgccgtgtgggacaactacactgacttcatggtggaatatggcctgatcgatgagccgatcgcagccagcgagcagtacaccaacgagttcatcacggatctggactaggagcgctcatgaaactggcagtagagaagctggaggccggctatcaggggaaaacggtcgtgaaggatgtctcgttcacggtggaaaaaggggaattcatctcattgatcggaccgagcggctgcggcaagtccaccgtgctcaaggtgctggccggactgctggagccgatggcagggacgatcatggtggatgatgcgccgctgcagggcggcagccgtcatttttcctacatgccgcagagcgatctgctgctggactggtatgacattctggacaatgtctgcctgtatggaaagatccatgggaagaagaaagaggcgcagcagcaggcgctggaaaacctgaaggaattcggcttggccggctatgagcacgcctatccttcacagctctccggcggcatgcggcagcgtgcggcattcctgcgcaccgcactgtgtgacagtgatatcctgctgctcgatgagcctttcggcgcgctggatgtcatcaccagggaagatatgcaagactggctgaaccggatgcgtcagcggttggaccgcacgaccttgctggtcacccatgacatcgatgaggccatctatctctcggaccgcatcctcatcctgggacagcgccctgcgacgatcacgcggatcgtcgatgtgcgccatccgcacaaggaccgtgcttggctgtatgcacagggcgagctgcgcgccgccatccatcaggagctttcccatgaggtgctgtgacgcacatgcccatctggatccgcgcctaaagcgcttgcttgatccggaccatcatgtgatgatcagctgcacgagcagggaggagcatgcgcatgcacgaagcctgttcagtccttctgtgcgcatcagctgcggcgtccatccctggaatgccgatcagatcagcgtggatgagctgatcccctgcatgaaggaagctgattttatcggagagatcggcatggatagcgtctggtgcgatgtcccgcacgatgtgcagcgcagcgtctttcgccgtcagctgcggctggcaaaggaatggcgcaagccggtgatcctgcacaccaagggcatggagcacgagatcctgcaggagatccaggcctgtcccaacgattatgtggtgcactggtattcctgcgcgcatgatatggaggagtacatcgcccttggctgcgcgtttacgtttgccctgtcgctggagagcgatgagcatgagcgacgcttggctgccatggtcccgctggagcgtatcctggtggagagcgacggcatctctgccatggaatgggtaaaggggcgtcccatccgcgatgcggaatatgaagcgggcctgcggcagatcgaagcgctgctcgccgagatccgcgggctttctcctgaagccatgcatgaacagatctgcgcgaattaccggcgcatcatcttacgttaaacggacagcatcgcctgtccgtttttcgctcagaaagcgaggtgagaagatgaacatcgaattgaagccgtgggccatggatgaccttcatgatctggtgcggctgtgcaatgcggcagaccgcacatatctttccggccgcatgccttttccttatacggaaagcgacgcacggtggtggctgaacatggtcaaggagaaagaagggaaggacggcgtcttccggcgcatctgcgtggagggaaagacagcgggaaacatctccgtggaacgcaaggacgatgtgttctgccatgacgcagagcttggctatgtgctggatcgtccgtactggtcgaagggcatcatgcgcgaagcggtgcgcatgatcacggccgaggccatggagacgctggcgctggcccgcatcagcgcccaggtgtattcgcccaatatcgcttcacgccgggtgctggagcacaacggctttcaacaggaagggctgctgcctcaggccgtgtggaaagatggcacgacctacgatctgatcctgtatggcatattgcgggatcctgggaaaaaagattgacaatctgcggactctgcaatagtattgatatgtgtcttgacatctatcaatataagggggattttccatgagtcagtcaaaacgaaagatacagatgatgagcatcactgccatgctcatcgccgttggcgtgctcatcccgatgtattcgccggtgaagatcatgctggagccgatgtcgtttacgctgggttcgcacatcgcgatcatgatcgccatgttcgtttctccgctcagcgcgctgggcgttgcgctgggcacgacggcaggcttctacctggccggattcacgctgccggtggtgctgcgcgcgctcacccatgtcgtctgggcctatgccggcgcgctgtatctgaagaagcatccggatctgtttcagtcgcctgcgaagacctttgtcttcaatctcgcggtagcgatcgtccatgccgtgctggaagtgatcatcgtcatgccgttatataccggctatgatgcttcgcagctgttttatctgctgttcgtgctggtcggcgtcggctctgtggtgcacagcaccgtggatttcgtgctttccttagctgtgtggaaggccgtgacggccagcgctgcgatccgtgcggtcgcagtgatcaagcatatcggattcagcgaaagccggaaatagcactgacagaaataaaaaaaactgccggcagatcctgcctgcagcctgaagggaccagagggtcccttttgtcgttgatccactcacgctgcattcatctccatgtcgatcaagagcagttcgccttccagccttgcctggatatggatgtccatctgcgcgcacagctcgctgacgatggccatgcccagaccgctgccgccgcgctgtctggcacgatctccttgataaaagcgctggaagatgcggctgacatcgatctgtgcaggatcggcatggttggaaaacgtgcagtgcaccctgtctttttcctgacggatgacgatcgtgaacggtgcgcttccatatcgcagcgtattgatgatcagattctggaatatccgtttcatggcatcgggatccatcatgatggcggcatcttctgctgagcatcgaagaacaggatcgagcccttgttcatgcagctgcgcatagtaggacagcagcgtatcacacagcagcggataaagcggcatccgctgcagcgtcagcgcttcctgatcggcttgcagcctggtgtactcgaagaaagaatccagcatttcctccatgtcgttgagacgggaagagatgatctgcagatagcgggggatatcttgttcttcggcatggctcagcatttcgatatagccgctgatgctggtgagcggggtacggatatcgtgggagatgcaggagatcatctccttcatttcctgatccttgcgctgctgttcccgccgcatctgcatgacctcatcacgctgttcttcgaccatctccacgatatggcgcagggcaggcagagaatcaggcagggaaagcttcatggcactcttttctttttggatatattcgatctgtcgttcaccggtgcgcacatcgctgcgcagacgcagatacaggaaggacaggaggagaaaaaggatggtaatgataatgcagtaaatgatcatgatgttcctccgagatgaaaaggaagccggcacgccggtttcctttattttacaagtctttttttctcaggacaagcagatcggcgcagaatgccaggatcgtcaaaagaccgatgatcccgaacagctgcagatacgggccgctttctgcagtgagcggcagcgcgccggacagatagtaaggaagatatttgctgcagtcgatctcgaagtatgtgccggctgcgctcaacaggaggaagatggcgccgaaactgtaaaacatcatgaacaggatgggcaggacctttccgccgatgatgtggatgagcagcgagaggatcagcgcgatcatctctgcgcatagcagctgagccagcaggaagagcagatagtccggcaggatgagcgtgccggtgcggccagcgatcgcgcaaagccagaaggatgaccataagacgccgatcaggatatacaggctccagatcgctgcgaaggtcatgatcctggcgaagatcagcttttctttgcgctggaagaacgggtagatgctcttgacatagcggctctggtattcctcgctcagaaagaggatgtaggccagaaagacgaaaaagaggaagatggcgttcttgggcaggaaggcgagaaaatcagccagtgtggaagtccgcccatcaaaggatgcaaatgaagtattgctgacgatgacaccttctgttgagacaagcaggatggtcatgagcgtataaagcagggtgagcacgaagaagaaacgagaatgcagcagtcggtagacatcgctcttaaacagattccacatctcgttcacctccattcttgtggaaaaaatattgttccagggactgatgatgccaggagcattccaggatcggcacatcgtgcttcaccagcagcgcgatcagcgctgcgctgtccgtctcttcagtgatctggatgtcgctgcgattcaagatccggtaattgcggatgtgcagcagttcttccagacagacggctgcctgtctgctgtcggcggtgcgtaacagcaggtagtccttgcttttgtcttccagctctgccctgctcaattgttccacgatccttccgtttttcatgaagccgtaggaggtggccagcttgctcagttcctccagctgatgcgaactgatgaagatggtcttgccttgttcgcggttcagccggatgagcaggctgcgtatggcttcgaaccctctgggatcgatgccgttggatggctcatccaggatgagcagatcaggatcgccgatcagggtcatggcgatggccagacgctgcttcatgcctaaggaaaaggcgcttacacgtttgttccctgtattgccgatgtcgcagagatcgaggatgccctgcagttcacggtcctttgccacgcccatggccagtgcttttgccttcatgttctcaaaggcggaaagcgttggaagcagccccggctcctcgatcagcgcgccgatgcggtgatacagaaagtcatctgcttccggcacgtttcccaataaggagaagctgccggatgtcggatggatcaatccggcgagcatcttcatcagcgtgctctttccagcgccgttttctccgaccaggccgaagatctctccgcgcgggatattcagcgtgacatcatcgaccgcgcgtgtcttgcggtaagtcttgctgagtgcatgtgtagtgatcgcataggtttgcatatgatctctcccttcgcctttactataggagttgaatattcagaaaccgcaaagaaaaaggaaagaaagtgtaaagatcttaccttccttcctgattcagccggaatccgatcccccagacggtctcgatcaagtctttcctgccgcattttccgcggatattgctgatgtggaccgcgacggtcttgtcgtcggccgcaaagacgtcttcccaggcatattcatagatctcgcgtttggaaaacgcacgcccggggctttgcatgagcagctccatgatgcggtattcatggcgggtgagggtgatccgccgatcttcgatcatcaaggtgcgctgatcatccagcagggacagcgtgccgcagcgcagggtggtgtcaacggggcggtgcccgcgccgtctcagctgggcgcgtatgcgtgcttccagttcctccagggagaacggcttggtcatataatcgtcggcgccggccttgagcagatcgaccttatgctgtacgctgccttttgcggaaacgacgatgaccggcacatcatgtgccttgcggatctcatgcaggacctcgctgccgtctgcgcctggaagcatcagatccatcaggatgaggtcggggcatgcctgtcggatatgcaaaagcgcttcggtgccggaatacgcatcctcacagcgaaacccgcgtttttccagatattcgtgcatcatcatgtggatggtgctgtcatcttccacgatcaatatcgtatgcatagcatcccttctttcccgtgatgcttttattataccggaaatgacgggaaaaagaagaggtcatgcaagacagctttccctatgtgcacatcgcctctctttgcttgtcttctttctctgatttttttatcatggagatacgggagggataggcatgaagatcaggctgctgtgccgcagggaaaaggaacgacagtatatggaggagctgcgcaggggcgatgtggaattcgcggatccggcggatctgctcctcatggaaccggaattccacctggatgtgctgaaggtgcgggatgcgcgcggcatgcatctggtgaagatcgatgagatccgctatgtggaaagcctggacaatcagatctatgtccatgcgaagagcggtgtctttacgatgaaggatacgctgtatcacctggaggcagtgctgtatccggccggctttctgcgggtgcacaagtcattcatcgtcagccgtgcgcacatccgctccatccatgcatcgctgaacatgaagtttacgctggtgctggacaatggggaaaagctggaagtatccagaagctattattaccggttcaaggaagagatcgggttctgaggagggagaccatgaatgaaatgatcgctttggccgcagggctgctgctggcaggcttcgtcctttatgcggcatataaacgggcatatgaacggcagatcggcagggccctgcatggccggcctgtccgcgtgcatctgccagagatgaggacggtgatgcgggcctatctgatgctgtgtgtgatcctgggatcggcgtttgtgatcgtgaagaccgatgagcattacgatgcggcacgctatgcctgcgctggagaagagggcgatcaaggcgtgttcaccgcagaggagatccgcgcgaagatcgcgtcgtactatgaagagaatgagggaacggtcacgatgcgcaccgatcgggatgatccgtatctggacctcatcgtgctgcagaatgaggaaaatgacgcgtatatgatgatcctgcaggccaatgatcagatgaaggtggaggatgatcatgtgtaccgcatcgtgctgggcgatgaagcgctcgactatacctggacgttttggggcagcgagctgggtgaaggcttcgggatcgtcgtgaacaggacggtgcatgagcgccgctgcaatgtgctggaacagcagctgcggatcatggaatatggcagcgatccggaagatgtctatgtcgatcacacggtcacggtcagtgcggaaagagaggtggatcagcgatgaagaaagcgatcatgatgctttgcctgatgctgctttgcggctgtgcacatgcacctttgcagctggaaggagtgccggtattgtccgtcgtcgctgtgcccgatgatgcgcaggagctggtggaaacggtgttcttccgcagcgatcaaaaggtggacgccgcgcaggtgagcgcgctggaaggcttgaagggggaacatctgggcacgccggccgtgcataccgtttcgctgcaggaggtggaggatgagacgcaggacggccatctgtatatggtcagcttctatgtcaatacattgccggacacagcggcgtcttattcgtttgacggcgtctggctgaaggtgaatgcctcctccacgaaaacagcgctgtatgttcccggggaacatcgtctgcgcacgctgccggccgatgccttcgttccatggcgggatggccaatcgctcagctcgtccgatgtgtttatgccggacgcctttctggaggatacggatgtgctgaagcggatcgaaacgctggatggacgggtaacggtcgatgcggatgcgtcgctgccttgttcgatcagcgcctgcggaggcatcacgctgtcctttgcggcggatgcgccgtatgaagcatacagcggaaacctgcgcatcatctgggaacgagagggagaggaacacagcgccatcgtcccgatcgtgcaaagctggaatgatcgctatgccgcgctggatatccagccttgaggatatgttgtcattagggggaaaggaggcgtgggcatggagatccgtgtacttcgttattttctgaaggtggcgcaagaggagaacatcactcgcgctgccgaagcggtgggcagaggagatcttagaactggtggacaagacagagcgggaagtcagcggacacgacgacatcgtggaagggaccgtttccgcaggccgcggcgatctggccaacgtggagatgctggccgaattgctccgcggctttcatgcgcgttaccgcaatccgcatatctcgctgcagcagatcgcggcggcaaacgatcagggagaatgagacgcccggcgcatgccgggcctttccctgtgcggggagtttactatttcaaaacttttttttaaatatattgaattttttgttgcgtttccgcgcattctatgtataatgttcttgtttgattttagtgaacgaaaagtttaggactacgaaacaggaggggatgctgtggatattggaaaaaagatcagagagctgcgcacggccaatgacctgacactggaagagctcgcttcgcgaagcgagctgaccaaaggctttctttcgcaggtggaacgaaacctgaccagtcccagcatttcgacgctggaggacatcctggaggcgctgggcacggatctctcgcagtttttccagcaggagaagcagcagaagatcgtgtttcataccggcgacttcttcgaggatgatcaggaggacttcaagatcgaatggatcgtgcccaacgcgcagaagaacgacatggagccgatcctgctgacgctgcatccgggggcaaagagcatggagatggtcagccacagcggcgaggagttcgggtacgtcctcaaggggacgatcatgctggtgatcggcagccagagctatcgggtaaaggcgaaagagacattttacatcgacgggaccaagagccattatctgatgaatcctggctctgcggatgcgcggatcctgtggatcacgacgccgccgatgttttaaggggaggatgacatggaacagaaaaaactgattcagtttcgcaacatcgtgaaagactttgacggacagatcgtcctgaaggggatcaatctggacatttatgaaaatgagtttgtcacgctgcttggaccaagcggctgcggcaagacgacgctgttacgcatcctgggcggttttctggacgcaaatgagggcgcaatcatctttgacggacaggatatcgccaaggtgccgccgcacaagcgggagctgaacaccgtatttcagaaatacgcgctgttcccgcacatgagcgtatatcagaatatcgcattcgggctgaagatccgcaagatgggcaaagacgtcatcgagcagaaggtgatgaagatgctcaagctgatcggcctggagggctatgaggacaagaatgtcacgctgctttccggcggacagcagcagcgtgtggcgatcgcccgcgcgctggtcaatgagcctaaggtgctgctgctggacgagccgctgggcgcgctggacctgaagctgcgcaaagagatgcagtatgagctcaagcgcatccagcaggaagtcggcatcaccttcatctacgtcacgcacgatcaggaagaagcgctgacgatgtcggacaagatcgtggtcatgaaagacggcgagatccagcaggtgggcacgccggaagaagtgtacaatgagccgcagaaccgctacgtcgccagcttcatcggcgaaagcaacatcatccccggcatcatgctgaaggattaccaggtgcagttcgacgatcaggtgttcgagtgcgctgaccgcgacttccgggaaaatgagccggtggatgtggtcatccgtccggaggacatcgacatcgtcaatgtggaagagggcaagctgagcggcgaggtgctcagcgtgctgttcaagggcgtgcattatgagatcatggtggagaccctgcctggcacctcggtgaccgtcaatatgcacgtgatccgcaatcatgacatcgcttcggaaaacggaaaggaaaagatctcggccaacgacttctatgtggacatcgaggacctcaaggagctggatgacaaagagatcgtcgcccgtgccgacgcacaggcgtggaatccggaaaccgatgaatatatctccatcacgaagatcgattatgagctgaaggaggagctgggggaatacccagtgacgttctccacttccgcaggcaccagcgtgcagcggcgcatcttcgtggtcaatcagccggtggtcaaaaatgagaaggcgaatgaagccgtcatggcgttcaactttttcaagaccgtcgatgagatcacggaatctgtcgcgctggatacggacctcaagacatgggcgaatgcccagggctggaagctcagcgatgaggatcaggccgtagacatcagcgtcgattacgacttcgatgatgagcacatcacggagggcatttacaagatcaccttctcgacgacgggaagggaattcaagatccatacgaccgattatgtggaagaaggaaaagaggtcggcttgaccttctcgccgcaggacatccatgtgatggagaagatggagttctgatgcgcagattttcacagctggccatcccttatgcggtatgggtggccctgatgatcctgcttccgatgctgctgatcctgctgtatgcctttacgacgcagggcaacgacatcgtgaacttctcctttacgctggatcatttcatccgcttctttaccgaccaggacttcctgctcatcctgtggcgctcgctggtgatcgcgttcaagacgacgatcatctgtgtgctgctgggttatccgatcgcctacttcatcgcgcgcagctcggacaaggtgcgaaacatcctcgtgctggtgatcacgctgccgatgtggatcaacatgctggtgcgcacgtatgcgtggatcggcattctctctgacgggggcatcctgcagaacatcctgagctttctgggcttcggtgagccagagctgctctataccgaaggcgcggtgctgctgggcatggtgtacaactttctgcccttcatgatcttgcaggtcaacacatcgctgtgcaagatggacaaatcgctgctggaagcgagcgcagatctgggtgccaaccggtttcagactttctggcgggtcaccttcccgctgtcgctttccggggtcatcagcggcatcacgctggtgttcctgccggcggtgagctcattcttcattccgaagctgctgggcggaggacagttcttcctgatcggaaacgtgatcgagaatcagttcatcacggtcggggaatggaacttcggcagcgcgatctccatgatcatggccgtggtcatgatgctgtgcatgttcctgatccgccgtgtggatgagcgaaacagcggaagaggaaggaggagacggcgcgcatgaaaaaggacaagcggatcttcggaaaagtgatcatggtcctggcggtgctgttcttctatgtgccgatcctgttcatgatcatcttctccttcaactccggccgctcgctgaccaactttgacggcttcagcctcatgtggtatgagcggatgtttgagaaccgggacatgatggagtcgctgcagacgacgatcgtcatcgcgctgatcgcgaccctcgtctcgacgctgctggggacgatcagtgccattggcctgtcccgctgccgcaaggtgctcaggaaggcggtgctgcagctgaacgatttcccgatcatgaatccggagatcgtcacggccatcggattgatgctgctgttcatcacgttccacatcgaacgcggcttcgtcacgatgctgttggcgcacatcgcgttctgcaccccgtatgtcatcctcagcgtcatgccgaagatccgatcgctggatcccaatctggcagacgcggcgatggatctgggggcgacgccgtggcaggcgctcacgaaggtgctcgtgccgcagatcatgccgggcatcgtctccggcgcgctgatcgcgttcacgatgtcctttgatgacttcatcatctcttatttcgtgaccggagggggagtcaagaatctgagcatcatggtgtataccatgagcaagcgggtcaacccgagcatcaatgcaatttccacgcttgtcgtggtcctgatcacgctcgtgctcgtgatcatcaatgtcgttcctgtcatcagggcgagaagggagagaaaacatgaaaaaattactggctagctgcgccgcgatggcgatggcgctgacactgaccggatgcggatcttccggttccggagaccgtgaatttgaggggcaggagctgcacctgtacaactggggcgagtacatgggggaaaacctgatcgcggactttgaagagcagaccggcgctaaggtcgtggtagactattttgattccaatgagcagatgtacatcaaggtcgccaacggcgaggcttatgatgtgctggtgcccagcgattatatgattgaacggctgatccaggaagatctcctgcagcctttggacaagagcaagctgagcaacctggatctgctcagcgaggatgtgatgggcctggaatatgatccggaaaatgaatattccatcccgtatttctggggaaccgtcggcatcgtctatgacaagaacaaagtcagcgaggaagacctgcaggcggaaggctacaatatcttcctggatacgaaatacaagggtgacatctatctgtatgattcagagcgtgacagcttcatgatggcgctgaaggcgctgggctattccatgaatacgagcgatgagaacgagctcaacgaggcgtatgagtggctcgtacagtgcgtggagacgatggagccggagatcgtgaccgatgagatcatcgacaacatggcgcagggacgcaaggcgctgggcctgatctattccggcgacgccacttatgtgatgtcagagaacgaagacatgggcttctatatgccggagagcggaacgaacctgtggtctgatgcgatggtcatcccgaagaacgcggaaaacccggaactggcacatgcgttcatcgactatgtatgcacgtatgaggcatccatggacaactccagctatgtcggctatacttccccgaatcaggaggtcatggatgagctgagcggggccggcggagactttgaaggcatcaatgcctatattcctcgtgcagacaatgaaaacgatgaagtgttcaaatatgatgaagcgacccgcaaggtcatcgcggatctcttcagcagggtaaaggttgccgcaagcaacgcctgatcgaaaaaagccatgaatgagcggtctcattcatggcttttttgtcatgaggtccatgatggccttggtcctggagcggaattcgtcaaacagctttgccatatggatcctgcctttgtcttcgaggtgatagtagacgcgcatgcgccgctgaccggcctgtaccttgtagctgctgatgcagccctctgattgcagcttgtagagcacggggtaaagcgtgccttcctgcacggcgatcatatgatcgctctgcgcatagatgtcttgcacgatctgataaccgtagcggtcctcggattccaggatcttcaagacgagcatttccagtctgaaatagttgttctgtttcgccatgggcatcctccttcctcgcaagaacatcgccgatatctaattttattataatgcggaaaaaagaaaagctacagtatttttatcgcatttcggcatgaatagacaaatcaggcgaaatgtaaaaaacacggcctgtgggtgacaggccgcgtccttgatcagtgctgctgtgcgtatacatcgctgccggcggtatcgatggccacggtagcgggaaagtctttgacttcgatgcgggtgatcgcttctgcgcccaggtcttcaaaggcgaccggatccacgcgctgcacgcatttgcccagcagtgcgccggcgccgccgatggcgaccagatagagggcgtgattgcgtacgcatgcttcgcggaccggcgcggtgcggtatcccttgccgatggtgatgccgacgcccaggtcatacaggcgcggcgcataagcgtccatgcgcatgctggtggtcgggccggcgctgccatagacatggccctggggcgccggggtgggaccgacatagtagatggtctgatcgacgagcggcagcgggagcgtttcgccccggtccagcatctcgatgagccgtttgtgcgcggcatcgcgcgcggtatacatgacgccgctgagcaggaccatctctccggccttcaggctgtcgcgctgctcagcgctcagcggcaggttcagtttcttcatcagagcacctccttagcgtgacgggtcacatggcaggagatgttcaccgcacagggcagcccggcgatatgcgtagggcattgttcgatattgatgcggaacacggtcgtctttccgcccatgccctgcgggccgatgcccagcgcgttggcctcctgggtcagctcctcttccagcgcggcatagcggggatcaggatggtggatcgcttcacgcaatacggccttcttggccagcacggcggcataatcaaaggtcccgccgatgcctacgccgaccaccatcggcggacaggcgtttggtccggccttctggatggcggaaagcacgcatgccttgacgccttcgatcccctgagccggcttgagcatcgtgatcgtggacatgttttcgctgccgaatccctttgcgcccacgacgatctccacgccatctccctcgatcagctcggtgtagaggatggcaggggcattgtttttcgtattgactcgtgcaaacagcggatcgctgaccaccgacttgcgcagaaaaccttcttcatatcctctggccacgccgcgatcgaccgcttcccgcaggctgccgccgatgaagtggacatcctggccgatcttcatgaagatgacggccatgccggtatcctgacagatggggatgtgctcttctttggcgatgcgcgcattgtccaagaggaactgcagggtggatctcgcgatcggatgcgtctcttcctctgccatccgcttcatgtctgtctcgatctgagggggataggcataattgatctgctgcaccatgcggcatacggcctcttcgatgcggcttacgctgatctccctcattttccggctgcctctttgactgcctcagcgacagcctggacgacggccttgttgaaggcatccgggatgatgtagtcttcgctgagctcgtcatcgcgcacgatggcggcgatcgctctggcggcggcgatcttcatctcttcgctgatgtcgtctgccctggcgtcaagcgcaccgcggaagatgcccgggaagacgagcacattgttgatctggttagggaagtcgctgcggccggtggccacgacgcgcgcgccgcccttcttcgcttcttccggcatgatctccgggaccgggttggccatggcgaagacgatggcgtcatcgttcatggaagcgaccatctctgcgctgacgatgcccggggcgctgacgccgatgaacacatcgcgtccgcgcatagcgtctgccagcgtgccgcgcagatgctcgcggttggtcttttcggccatcgcggcctgcgcagggttcatccatgtctctccctcgcacaggatgcctgagcggtcgaccatgatgatatcgcgcgcgccgatctccatgagcagcgtggcgatgctgatgccggcgctgccggcgccgttgatgacgaagcgcgcgctgcccagctctttgttcaccaggcgcaaagcgttgaggatgccggcgctgaccacgatcgctgtgccatgctgatcatcgtggaagaccgggatatcgagttcctgacggagccgtctttcgatctcgaagcatcgcggggcgctgatgtcctccaggttgatgccgccgaaggtcggcgccagatattttaccgtgcggatgatctcctcgctgtcctgggtgtccagacagatcggaaaagcgtcgatgtccgcaaattccttgaacaggatggccttgccctccatgaccggcatggcggccttaggcccgatgttgcccaggccgagcaccgcgctgccatcgctcaccaccgcgaccagattgcccttggacgtatagcggtacaccgcttcttcatcggcgtggatctcgcggcaaggctgcgctacgcctggggtgtaagcgaggctgagatccttcatgttttccacagttacttttgattccacactgatcttgccatgatgttcctcatggagcttcagtgattcctgatatacatctgccatatcaattcctcccgtcatttcctgtctattatagcatgattgacgctgactttatgcccatagatcagataaaaccgcgtgagggcctgcagatctgctataatgacggaaaagaaagctgggatgtcaatgaacatgatcaattttcagatctagatcttcctgctggcgctgacgggattcgtgctgggcaagcggaaggtgctggatgcgaggaccaggggccatctgaccgacctcatcctgatggctgctctgccttgttccatcatcgattcttttcagatgacgctgtcggcgcagatcctgatgtcgacgctgagcgtgctgctcatctccatcgcgatccaggggctgtattggatatggaatcggctgttttaccgccatgagggcattgaccggcgcatttgcctgaagtatgcgacgatggtgtcgaacgccggctttatcggcatgccggtctgcgctgcggtctatggctcgctcggactgctgtatgcctcgatcttcctgctgccgcagcggatcttcatgtggtcatacggcttgtcgatgttcactgcggtcgatgggcgggaggtcgtgaagaaggtgctcacgcatccatgcatcgtatcgatcttcatcgggatggcggtcatggcactatacacctatggcatccagctgcctgacgctctgcaggaaacgatatcttcgctgggcgcctgcagcacgccgctgagcatgctgctgacgggagcgatcctcagcgaagtgaacctgcgcgagctgtttcagcgccaggtcctgctgttcagcctgtaccggct

SEQ ID NO: 505 - DNA, 15616 bp, Unknown
  16S sequences of unknown bacteria
acaggaattatatgaacttgattgggacaatgaaagtaccgttgaatctgtgctccttatgagacgggcaaagcggtaattgaacagagtttggagagaaaaaacgtatgaatcaaattgtttcgttgtttatgtttagttgtggtgattatgagaaagtaaaacaggatgtatgggaagaaaactggaaagccatgcggctgtattctgttgtggcgcttgttgcctttggagtcataacgctggtgagtgtgttttctctgagtatcggaaaatataaatgggtgtatctggtctatacgttcctttctttggtctatttttgcatttctcgttgtcaacttagaagcttcttggggaaagaactggttgtatacagcttttttgccgcgctgctgctgttcggcattattacgggaatgctgattacaccggaggagctcactgtcaactacattgtgttcatgatggtagcgccgctgctgtttaccgccagagcggcggtcatgaacgggctgattctgagcagtatgctgctctatatcggacttgctttctttgcgcagcacaacccaattctatccaaaaacctagtggatgttattctgtacggggtgctgagtatgcttctgactgccacgatgatgcgaagcaagctccagagaatcctgtaccataaggaaatggaaatgttggaagtcagcaagcgcgaatcgcaggaacgaattctgaattacgagagattcctcacggacatggttcggtatgccgcttcagaagaaaatccggacagagtactgaatcaactggtggagtatatcggacagcgtgtgaccgccgatcgagcgtacatctttgaacagaatgaccgcggaacgtttgacaacacctacgagtggtgcaaagcgggcgtacccaaagaaaaagataacttgcaggatgtgccgtatgaaggcatcattgaaacatggtttgcacaatatcaagaatccaacaatgtcatcatccatgacattgaagaatgcaaaaaaacaagcgaagccatctatgaacggctgaaacctcagggtgtcaatacccttgtgacagggccaatcaaaatcaacggcaagatggtcggattctgcggtgtggacaatcctcccgaagagaaactgcatgagatctcgaatgagataaatatgatcgagtttatgatctcttttatgataagactgcgcgataatgcagatgtactggagcacagtgcattatatgaccagctcacagattgtaaaaacagaaaagcactggattgggcgtacacagaaaagctggagaagtactttcccctggcggttgtcatgtgcgacctaaatggcctaaaggaaataaatgaccaaaagggacatgacgccggtgataaattcattgtgcagaccgcacagacgctgaaatctgtgttcggaaagcgtcatgtgtatcggcttggcggagatgagttcattgcggttctgccaaacatcacacatccggcgtttcagaaactactggaaacggcaaaaagccaactgggtgctaccgtgtccctcggtacgacgataagcggcacaaaggacacggattttgagtcgcttctgaaagccgcagatgcggaaatgtatgaaaacaagaagcaatactacatcgtgacaggaaaagagcggagaaagcacagcttgtgagagggaaagaccgtgaacctgataattgaattataaaaaaaggaagagatactgaccctggcgcgttgatatctcttttttcgtgaaagaaaagactactctgcaattgtccataaaatgaagagtagcctgatccaatgcccggatggaggtgatgcatctcctgtatttagggggtgcaatcgtttccttgtatcaaaatggtggttgcaatgaagatcatcacgtattcttctatgccccttgtcaggatactccttatgtatgctcattactgcctctgcaattgcctcattcaaaagctctgcttccggtatttcacgattcagccacttgtagtaggatgccctcgctatgcctgctatggcacacatcctgcatatgctgacattgtactctctgcatatgctctgaactgcaggatatgcagcctcctgcctcactctccctaaaaccgcctcctttcgatttccttcactttttttaagaaaaggttctccggtttcctgttttcaagttctgccttaagcaggcggttctctgtcttcagcttctcaagctctgacatttcttcttctgtcctggtacggccacggccatcctttagaccgtcaacgcctttatccatatatttatgataccactggtatatctgctgatatgagacgttgtatttctgtgcagtctcatcatatgtactgccgctctttatgtgattttacacaattgctattctttcttcaagtgttgtctttcttcctttgatcatgactgttcttttacctcctacaggtgatgccttaagttcacaatcattatacacctttatccacatgcgtagagttcctgcactcggaattttaaattttttgcaggttgcagaaagagaaccctttccctcaagatagaattttacagcttcgttcttttcctcaagagtatagtggcggtttgaagatcttatgaatgcatcttcgcccatagcttcataatttaatacccatgtctttattgttgttctatctgctcctattgaaccggctatacttgcgtatgattctttctcttccggtcgcctttttacagcgctcattttttcttctttactgaatttggacataacaaaacctcctggttaaaacagttttttatttcaactgtctgcctaggaggtagcatatcaaagtgacgggggctttttatattatattgtcaattaactatctgtatattacgccgcttgccgcaacgcagtttttgccgctgcttttacagagataaagctgcttgtccgcctttgccataatcgaaagaaagttgagttcttccgctgctccgcaggcaactccaaaggaggctgtaacaatgttatgattcggcaggtcatttctcggaacggcggcggcacgtacagcttcaagaagctcagatgcaatcaggcgagcctcctcttcacctgtatcaggcaggataacgacaaattcttcgcctccgaagcggaacaaatatctgtcggacttttcgagtaccctgacaacgctttcggaaacagctttaagagccttatcacctttcaaatgagaataatggtcgttgtatgatttgaaattatcgatgtcgtagattatcacgctgaccttttcaggcgacattctctctgcaataaatgtgcggtaggcttccattgctttcttgttcagcgtacctgtcattatatcgttatatgcaagcttgagaaaagaattgttcatttccttgacatatctttcgttggcagactgccgcaggaagatggagcggatggcgataaatcctacaagaattgaaaatcgcagaagaaaatgcttgaacatatcatagttgtccgcatacggaagctgtccgggaagccaccagcttatcagtatcagaatacatatgaatacagtgtctgaacgcctgtaggtcggcgcaatcataattacaaacagatagcacatcgaaatcgaaagaccgattttgtgaaaattgcaggaaaccataaaaacggtaacgcttgcaatgacaaccgtataaaataccagcagggcaaatcttgacaggggtgagtcatattttttgttgactcttacgaaaataagcatggcaagagaagctgccgtcatcatatagagaggcaccatatcaagagccagcatagtatttaatgctatgtttttgacaaggtaaaaaccgttggtcagcaagaataaaattgttgcaaaaaagactatggcaaaattctgcctcataaagatgctttcctgagatggtacttcatcgacacttgctccgagtacatcgctgcagaagcttttaaatcttgcaaatgcaacatctgaaatatgaaaaatcaggtcttttgctatgtcgattttgttgttgtgttctttcataatatcccccgcgaaatagtaaatgccaataatatgtcagcctgctttaatatatatattacatcgttcacccctgaacgaatcaatcttttttgcagctgcgggcggccatatgaacggattctgacgggggtgtgcaggtaatatctctactttcaatacttccgacatatacgctacaaatggtgtacagcgccgtaaggcacatatattttactatatatagtgcttttacctgtcgatatgccctgcattgcgactttttattgccttacttctgccttatatgcacttttgattatcaaaaccggcagatatgtgatataatataatggactatatatgaggagaagtaatatgtatcttacactggcatttctgtttggaatactttttcccatttctgcaatagcgaggggaattgtttcaaaagcagatccatacagagtggtaatagcaggaataatatattcggctgtcgggcagcttatagtaatcgcaatatcgggacttatcggacagtcggtaggcgagcagctgcagagcgcaattgaagctctgtcaaagacactggcagcaaacaatgaaataatgcagtctatgggaatggataagctttcggaagcagagagagcttcgactttacagaaggcctacggcagcgttgttaaaatgttcccgtcatcatttataatatggggagcgataatatcctatttggaatatattatactgtacagatggcttcgcaaaaaagaccctgagctacgcaagatgacacccgtaagagaattctcaatgagaagacaggcgtttttatgctggtttggaatatatcttctttcatacctgctgactctgacggacttttcggcaggtcagatggtttatgcaaacatcgactatctgttcagaatggcgtttgcatatcagggcattagctttatattctattttgtctatatgaaaaaatggccgaaagcagttgcgcttattgcggtaatactgcttatgacacagaatttaggagttatgggtctttacctgcttggcttctttgatctggtattcggcctcaaaggaagagtgaggggcagataatggaaaacttcgaactggaaaagttaatatgtaaatatgcgggaatgcctgtatgcactattaacggaagcggtaaggttacggcagccagcagtgatataggcgaggtgtttgtatatgacaagcaggagggcgccgatatattcaccattgccggcatcaaatactctgcaatactcgaaagcgcggacagcggagaaaccctgcagcttaaccgaaacgacaggattttcaggctggtggtgcgcaagctctgcgacggtgaaacacctgaccttgcaatatatttcaaggatattaccaattacgaaaatctcaaggccatctacaacaatgagagagcctgcataggaattatacacgtagacaattacgacgagcttcagaatgtcacaccggatgcagacaaattaaggcttgatacggatatagataaatgtatcagacagtggggaaccaaaatagacgcctccataaccagatacaagccggatatgtttttctgcgtgtttgaatacaaatattatgatttcatcaagcgggataaattctcggtgcttgacaaaatcagagaaatcgaaacagaagcggatttcccggttaccctgagtgtcggtatcggcataggcggcaggaactatccgcagaacgacacctttgcgcaggaggccgttgatctggcgctgggcagaggcggagatcaggctgttatcaaaagaggtcagaagcttgaatactatggcggagttatgaaagccgtcgaaaaaagcaacaagggcaaatcacgaattatatattacggcttcaagctccttgtggagcaggcctcaaacgttcttatcatgggacacagatttcccgatatggacgctttcggctcggcccttggaatacacagactggcaaaggacatcaaaaaagacgtatatatagttataaacgaatacaatgagactctttcagaggtgtttgaacaggcgaaagaaacagaaacctacgaatttataacctcagaaaaagcgcttaatctgcttgacgatgagtcacttgtggtgctgcttgacactcacagagcagtgcttgcagagtgcccgggtcttgtggatatgtgcgagcgcctcgtcataatagaccatcacaggcgttcggaggatgccatagacaatgcaacccttgcatatatggagccttatgcatcatctacaagcgagctggtaacagaaatgcttcagtatgccggagccaaaaaaacaatctcaaagcttgaagcggaggcgctgcttggcggcatgacaatagataccaacaggtttgcagtgcagaccggtgtgcgtaccttcgaggctgcatcgtggctacgtagagccggagcagatacaacagaagtaaagcgcttctttagaatggatacagaaacattcaaaatcagagcaagaggtatagcagacgctcattttgaaaacaacatagcattttcaattacaaggcagcctcataccgattcacagattataaatgcgcaggttgcagatgagctgcttacaatcaaagagattaaagcaagctttgtggcaggccccgatattacgggtcagacggtgatttcggcaaggtctctgggcgatgtgaatgttcagaccgtaatggagcggctcggaggcggaggccatctgactacggcgggcgcgcaggtttcaatcagcccggaagaagcgatacagcagataaaagaaatattagcggaggaatagacaatgaaagttatattattacaggatgttaaaggaagcggtaaagcgggagatgtagtaaaggtaagcgacggttacgcaagaaacctccttatacctaaaggctttgcgatagaagcaaacgataagaatatgaaagctctcaaaaagaaaaaggcagaggaggaagcgcagtatcaggctgacaaggctgccgctttagaggttaaggctcagatagaagcaaaagaattcgttataaaaacaaaaggcggcgaaaacggcaagctctttggctcaatcacatcggcagatatagcagaggctgttaaagagcagtcgggagttgacatagacaagaaaaaaatccagcttgactcacctatcaagcaggttggagattttgaagtgccggttaagcttttccacgaggtaagcgcagtacttaaagtaaaaacagtagcagaatagaggatacgcaatgtcgatgagagtacctcctcacaatgaggatgcagagcgcagtgttctgggagcagccatgataagccatgaggctatgatgaatgctgtcgaaatgctcagacctgaggatttttacaacagaataaacaaggaaatctatgaggcaatagaagaactctacaaaaaaaacagtcctgtggatacaattaccgtttcagaggagctcaaaagaagaggctctcttgaaatggcgggaggcagaggatacataggcgagcttacgctcaatgtgccctccactgcaaacgcaggcgaatatgccagaataattgcagaaaaatcatctctgcgcagcctgatagacgtgtctgcggatattacagacaagggctatgacgacagtatagatgtagatgagatactcgattatgcggagagaagcgtacttgaaatcggacagaagcgtcaggtcagagactttactccaatcgaggaagtcctgaggcgaaatgtagacaagatcagtgagcttgcggcaaatgagggcaaaatcacaggccttacgacaggatttcttgatatagacaatatgctgtcgggacttcagaaatctgatatgataatagttgcggcaagaccctcaatgggcaagacggcatttgccatcaatattgcgcagaacgccgctgtcaagggcaacgcctctgttctcatattcagtctggaaatgtccaaggagcagctgggcgagagaatactcgcggttgagtcaaggacagagcttggcaaaatcaaaaccggcgctcttgagcaaaaggactgggacagagttggaattgcaatagacacgctgtcaaaggccagcatagtaatagatgacacgccgggaatttccgtaatggaaatgaagaacaaatgcagaagactcaaggccgaaaagggtctcgacctcatagttatagactatctgcagcttatggaatacaaaggcaagtccgacaaccgtcagcaggaaatatcggcgctgtcgagaatgatcaagcagcttgcaagagaaatggactgtcctgtaatcgtgctgtcacagctttccagaggtgtggaggcgcgtactgacaagaggcctatgatgtccgacctgagagaatcaggctcaatagagcaggatgcggatatcgttatgatgctttacagagacgactactacaacaaggagtcggagaagtacaatatatgcgagataatcatcgcaaagcacagaaacggcgccacaggaaccgtggagctgacgtggcagcctcagttcactaaattcagtgacaaggccagaagcggaggaaattatgaataagatattagatgaaatgatggtttgcgaagttcttgatgcatatcctcagcttgaggaggtgcttgcggcaaacggactcggctgtgcaggctgtccggcttcaggtaacgaaacactcagagaggctgcggaaagccacagcattgattttgaaaaactggcggcagagattaaaaaaacactggagtaaatattatggctttttttataaagcaggatgaaaactggtatctcaaggataccggcatagaaaacatatttataaatgaatatatgactcaggcgccgggagattacgttaagatatatattctcgctcttatgtatgccaaaatgggagcggatatatcaaatgaggctatagcaaagtctgtcggcgttgaagaggaggacgtgctcaaggcgtggaactactgggagagtcagggcgctgtaatcaagcacaaaaaagagggcgcaggcaggttcagctatgacgttgaatttgtttccctcaagacagcctccaaaaccggaaatgcggcagcgcttgtgtccgaaaaaaaagtaagccctcttgaagatgaggagctcaaaggcctatatatgctcatagagcagatagtagcaaggactttaaacggcacagagatgaaagctatagaggaatggctgacagagcttgacacagaccctgaggttattctctatgcatataactattgcaaaaacaaagacaaggacaattacagatatgtaggcgcggtagttaaaaactgggcggaagagggactcaaaacggcagagcaggtcgaaaagcatctggcgcagagcgatgagagaaactatctttacaggagagttttcaaggctatgggctttgaccgcaactggactgaaaaagaacagaagcttatggacagctggtttgatgatatggagttttccatagacagagtgcttgaggcctgcggcaaaagcagtgggatttcaaaccctaatcttaattatgtcaacaaggttcttcagaactggcacgagcaggcgggagagcttgagggaactcctgcagagggcgcaggcaaaaaaatatcaatgagccgcgtgctcaaatattatgaatacataaaaaccagagaagaaaaagacgccgaagcaagacggcatgaaatatacagtaaaataccgagaattaaacagattgaagatcagctcaaaaactgcagtatgtcaatctccaaggcaatggtgggacttggcggcagtgacagggatgctgagatacagagattaagagcagaggcagataaccttacggcagaaaaagcatttctgcttacggataacaattacagacatgactatatggatgtaagatacaaatgcgatttgtgcaaggacacgggaataaccgatacgggagagcggtgccggtgtttttcacagagaatgaaagaggctgttgaatggcaaaatcaccagaagtaaaaagcgaagaaaaatttaataaagagccatatgacaagacaaaatcagcgcggataaaaaagatgtttcataaaattgcagactggtttgcagtttccactccgggaggggcttcggaagcaatggcaaagatgcaggacaaggcggactactggatagacattgttgaggatcagtttgcaaaggatgtggcgtggattaaaaagggtcacagaattatgtggaaacttatagggcaatggttttcggttacaagaaccggagggctgtccgggattgcggcatctgcggtaaacagatgcgactttgtaatcaatgtgcttgccgataatattgtgtttcaggccgtcaggctgcaaagagcgcttaacagactgtgcctgcgcatatggaaaaaccgcatgctgtgccttaaatatttcacaggcatagttattctgaccatatgtacggtttcagtatttaaccatgtgacaggttatgaatattcatataacggcagggttttagggcttgtcaagaatcaggaggacactcttaaggtactggatatcgcatcaaaggggcttaccagtgagtatggcgttgatgtacagattgaccccaaagaggatataaccttcagaaaggttgtaatcatagacagaactgtcgacaatatggacgaggttctgaggaaattcacatatatgcaggatacgaaggctacggcgtatgctatctatgttgatggcaggagaaccgttacagtagacagtgagcagactgcggaggaagtactgagcgctctcagagataaatatgtggagcctgaaaaagccgatgaatatgacaaggtatactacggtcagaaaataaagataaagcagatagatacgactttaggcaggctgatgaacaggaacaatgccatcagaatacttgacaagggtgaaagccaggtaaggtatacggttcagcttggagatacagttaaatccataacagacagctttgcaatgaaagaaaggctgttttatgagcttaatccggatatagatcaggatgagggaactcttgaagaaggatcaaaggtttcggtagtatacaaaacgcctaagataaccgttataaccgaaaaaacattaacctacgacgaaaaaaccggatataaaaccaaaagagtgaaaacaaaggaattatacagaggtgatacaaaagttcagaccaagggcaaacacggtaaaaaacaaataaccgcggcagttacggaagaaaacggtaaggaagtaaagagaggggttctcaaagaaaaggttgttaagaaacctgttacaaaggtggtgcttgtgggtaccaaagaacggccgtcgacagtgggaacaggcaatctgattaatccttgccctgcgggatatcagtcatcaggctttggctacagatggggcagactgcacagaggtgtcgaccttgcctgcgcggcaggtaacagcatatatgccgcagacggcggtacggtagttacagcatcattcaattacagttacggttattatgttaagataaatcatcagaacggtatggtgacaacctatgcgcattgcagtcgtctgcttgtttcggtaggtgacaaggtgcacaggggacagaatatagctcttgtcggcaacacaggaaattcgacaggcgcgcactgtcacttcgaggtagaggtaaacggatcccttagaaacccgagaaactatttctagatacgataaaacaaaatggatatgcccggagtatatggcatatccattgttttattcaggttaaattaacttgttaaaggtagttattctccggcaggtatattggattcggtaatggttgttcctgaatagtcagaggttgcagaaactgttgccaaagcgtcatctgcagcgaaattgtaggtgtagtaaacataagcatcattttgtaaaagcttgaatgtgattgactcaaatgtgatactgctttcatcagaaccttccgcatttgcgattgatacagattctactgctaccttgatttcatcaccctgcgaggattcaacatatatattatatgcgctgtttacaaattcagtccaatcatatgtgctgccgctgctctttgctgcagtaatggcatcggcagtaattggccttgttcctttttttaattcaaccttattaatatcaattccgcttacatttacatcaaaatatttggttgttatgtgttttttgtaagaatgtatgttgtcggaataatactcaatagtgtaaagagttactaaatagttataccttccgggttttacataaccgttagagcatattctgccggcatctatcgttattatatcactatctatcgtttttatgtcatcatcgcttttcagcttgatatcataatccgaaataggtcctgttatatccttgacattggtgtcgccattgaagctggaaagcttaagtcctagtgatactgaggaattttccacgtaatttatagggcgtccgtacagcatactccttatagtaactcctataaattctaaagaactctgaccgaaggaattatgagtgttattgcatacggaaatactgtctgtgctttttccggaagttaaattgtttccataaagccgcatcattaaatatccaaactcatattttggagccttgtcgccacccagtaaatagagagtggatacaacagttccattcttattctttacaaagagatatgttgtacctgccctctttccctttacccgtatgctgtgggtgtcgttatctattgcaattccgtttgaattatctatagttccggcttctgcatctgtgctgattttagctgaataaatctcagcaacgttgtcgtttgatatgcttactgtataatctccgtaattctcaacctcctcaccgtatttggtgatatagaagtacagaggtacagttgtttgttctgcggtatcatttggacagtaaaccatatttgtcggactgtcaaagtccggaacaagggtacggactggttcatctccggaaaggtttaacttatagatttctgctgttgtaatctgcacactgtacgggttgtatgacggtgtcggatccggttcgcgaatttcgctggctgtgattgtaacattgcctgtgtctaccacacctgtttcaacagtttttccggactcatccttttcataattataggtatgatatacagctcttgctgtagctgttgactggagattattcagatacagcttgccgttatagtttacaaagcctgaacttgtggaaatggagaaatccacatatttaggcttattggctgtattataactctcaacaacaactccgtttttatctttcagattaacatttatctcggttagtgttttttcgggaactacagtcggtgatatttccataccggtaattctgccgtctgttgcggtgaactgagccgaagatttatcaaatttaactgtgtatgtaccgccgtcatttatcttgtcgtttgtagttaatatgactgaattgccgctgactgaaatatctttgactgtgaaattccgcttggtcttgttgtttgatatactgaaatcagaggctttcatatcgtagcctgtaatatctgttttaaagccgagcttaatccttgtggtttcaagctgctgcgcagagtcgatatatgctcccacatagacattaatattagtggctttgtttgccttgttggaacttgatgttgaatttgaggcctttgcaattaccttgatagtggtttccccctttttatatgctcttgccttgcctgaagttgcgcctatcgtaacaatctctttgtcgttggaataaaagcgtatcacatctgtggatgtggacggggtaagctttgcctttacgtaggcgctgtcacccggattaagatatatatcagatgctttaactgaagtacatctctgacgcactgtaaaggtttttcttgcgacctctttgccggttttcttgctcttggctttgattgttacagctccgggtgcagtgggcttgagttttcctgtagtcagacctatagttgccacctttttgtcggtagtatagaatttgacattggcgcccggtaccttaaggctgtaggaatgaccggcatatattatgctgggggctgcttcgccgcttttcagcgtgattttactgctcgccgcaaaggccgtatcaggtactccgattacggagaacaccagagccgccataagcagaactgctgtcagcttcttcattatctttttcattaatactcctcctcaaaaaatacattgtatcatactatactcacacttatcctttgccgtcaatataccatttattatagggtaaagcaatacgttttatggatttaatataataaagtaaagtgtgactaattgagattgtatacaaaaacctaaaaaatatgtaaaacaggaataaactagaaaaatatgttgacaattggataaaacagggtataattaatgaaaggatatgcataacctgtaattttatagaaaggaacaaactcagatgacagaaacaaataacgaagtaacatttgaaatcacagaacatataggtgtgattgcggagcaccctacagggtggacaaaggaattaaacagagtagactggaaccataaggggaaccctaagtatgatatcagagactgggatgaggaacatctgcgtatgtcaaggggaataactcttcacgaggatgaggctaaaaggctttgcgatttattaaaagacagactgtataactaaaacaaccaaaaaaggaagctggacatataaggtgtgcagcttccgatacggcattatgattttttctcgaaaagaaaacttatagaataaagtccggcaagtcctacgatagcgaatattattctgctgacaacctcaagattaggaccgaagattgacgatacgacatcatagccgaaaaagcctataaagccccagtttaatgccccgattataacgagtatcagtattatctttttcaaaagccatcactcctttcagaatactattctgcccaaaagcatacataatatgttataatgattctaccattataattcggcgttgccgaatggtaagaatcattgaattatgctcgacattgctcgcataatataatgaggttttaccatttaacacgccgtgagcaagaaatcccccacttctataagtggtgggatgaattgtgattaacacggcgatttcttgactccttcatcttgctgtactatgatatatttacaatcagtcgtatctaacagacaagtggagctaccgtagatattatcaggcagtacataatgtcacaggggaagaaaaa

SEQ ID NO: 506 - DNA, 2304 bp, Unknown
  16S sequences of unknown bacteria
gcccgtcggcgcgcagaagatccaccagggcgggcagcagcatgtccttgcgctgctccatgccgagggacaaaatctgaaccaccagaatatcgttgaagcggtccacggtcaggccggggaaagcgtccgcctcgccgaagattacgcggcagcaggagagatcctccggcgacagggcgcttttgcgataatcccaggcatattgcagccgccggcgccagaaagcttcattgaaagtgtcgttggcgttgcgggaaatcaggcggccgcggattttgctgtggctgttgtaaaaggcgctgcccagccagcggcctttggcgctgagtacatctgcgatggcgccgtcggcgataggcccgctctgggcggtgatctctgcgtcgtaaacccaggggtggccgcccagcagagcgcgttcgcccttgggcgtaatggtgatggtggggtagggccgctgtgctttcatggcgtatcctccgcagtttttcaaaaagtaacgacagtatagcacacattttgcggccgcgccatacaatggggtgaatccatcgaaaaaatgcattgtgaaaggacggttcctatgccgatcatttacttaagcccttccacccaggaaaataactattatgttaccggagggacggaagaatattatatgaacctgctggcggatgccatggtgccgtatctgatttccaacggtatccagtatgtgcgcaatacgccggacatgaccgcgggctcatccatccgccaggcaaaccggggcaattacgacctgtatctggcgctgcactccaacgccgctgccgaagggaattacggaggcgcgcgggggattattgcgttctactatcccaccagcaccggcggcaggcgggcggcaggtatttttgccgataatttgaaaaccatttatccgctgcccaatctggtgcgtacccaggccaccacgacgttgggagaggtggcgcagtcccgcgcgccggcggtgctgctggaaatcggctatcacgacaatgccgccgacgcccagtggatttcagaaaatctgactgccattgcccagaatctggtgctgtcactgacggaatattttggcgtgcccttcatctggccgatggaccctgtggatggggtagtgcgcgtgggcagcggcatgctgaacctgcgcgaacggcccgaacggggagcggccatcgttgcctccatgcccaacggtgccgctgtgcgcatctacggcgcctggcagggctggtatgtggtgcattacggcgaatacgtgggttatgccgcggcggaatttatccgcacatgaaccggtattttggtgtgaacaggctccgaaatggggggcagacctatggggttgccgggaaaaacggcgcggcgggccgtgtgctgcccggcgcctgaggacacagacggtgctttccgtcttgacagatgcggcctgccgtattaaaatcataaaggattattatcggacctgtaaggggttacaggccctgattgttttctgacactgacaccggctgcgccgcgcagggcattgttttgtccgtggggggcagtctgtgcaggaatgtttatcggatttaggaggaagaaatgggcgacattggtatgacgacgatcgtggttgcggtcgtggttgcagtcgtagcgctcattattggctcccttctcggttggaaccgcagaaagtctgttgcagaaaaggaaatctccagtgcggaggaagaagcgactcgcattatcaacgaagccatcaaaggcgctgaaaataagaagcgcgaagcgatggtggaagccaaggaggacattctcaagcagcgcagcgaatatgagaaggaagtgaaagagcgccgggcggacctgcagaagcaggagcgccggctgcagcaaaaagaggaaaatctcgaccgcaaaaccgatgcgatcgagaagaaggaagaactgctgacccagaagcatgcacagctggacgaggaaaaggaagagatccagtccatcaagcgcagccagacggaactgctcgaacgcatttccggcctgactgccgacgaggccaaggcttacctcatctcccaggtggaggctgaggtgacccacgaggccgccatgaagatcaaagaaattgagacccgagccaaagacgaggcggacgccaaggcgaaagagattatcgccacagccatccagcgctgtgctgccgatcaggtttctgaaatcaccgtcagtgtggttcccctgcccaatgacgagatgaagggccgcatcatcggccgcgagggc

SEQ ID NO: 507 - DNA, 3867 bp, Unknown
  16S sequences of unknown bacteria
ggagatgtgtataagagacagtttccaccctctcccctgcgcagcattggtttttttctccttgtacgttataataaaagtaaatttacaccagggaggacaatgttttgtatattgcggatctgcatatccattccaaatactcccgggccaccagccgagattgcgacaccgcccatctggatttttgggcacggcgaaaaggcattcagcttttgggtactggggactttacccattccgcttggcgagccgaactggcagaaaagctgattcctgccgaagacgggctgtatcgcctgcgggacgatgcacgtctgccggattctttctgccagacagcagccgcaccgcggtttgttctgtccggggaaatcagttccatctacaaaaaaggcggccgaacccgcaaggttcacaatgtaattctgctgccctctctggaggatgcccaagccctcgcccaccggctggaagccatcggcaatatccattcggatgggcgtcccatccttgggctggacagccgggatttgctggaaattacgctggatgcctgccctcaggcggtatttatccccgcccatatctggacgccgcatttctctatgttcggggctttttccggctttgacacggtggaagaatgttttggcgacctgtccggatacatccacgtggtggaaaccggcctttcctccgaccctcctatgaactggcgggtgtcggctctggaccgcttcaccctggtttccaactccgatgcgcattcccccgccaagctagggcgggaagccaatctgttggacacggacctctcctacccagcgctggccaaagcccttcaaaccggcaaaggctttgccggaacggtagaattttttccggaggaggggaagtaccatttagatgggcatcgttcctgcggatgccgcctgacgccggcacagaccgccgcctacggcggccgctgcccagtctgcggcaaaaaaatcaccatcggcgtacagcatcgggtagaagaactggccgaccggccggggggctctcagccccagggggctaaaccgtttgaaagtctcgccccattaccggaagtcatcgccgcttccaccgggcagcctgccgccggaaaaaaagtcggtcagcagtatgagtccctgctggccgatctagggccggaattttacattctgcgccaggcaccactggaagaaatacaccgggcggcaggcccctgcgtagcagaaggcatccgccgtctccggaacggacaggttcggcgaattcccggctacgacggagaatacggacaaatcctgctgctaagcccctcggaaattcaagcgctggagggacagacctctttgttcggggtttccggtccgactgctccggcggaccctttcccgccgaaaccgcagaaaatgccgaccgctgcggcgcgaaaagaagaggctcgccttcaagaagaaaagctgaacccgcagcagcaaacagccgtatgcgcagaggaacccattgtggcggtaatcgccggaccgggtaccggaaaaaccaaaacgctggtttcccgcattgcctatctggtggaagagcggggtataaagccctcccagatcactgctgtaacttttaccaaccaagctgccgccgaaatgcgcgggcggttggagcagcggctgggaggaaaacgggcggtacgcggcatgaccattggtacctttcactccatctgcctggcattgctgggacaggtctctcttatcggcgggccggacgcggtgcagttggcttctcaaatcatacaaagccgggggttatccctgtctcccctccgttttttgcaggagatttctcggatcaaaaacggtggagagccggatacctctctgctggaagaaggcgcgttttcagactatgaagtgctcttagaacaaaaaggagctctggacttcgacgacctacttttgcgcgcactggaaagcgaggtcggctacggacggcatttttctcatctgctggtggacgaatttcaggatatcaacgacctgcagtaccgtctgatccgccattggaaccgtggcgggcaggggctatttgtcatcggggatccggatcaggcaatctacggctttcgaggtgccggctccgactgttttgcccgactgaaaaaagatttgcctgaccttcgggaaatccggctggtacaaaattaccgcagtactcctcagattttgtccacggcactatgtgccatcgcgcctaacccggggcctgtccgtaccctgctgcccaaccgccctgccgggaaaccggttcgcttgatggaaacagcgggagattttgccgagggcattgccattgcacgggaaatcgcccagatgaccggcggccttggcatgctggaggtacatcgcgacgaccggcaggatacggtgcgttccttttcggagattgccgttctctgccgcacccaccgacaggcacagctggtggaaaaatgtctgcggcacgatagcatcccctgcgtggtcgccgggcgggaggattatcttgccgacgatgaagtacgcggaacgctgggctttttcggatggctgctgcatgagcaggacacattggctttagaaaatgcgcttcgtttgatctggcactgccccgccgatgtcgtacagcaggcgattcaagcggttcgccgggcaaaaataagagacatcgacatgctgcgggccgatacgtcagcctatccgcaccttattccctgctgggacacagcgcaagactttctgcctctggtgtcaaaggaaaaacctcgccgcctgttggaacgctggcagggagaaagtcccatttcatcctccatggaaaagttgcaaaacgccgcggtattttgggatgacatggcttctttccatcaagctctgctgctgggacgggagggagatcttcgccgggcggcgggaaagacgtacgcttccggcgctgtgcgtgtgatgacactgcacgccgccaaaggactggagtttcccgttgtctttttgtgcggtgtcaaggaagggagcattccgttggaatcttccaagggaaaatctgatttgcaagaggagcgccggctgtttttcgtcgggattacccgcgcccgggaagaattgattctgactgttcccggcaagccttctgtctttttgtctgatttgcctgccgccgaaatcttgcgggaaaaatccgctgctcgtccggtgcaggcggaacagctcagcctgttttgaaggttcatgcggcgatccagatattaaaaccgccgtcctaccaaacaccaaaagagcacaaaagcaaggatttttaagagaaaacatgataaaagccccgtcaaaacgactgggcttttaagggttcctgaacactttaaaacctgttatccagcggtcagccgaatgccttggccgcttttcccatcgggggtaacagaaggttttcagcgtgcaagcggaaaaaccaatgtcaaaaaaggacaaaactctctataaaaaatcgcggtatataggtctctgcttgcagaaacttacatgccgcgattttggtacgcctgataggaatcgaacctacgcacccggctccggaggccggtgctctatccactgagctacaggcgcatatgaaatggtacagtttagtatatcacattttttccaaaaagcaaagcacttttttgaaaaagtaaaaaaacttttttcaaaaaaatcattgacattccctgtaatggatgatataatcgcatacgttgacacaaaccgccatttaaaaatgtgatatgcgggtatggcggaattggcagacgcgttagattcaggttctaatggtcgc

SEQ ID NO: 508 - DNA, 2379 bp, Unknown
  16S sequences of unknown bacteria
aagacggcagtctttcttctaaattccctcacttgaatcttaagtgaaacttacatagcggaagtctcttagaaggcgcacgtcgtctaaggtaaagaaaattgctgcgctctttcttgagctttttttaatctttcggagagatttttaatctaaaaggcgttgcaccactcgacttaatgtgatataataattattgaatgttttgtgacgttttcattaaattatcggaaaagaagagattgataaagtatgaaagaaaaagaattccgccgcgttaaaaccatttctcccatgtccgcagtcatccccttcatcatggtcaaccgtacaggctcccagaacttcatcagcgactccgtggatatagagaaagttgaaaaatatattaaagaaaaacagacgcagggtatgcagaacatcagtatgatgcacgtcatgatagccgcgtatatcagacttgtctcccagcgtccggctctcaaccgcttcatcagaggtcagagagtttggacccgcaaaaacgtcgaggtttcccttaccataaaaaaggaaatgtccctcgactcccccgatacggtcgtgaaaatcactctcccgccgtcggctactctcgaggacgtttataccgcgctcaataacgaaatcgtgtcctaccgcgctaatcccggcggagattttgacgataccgcacgcgccttcacccgcctccccggtcttatctttaagttcgccgtggcgtctctccgcttcctcgactacttcggtcttatgccgaaagctatcgcaaaggtcagcccgttccactgctcctacttcatcacctcaatgggctcgctaggcatccccccgatttaccaccatctctacgacttcggctcatgccccgtgttcttctcgttcggcgcaaagagacgcacttatgaaatagacaacaccggtttagtcaggcgcaggcagtacatggactttacttttgtgctcgacgagaggatctgcgacgggtattactatgcgtctgctctcaagctgctcaaaaatattctgaaaaacccgtggcagcttgacgaagttccgaccgtcatccccgacataccgtaaccatgccgcacataccgcattccgctactcgggacgcgcacattctcactttcgaggaagcaatggagggaaaaagcaccgcctacgaccgcgagaagtggatatacgtaccggatttttactccgaataccgatacatacttgggacgcgcggcaagaatccgctcatagccgtaggaataaatccatcaacagcggagccggacaatctcgacaacacgctgaaatccgttgagaggatagcgcattcaaacgggtacgacagctttataatgttcaacgtttacgcgcagagggcgaccgaccccgatcttatggagagggaattcaatcccgaactccaccgagagaacatgaaggcgttcgactacatactctcactctcggagcgtccgtcgatttgggcggcgtgggggacgataataaaaaagcggaagtatctgccgttatgcgtcgccgacatgataaagctcggggaagagcatcatgcgaggtggtacacggcgggagcgaggtcgaagtcgggcgggcatccgcatcatccgctgtatctgcgcagcgacactccgctggacgagtttgaggtaaaaccttacgtcatggggtttggcttagacttcgcctaagaatctttcaagaaagagcgaagcaattttctttaccttagacgactaaagccttctaagagacttccccaagggagattcacttaggttttaagtgagaaaaaagtagaaagactccgtctttcagattaattattccactccgcgtggggcgcccttttcagggggaacacagagaggctcaggcgcctgtcccttgcacttactatgtaagtgcggagttaccggcttgccggtttcctttagcttaggaataaacttccgtctttgcccccgtttactactggcgaaagggtcttcttagattttggctaaccgccggatttatacctgatttattctgtagttgatagcggtattcatagccgaaatttctacactatcaccaattttgtgaagccgaaacttaaagttcagttcgatatatgctgccgcactggattgtacccacgttcgctgacggaagcaaaacgaaattggacgttcgctctccgtcaacgcaatttctaacgccaatccgcggttagcctaatccaattcacttatgatttggtattctcgacctcgagcgaaagtgaaagaaatgatttgtacaaactccccgcgtctaactctcccgcgcgaacattttaagctccactactacgcttta

SEQ ID NO: 509 - DNA, 14463 bp, Unknown
  16S sequences of unknown bacteria
tggatttgccatatttcttgccaagctctgcaaacaacggctcttccaaaagggccttgtcgccgtgccccagcggataccacgattgcgcgaccatgccgttttcctttagaaacgctttcagttccttttcctgatgataaggatgcagctcggtttgcagtaccgtaggcctgacctcacaaatgctcaagatttcttccatttgttctttgttaaaattggaaaggccaatggcacgaaccttccccgctttataggccgcctccatttggcgatatcctgctgtataattgccggcaggttggtggatcagcagtagatcgatatagtcagtatccagccgttccaacgttttttccactgcgtcggcttgctcatagaagctgggccatagcttggtttccaaaaaaatctgctcacggggcaccccggattttttcatagcgcggccaacggccttttcattcacataggcattggcagtatccacaagccggtagccgtttttcaatgcgctgaggacagaattttccgcctcgtcaggggtcagcaaaaatgtgccaatgccggccatgggcatctttacgccgttattcaatgttgtgtattccatgataaattcctcctttattcaatcgttgcacgcaacttggccgcttcgtttttattggttgccatcccactatatgtcatcccatacaaagaggcaaaacgcttgatggtatattcgccagcttccagcatccacttttcagggctagcgccttgaaatagaaaatatagcgttcgtccggaaagggcgttgctgtctactcttccatagaaccgatccagcacattgcgtaagcttccgcagatattgtgccaatacagtggagaacccaggacgattacattggccttttccatcgcggaaatgatagtatccagctcatcacccggcagctgctggccgtaagcgccaatggtataatccgtaagattcagcgtttcataagcctttccccgtaacaattcctctgccagcgcggcagtattgccatttttgttcgggcttccattgataaataaaatgttcatgttcctcactccttttgcacattttcatccatacataggggttgccatcgcggatgtattcctactccgtacctggcttatacacaccgcattatcaaaacatatatcctgcgctatgacatttgcggcatgctccccgtggttatttttattttttcaatgactgtgtacgttccaggcttcctttgattcgcaatattttgcacataaatccgtattttagtctgagaaaatcgcttccagccaagcagcatagtctgccacccagccgccatcggagccaaagccgtgcggccagccgtctaaaacgatgcggcccgtttgtatacccatacccttgaccacctcatactgctggcggaattgctcatagaatggatcctccgtaccgtacacataaaaggtaggtggcaggtctccttctgcgagccatgccgaatccatgttccctacgctgagccggccatagaaagaataaacgagaccggcagcggaagcatgtgcggatactgtatccagttcatcgggaacatagccgctgtccaaggcagttccgtctatatcttcatcatagtgcattaagaattccccggcctggatccctccggcagaaaagcccataacggcaatatcctctggatcaatgccgtatacatcggcatttttacggataaaccgaaccgctctagccacatccagggccccttcctcttgcgtataaggcgaaagccgataatcgacaatgaaggtttggaatccgagctcccgaagcgccgcagcggtgggaagagaatcggtataattgccccgaaattgataagcgccgccggccatcaacacaacggcccctttggggcggacgccttttcgaacggggatggctgtcatataagggcgaaaatcccaattgtcaaagtattctgtcatgtttggtgtaaagctggttttcgctggaatgttgttttcctcccaaagatagagcacctgaataccgcttggatccgcctcggtattcaaaaccgtagcgtttccctctggcattggcatctttctcagcatatcgtctctggaataatcctgaattttaccgctgccaaaatcatattcgtctggaaaatcgtcgggcgtcgccacggtatcctccgatgtgccgtctcgaaaatcttccctatcttctctgtcaatggaatcgttctttgttatcatcgcatcctcgattgcgcttacactactctccacattgccgctgggagccctctcgggctcctctccgcaggctgtcaataaaacactcatggctgtggccatcaagagggcgataattctttttctattcattgcacgcccaagccattgacccattcgcgcacactatccgcagaaacaccggaagagaatctctgcccctccagccagttgccagtgccagccatttcggccagcagctcgccactctgccccataccagaggaagaagaggttgcaaaaggaatgacagtctttcctgtgaaatcattggcttggacaaaaccgtctacgggccatgccgcaatgccccaccaaattggatacccgatgaatacggtgtcgtattcatcccaattggatacctcggtagtcgtcagggccacatcacgcaaggattcatcctcatgctccctgcttacacggctgtcgctattcgtccagtccaaatcctcttcgctatatacctcaataggaacgatctcaaaaagatccccgcccgtagcatccgcaatatcttgcgcgactcgctcagtattgcccgaagcagaatagtaagcaaccaataccttcccgccttccggttgtatactcgaatcattttcagcagacgcggtagcggtgggcgattgtgtagcagtaggcctgtcgccattgccacaagcggcaaggccgagcacgagcgctagactcaacaataaagccgtcagttttttcataatcattctcctttcaagtcacttgcatttgttcaaaatttcatatatttcatcatgggtcagctttttacagcagcctgcggtgatgtttgtagagtttgcaatggcgcggaaatcagcatcgtcaggaatgcccaattccctaaaggtggtaggcagcccgatctctttgataaatgctgtcattgcatcaatgccggccaacgcggcctcctcatcgctgtcattttcaatattccacactgttctggcaaaccgagcaaaacgaggcactccggatttataaatgtaacggtagagcgccggatggatcactgccaaacctgccccatgattgcagttggtgtatgcgccaagctggtgttctatctggtgcgcttgaaaatctgtgatttttccgattctcaaaataccgttctccgccatggcggaggcccatgccaactcgcttcgcgcgttgtagctttcgggggcggccagcagctttcggatattatggatcacgctgcgcatgaccgcttcattcatatcatcggagagattgttctgttccggcttgccaaagtaggtttccatcgcatggcttagcgtatcaaaggcgccagaaatcacctgttttatcggaacggacatggagtatatagggtcgaggaatgcaaactctgcctgcgcgcccaatatacccgtcttgattttcttggcttcatgggtaataactgccccgttattcatttcagagccagtaccaaacacagttatgatggttcccaaaggaatgaatttcgaaggatatgtatgcttgatggtttccaactcccaaatatcctctttcagctttgcttgtgcagacacaatcttacaacagtcggatacagatccgccccaactgcaagaataagatccacatcattctcccgtgccagcttggcgccctcctgcacttttgtataggtggggtttggcattatgccgggaaattccaccacacgcttatgtgcggtgtgcaaaattttcattacctcgtcatatacaccattttgcttgatagagccgcctccataggccagcataacggtatccccatattcttttaaggtacaacccaggtattctcccacgccccctttgccaaagaatactttggttttattctgataaagaaaattgttcataatcatcctccattgattgctttttgcagagcaaactgcatcgatcatcctcaggctatggcatctatctttcagcattttccactgtctctgtcttattcatttgtcgttcccaaaaggaaactgcatcatttaaccatccttctgccacggtgcccgttccaagaccaaaaccatgctgtagccctggatacgaatgaaattctgtatcaatgcccatgctatccagcacttccaaccggcgcttcatctgctgccaagaagcaatgccgtcgttttcccctacacaagcaaacgtgggtaggtcaaactcactatattcgctatacccggtgtattgcataatcaccgctgcgggccgaggcaaatcatcgccgccaaaggccgctgttccataagacgctacccatgcggccatccggccgccggcagagccgccccagagggaatagtcggaggtatccacttccagttcttcggcatgctcaaaaataaagctaatggctctggccaaatcttcgcaagcggcctgtgcgctgggacgatagatcaaagcaaacgcgttatagcccaatttggaaagctccaaagcgtgaggaaaactatcctgcatggcgccaacatatgcaaacccgccgcctgcattgcacacagcaaactttgcaccagggggtcttttgaaaaagaataggcccgtattccgcttgtccggatcttgtgtcttttcctcttccgtataaatatcataaaaaatggtttggcccgcattggcacgctcttttaatgaattgacgatttccaccgttttatttgggcgatgttgttgtaccaaaccaagctaagggtgcccaatgtatcgccgctgtaatagccttcttctattggaaaaagcaagcgtgcatactctccaaaggaaggatcgctcaacacctcctcgatgggtgtatcccggtcatatgccgtcatttccgtttcctccgcttcggtggcgcttatcgtcgtgttcatcgatgggccagaacatcccgtaagcaaaagcgcggcgcagagaaaagtgctgatccttgtaaaccatttcatttcatcacctatatccccgttgctgtcctgattataaaaaaaacgagaccttctcagaagtctcgttttgttcattggtttataccttaaggttatatctatatgacatcaatacaaatcatggttaaccgcttttgccgcatccaggaaccgctgcaccgctggcgtaggctccggccatggagcagcccatatggaatgctatgattccattccaccgggattacctttagcagcggatgcacatgggcccaaccgggaattgcaagcaatacatcgttcgtgttctcacatcgattgaacacatccatgctataaaaatcaaaatccacgatatggatttgatggtggtgctgccataaatcatcccgaagctggtctacatagtggctccatcctcggtgcatcagcagcagattttcaccgtaaagatcagagagtttcaatttgtcttttgccgccagccgatgatggatggacacagcgcaacagaatggttctcttgacagctccaatccggcgcatgaacgaagatccagcattgtatcatcaaaaatgccgccgattacatcaatgtttttccctaaattggcaaggatctccctcgcattctccggggtattctcaaagggaacgatttgaaatttaatatccggacacaaagtttgtatcctcgaccatagctccatgagaagctgggcaggcgtggtaggcgatgagccgatgcggattacgcttccatcttcctgcatggcgtttttcgcccgtgtcacggaatcccggcaatactgaatgatatactttgcatcttgatatagggagtgtccagcatttgtcagcgttaaaccgcgatggctgcgctcaaataattttacgcctaaggagctttccagcaaattgatctgcttgatcaccgcagtgggcgtaatataactttcttccgccgccttattaaagctccccgcatccgctgcacggataaaggtctctagttgagggttatacatcgtcttcgccgccctttctctgcaaatctttctatttcactatacacttttataccttgcaaaagcggcaaatctctgctctctttaacacaatgacttttatccccattgtacagatatttctacctatatacccgctttcttcaaggctttgcgctatggtagcggccatagcacgattgtcgtaaaatataagtttcctatgtgaattataccctaagaatattcagcgtcaaatgcaaattcctctgttctatacgcacagacatttgttctacatagggatttttgccgatagagatgtttctttccaactatttccagtgctaaaacgcatgattttcccgtagaatataggaacaaacgttcttgttttgaggtgattctttgcgtgtcattcttcattccgacctcaatgcgttctatgcggcggtggaatgcctgcaccaactggatattcgccataagcccgttgccgtatgcggccatcaggagttgcgtcatggcatcgtgctcgccaaaaaccagttggccaagcaatacggtgtaaagaccggcgacgccatctggcaggcccggcaaaaagcgccggggttgatcgtcgtcccaccaaattttccactatatcaaaaattctcacagttggtgcgcagcatctatttgcaatatacccccaacgtagaatcctttggccttgacgaagcctggctggatctcacgcagccgggtatgaccctggaacaagggcgcatcattgctgaagaactgcgcaggcgaatcaaagaggaaatcgggctcaccgtttccatcggcgtctcctggaacaaaatctttgccaagctgggcagcgactaccaaaaaccggacgctgttacgctgattactccggaaaactaccaatccctggtatggcctctccccgcttgcgaccttttgtatgttgggcctgctaccagcaaaaaactggcgcgatatggcatcacgacgatcggcggcattgccaacacaccaccggatttgctgcatacctggctgaaaaaatgggggctgtatctgcatgccttcgccaacgggtgggacaaatcccccgtgcagcctgctgataccatcgcccccatccaaagcatcggcaatagcttaacaacgccgcacgacttggacagcaatgaggacgtcaagctgaccctatacatgctgtcggaatcggttgccgcccggctacgcagccatggatttcgctgccaaaccgtacagatctccatccgcgatacagggcttggatggttcagccggcaacagcggctttcgtgttccaccaatctatccggcgaaattgcagacgccgcaatgacgctcttttgccgtcatcacgattggcaaagccccgttcgcagcttgggcgtgcgcgggtgtgatttggtcccggatacagagccggaacaaatctccgtttttttggatgagcagcaacgcctcaagaaacaagcattggagcgtaccatggacgatctgcacgctcggttcggggatgcggttatcaagcgcggtgttttgttgacagaccctgccattggtctggccaatcccaaggatgaccataccatccatccggtaggatactttgcctatggcatatcataaggaaaggtgatttgtgttgtatgaaaacaaagtcaagacgtatgtatcggtagaggtactctttgatgaggcaggtcaaatgataccacgtgccgttcagtgggaggatggccgtgtgtttaccatagacaaagtcctggatgtgcggcctgccgccagcctaaaagccggcggacagggggtgcgctacacctgccgtattcgggaccgagaaacgtacctgttttacgaaaacccccgttggtttgttgagcgcaggcggacataaaaaggagcctaactaggctccttttgtttctcctgcacaggcgtcagcttcccttcaaacatcgctagtatccgctttctcatcttcctcagtacccctgtattgttgagcagcatcgtgtcgattgcttggattcggaagctttgttcctgccctacatacccgcagtgcactatgaaattcgtgaatcctctcgtcggcctatacagcaccttggtcagcgctgcctgcctgtttttgatacagttgatggatatgatctgcaggtttacccgtggccctcgatgtgtactttgaactgctttccggaaaatactatctagaattttcgcttccttctcttcgctatacatatcttgataggaaagcacagctatgtattccatcaatgatcgatggcgcattctatatcgttgcccccaaagaatagatacatcttcctcccgttcaatatggatttccgtaaaccgctctgcctccatccaatcttgtacgttagtcattatctcatctgtgtttttcaattctatcttaaaccgctccggcttcttaggttttatcgatggttttgcgtacatcatgagaaaaaacgcaacagttccaggcaataatagatttataagccaccacggagaaccatgaaaccaacatacatatataaggcatggcgttcctatcacaaatccatacagagtgcataccattatagtatatatgcaggtatcgctccttagaaaatgcttccatctatttatattcattactccatccttcttccttaacgcgctcctaaaagaactttcatcaaactcgtaattgcataaaatatctgccttgccgccaattgctcctttgtaatacctgagctctgtttggtttcattcatatttaatttgcttgatgatactccacctctttttgtggactttggagaaatctctctggccatatctattgcattatttttaaccgtttccagtgttgctgatatcatatcgttatacaatagattaatagttgtcttttttcctaatgctccaaaaacataactcctaacactcttttatgggcgtcagcttcccggcaaagatggaaagcacttgctttcgcgtctttttcagcatccgctggttgttgaatgcgctgtcccagatccgctgcatccgaaagctcttatcctgttgtgtgtatccacaccgcagcagcaggatggcctctaagcctacctccgcttgtttatataaggctttggtcaacgtagactgcctgttttggatacagttcaccacgatggttttactattcaggtataacggattctttttgatttctcccagcatacggttatatagttcttccagtatggctatttcttgttcttccgtgtattgctcatattcaatcaccaccagcaattccgcgatataggcattgtgttttcgataccgatacccccaatacacctggcagcccagcagcgtatcatggtatatctggctatacttattttcttccatccaggccttgcagcatgcaatgaggtccgctgtgctttccaggcagctgtcaaatcgctccggcacctgtcccgggtcaatcggccgataatgccaatatagaaaaatcataatgaaccctggaaataatccaggaatcaatagccatcccgtctctgttagctcaccaaggatgatacatccaaaccctaccgttaaagtgtatattaacaggccgataataaacctttcacactttttgcttctaaagaactcgcttcgaacaaaatcatcccacttttgtttccatttttttgtcaactcataccctccattttagtgaaaaaagctcagcatccatttcatcatatccatcactgcctgaaccgctgcttcggcagcctgcaatgctgcagcgttgccatttgttcgattccctgtttgggaaccgcctccgcgttttgtcgacttagcgcttaccctttcgccaggggcaaatgccgtggtctctcccctgaataaatccgccggcatattttgcaatgcagctgccaactggtttgcggtcatcttttgtccatagctcccaaaaatatacgacttgaagctcttgggttggaaccatcctttattgatcttatatggtttataatccaaccctacttttttcgtgacccagccggcagctgcgtcaaccgctacatcctttcctatattcagggctgattcccccacattttcccaggtgagttcctttttccccgataaataatcccctgcctcgtttgctgcactctccgccgcactgcctgccatgctggccaaccttggcttaaacgtgctggcaaaaacagctccctctacagcgccgcctatgccggcagcaatcacgccatcaaataccggtttcccctgcaccacatttgtcactgcctttgcacccattctaaagagtcctccaatcgctccagctaccgcctggaacaaccaatgccctgttgggtctgtatagtttgtcgggttgttggaggtataggtgtacaggttctgtgtccacgggctgtacggatcgccgcttaccgtatcctgttgcaggaaccggcctgtgttcggatcatagtgacggctcgacagatagtacaagccattgctgtcctgtacagcgcctgtgaatttcacctcattcttgatcgacgtcgtaggtgttgcgctgccactgtcatccttgccgaaggcgtcatagacattgttttctgcgcggtacaacgcaccactggcatttgtgccgatgatattggttacgctgcctctcgcatcgtaatgatagatccaatattggccttccggcttattcggattgtatacattatcctgtcgtttccccgcaatgatcgttccattcgggtcaatgatgttttcgtccgtgatgtagttcgcatcgctgttggtgctgaacgccagcgccccacccatgtagaaatacatggtgtagtcgccgttggtgctgctgccgtctgttttccggatgcgctgtccttccccattatacaggctggtgttcagcgttgtccaattaattgctgccgccgttggctttctcctccaccttgatcagctggttggtcgtatcatagatgttgcacatatccttggtcttggcattcttcatggcatccatgtttacctcatatgtttccttccccgtctggttgccgaaatcgtcgtaggtatatttttccagcgtttgactcatggttgcctacctgtatggactttgtctgtgaacccttaattttcatattttatttgatgcggccaatccaatcatattggataattttgatggtctcacaaccagtttacatgccataagaaaaataaaaaaaggaacctgaaactcaggttcctttggtagcggtagtaggatttgaacctacgacaccacgggtatgaaccgtgtgctctagccaactgagctataccgccataatgccgttctttaagaacgccattagattatacaaatcattccgcataatgtcaaggttttcctaaaaaatctcctacaattcatgcaatcattgccatagcttccaaatttcggggcaaactcccaccgtagccttgtttccattgcgaacgatgggcgttttcaaaatctgttgattttctaaaatcttctcatctatatccgtttccactgccaagtatggtagatagcaatcctcatattcctttgccttttcatccaccagagcctgccatccacccatggcagccttcacagagcgatattcccctttactcatcggcttttactttatatcaatatactgcacagggatctttctttccttaaaatagcgaatcgcctttttggtatcaaagcattttgccttgccgaaaatctgtatcatgctaaggtttcccattccgccggtttgaagcccaccaagatgcgatcttgtgtaatcagcaacgggcgctttaccagcataccgtccgttgctaacaattctatttgctctgtctcagtcatattcggcagcttgtcctttagctgcaatgccttatatttcaacccgcttgtattgaaaaaccgtttgatgggcagtccgctctgggcaatccaacgctttaattcatcctgttttggattctgctctacaatatgccgttcctcaaactcaatgcccttttcctccaaaaattttcttgccttctgacaagtagagcatttgggataacaaataaaaatcgatttcatcacaaacctccttttttatatcataccttgtttgcatatcatgttacaataccaaaaaaggaggcgcctcatgtctgaatctgtcatccatcctcttccccctttattcgatgcaaatagccgggtactgattttaggaactatgccctctccgaaatctcggcagaacggattttattacgcgcatccccaaaaccgcttttggcgcgtgttggctgccgtatgctgtgaatccatgcccaccgacaatcaggatcgcgcctctttttgccaccgccatcacatcgctctatgggatgttcttcatgcttgccgtatccaaggtgcggacgatggttccatctgcgatccacagcccaacgacctaaggcctctgcttgcccaagcgcctattcaggccatctttacaacaggctccaaagcttctatgctctataagcgatattgcctgcccgtcaccgggcgtcccagtatcccacttccctctaccagccctgccaattgccgttttcacacgctggaaaccttgatagaggcctatcgcgctctgctgccctatctggagaacatttaacatcagctttacacaagattgacggaacaaacacacacggctggtatgattttgtgataaaggaggagaggccatgccatccacttatgcacactacacctttggggaaaggatgctccccctgtttcccgctaagattcgtgctttgattcaagagaatcgtgctctttacgatatcggtcttcatggtccggacattctcttttactataaggctctgtgtagcaatgaagtcaatgctgtcggatacgaaatgcatgataagcccggggctgatttttttgctccggccaaggagatctggcagcagtttcgcaccgatggcgcttcatgtgcacagcacaccgcctatttattgggatttctctgtcattatgctctggatcaatgctgccacggctatgtggaaaaaatgatggccgtttccggtctttctcatgcggagattgaaacagagtttgatcggtttcttttgctccaagcaggcaaagaccctttacgcgcacaccttacacagcatatccatcctacccgggatcgtgcgcgtgttattgctgattttttccctacgctgaccacagagcaaatctttcaagcgctttgctccatgatccgttatcataagctgctccgcacacctggtacgcttaagcgcagttttttgctcggcattttgaaaatcagcggcaattatgcggacatgcatggtttgctcatgcgtaaaaacagcaatcctgcttgccaactcagtaacaatggcttatctcggcgtctaggccaagctttgcatgagtgccaatcactcacccaagagtatcttgactgtctagagaaaaacacgccgctgagcacgcattttatgcctacctttggcgccggcgattcatggcagcatatttcattggaaagttaggagaaaagcatatgaaattcaaattaaatgctttggagaaaaagtggatcctttatgatgtgggcaattctgcttttacattgttggtttctaccatcatgcccatttacttcaacgccttggcagaaagcgccggcctttcggatgtttcctacctggcctattgggggtatgcagtttccgcttccaccattttggtagcccttctcggcccaaccataggcactttttccgatttgcgcgggtggaaaaagccaattttcttaatttctttgctcatcggcgccgtaggctgtgttctgcttggtattctgcagtcttggctttggtttcttctgctctttatccttgctaaatccgcctattccctgagtttggtattatacgattccatgctcatcgacgtgaccacagaagaccggatggatcaggtatcctctcacggatatgcttggggctatatcggcagctgcattccctttgtgctctgtcttgcat

SEQ ID NO: 510 - DNA, 2231 bp, Unknown
  16S sequences of unknown bacteria
ggcggctccgccggtcggttagtcgaacgcgagcggcgtgtgagcgattcctacgcgctttactgccatgtagggctcgacggtgtcgcgccactttttgtagtgttcggtttctttgtgcgctttcgcgtcttcgggggtcttgtagacttcgtagagggtgaagtaggtggggtcgtcgttcgactggaggacgtcgaagcggacgttgccgggctccttgcgggagttttcgtggttatagagggagattttcttgaaatcctctacgttttccggctttacgtggatgattacggttgtcgctatcattttttcacctttatatcatcttgaagaattcgatctgctcgttgtccggaccgtagacgaacgcgatgcggagcgtgaccttctcgggcttgctgtcgagcggaacggtcttcggaggggtgagcggcttagcgcctgccgcgagagcggtctcgtatgcctgatcgacgtcgtcgacgccgtaagcgaagtggacgtacttgccaagctcagcctcagcgtcagagccgccagcgaagagttcgagtatgccggcgccggcgccgaacttcagcatctgcacgtgcccgtcgccttcgccccacgagatgtaggggatcattccgagaccttcggtgtagaacttgtaggacttgtcaaagtcggttgccttgagcgcgaggtgcgcgatggtgagcccggggatcttcttgttttccatggtatttgttcctttcatatcatttcattttcagagttcgattatcattccgtcgtacgagacttcgaagccgccgtcgttcgccggcttcaggaaatcgtcgtataccgagcatttcccgttgtgtgagaaatggttcgcgatgaagcgcgtcttttcgtccgcgaatccctccgcgaggaaacggcgcctgacctcgatattttcggtgagcgacatatgaccgatatagtcaagcggagtcagcgcgttgcagcagtcgagcgagaccatgtcgaagcgcggtttcatctccgcgaggaagtcccagacctcatccgggaagaaatgcgtgtcgtgcgcgtaaagtatcgtcttgtcgccgtccgagattatgtagatgagcggaccggctttcgggtcgtgaagcccggtgagcggggttatcgtgtaattctgcgttctgaacggctcgtaagccttcacctcggtgaaggtgacccttccgagctttgtcaggcgttcgagcgtctgcggacctctttcggtcaccgctctctccctgacctcctttgagccgaagaaatcgagcctccagccctccggcgggtttgcgaagcccgggaggatcatctcgaggtcaacgggatagaaatgatcagagtgcgcgtgtgtgatgacgcagctgcggatattcgtcgagtcaatcccgaagcgctggatatgcgtaagtgtgtccgccccgaaatctatcagaagtctgccgtcgactattgcctgcggtcttgacctgacagctctgccaccgatgagccgtgccttcttacagttgtcgcagccgcagaaatacgcgggaatgccctccgccgcggctgttccgaggtatctgaataccatttttgtctccttaatctcccggcagaaacgccggaagccggtacggctcatcatttttttgagggccgtaccggtgattcatgttgtgtgttatttcgaggtgtaagtatccgagagatccgcgatcttctcctcgacgtgcttcttttctcttccgcggcatccgtcaatgcgcttcttcagctcgccgtagaactcatcgccgtctatcgggagattgacgaaatcattcttccaggacgagagcatcatggcgttgcagatagacagcccgttgattccttcatatccggacgcgagcagcggagcgccgttcacgaggtgatcggtgaagttctggaggataccctggtgctgaggtccggcgttctcgaagtgatactcgatcttctcgcacttcggcttgtcgaagcctcctgaacagtcgcggcaccactccgcgccgtcaacctcgttcttccagaaggtgagcgtcgttccctccgcgaccatcttgcccattgttccggtgatctcgagacggttcgtaccgggagtctcgccagtcgtggtgatgaacacgccggtcgcgccgttcgcgtattctgcgtacgcggtgacgtcgtcctcgacctcgatgttg

SEQ ID NO: 511 - DNA, 10720 bp, Unknown
  16S sequences of unknown bacteria
acggcggctctgccgtacctgctggcgttcgcggcgggagcgatgttcgcggtggtcgtgaaggagcttgtccccgcgtcggcgagcggcgcgcacccgtatgccggaacgctcggagccgcggcggggttcgcggtgatgatggtgcttgacgtggcgctcgggtgagcgtcaatactgtttcgagaatgtaaatttcttccggattttcgaattcctattgacattgtgggagaaaaggtgtataattactactgaaacggtgggagataagaaaagtgtcgatccggagcacgttccacggttggcgcatcgcttcgttttctgttgtgatccgcataattttccccgttttcgcaaaccataatcaaagatgtgaatcaccttcccttataaagctttagaaagaggaagggggtgcagggggagggagaaaacctttctcgaaaggttttctccctccccctgcgaagctaaggaggaaaacgtcatgatgatatcttcgaagggccgatacgcgctacgtgtcgcgcttgaccttgcggagcaggacagagaggagtatatcagtcttaaggatatagctgagaggcagaatatttcgaggaagtaccttgaggggatcatgactgagctttcgaagtgcgatatcgttgagagcgctatcggtaagaccggagggtacaggctgcggcggtcgccgggcgagtaccgggtcggggatatcctgcgggcggctgaggggcagctgactccggtggcttgtctttccaaggacgggaagaagtgtgatacgggagagtattgttcgtgttatacgatgccgttctggaaggggctggaggatcagatcaacagttatattgacagttatacgcttgaggatctgctccggtcgaagcgtgagggcgcggaagggtgcccggcgtgctcgcacggctgataaatgtgaattacggcgttgtgccggttaatatattactttttgaaaaggaacatggattttatgaaaaacggcagtttgcttgaaataaagggtctgcgggtttccgcgggcgagaaggagatacttcgcggggtcgatctttcgatcggacgcgatgagacgcacgtgctgatgggtccgaacggaaccggtaagtcaacgctcggttatgctatcaccggaaatccggcttataccgtgactgagggttcgattgtgtttgacggggaggatatcacttctctgccggtcaatgagcgggcgaagaagggtatattcctttcgttccagaatccgcttgaggttccgggagtcacgctttcggcgttcatccgcagcgcgctcgagcagaagagcgggtcgagaatccgtctctgggacttcaagaagaagctgaaggaaacgatgaagctcctcaatatggatgagtcctacgcggagcgcgacctcaacgtcggcttctccggcggagagaagaagaaggcggagatacttcagatgctgatgcttgagccgaagctcgcgatcctcgacgagactgactcggggcttgacgttgacgcggtgcgcacggtgtcgcagggcgtgagcctgtaccgcgagcgcaatcacgggtcgctgctgatcatcacgcattcgacgcggattctcgaggcgctgaccgtcgacgcggcgcacgtcatggaaaacggcgtgatcgtcaagaacggcggcgcgtcgctcgtcgacgagatcaacgagaagggcttctcggacatagacgctctcggcaaggaataaggtgcgctcatgcaggataaagagataaaaagagaaaagacagaggtcgaggatatcgaccggtcgatatatgatatccgcgacgaggagcacgacgcctaccgcatggaggcgggtctgactccggagataatagacaagctctcgaaggagaaggacgacccggtctggatgcagcagttcagacttcagtcgctccagatatacaacgagatgaagatcccggactggggtccgtcgatcgagggtctggacatcgaccacatcgcgacttatgtccgcccgaacacgaagatgcagaacgactggaagaatgtcccgcaggatataaaggacaccttcgaccgtctcggcataccggaggcggagagaaagtcgctcgccggcgtcggcgcgcagtacgactccgagctcgtttaccacaacgtgaaggaagaggtagcagcgcagggagtcgtctacaccgacatggagagcgcgatgaagggcgagtacgccgacatggtgagaaagtacttcatgaagctcgtgacgccgagagaccataaattcgctgctctgcacggcgctgtctggtcgggcggttcgttcgtctacgtgccgaagggcgttcaggtgtcgattccgctccagtcgtatttcagactgaacgcgaagggcgccgggcagtttgagcacacgctgataatcgtcgacgagggcgcgagcctgcatttcatagagggatgttccgcgccaaagtacaacgtcgcgaaccttcacgccggatgcgtcgagcttttcgtcaagaagaacgcgaagctcaggtattcgacgattgagaactggtcgaagaatatgtacaacctcaacacaaagcgcgccatctgcgaggagggcggcgtcatcgagtgggtcagcggttctttcggctcgcacgtcggatgtctttacccgatgagcgtgctgaagggcgacaactcccgcatggagttcaccggagtaaccttcgcaggaaagggtcagaacctcgacaccggcgcgaaggtgctgcacatcggaaagaacacgtcgagctacatgaacacccgctcgatcagcaagagcggcggcatcagcaccttccgctcgagcgtcgtcgtagagaagaacgctaagggcgcgaaatcatcggtgtcctgccaatctctgatgctcgactccgagtcccgctcggacacgattccggcgatggacatccgcacccgcgacgcgtcgataggacacgaggcgaagatcggaagcatcagcgacgacgcggtcttctacctgatgagccgcggaatgagcgaggatgacgcgagagccttaatcgtcagcggtttcgcggacaacgtctcgaaggagctccctgtcgagtacgcggtcgagatgaacaacctgataagactggaaatgaaaggtagcattggctgagggtcggacgaattatggaacaaaaattactgataaacaaactgcccgcccggacgtggaaccggctcggcgtcaatgaggcgtcaatcggtttcgacatgacctcccccgagcttccggcggaaaagataacctccggcgcggaaataaaccgcgtcacggtaacgaacgagaatgattccgacataaagcgcgtcagcatcgaagcgaaaaacggcgagacaatcaccgttgtcgaagagataaacgccgcaggcaagctcgccgtcgagacaataatgtcggtcggcgatggcgcgaaaatacgtctgatacagctccacggcacagacgagaacgcgcttctcttcaccgacacaaagggcgagtgccataaggatggacgcatcgagatcatccagataatgctcggaaaaggcgatgtttattccgacacacacatcgacctttcgggcgacggcagctccttcaaggctgacatcggctacttcgcggagaagacgatgactctcgacatgaatctcgtcgtgaaccagatcgcgaaaaagaccgaaagcgagataaacgcctccggagcgctcaaggacgcggcaaagaaaatcttccgcggaaccatcgatttcaggaacggctcgtccggctcggtcggaaacgagaaggagaccgtcctgatgctcggcgaggacgtcgtcaacaagactgtcccgctgatcctctgcgccgaggaggacgtcgtcggaaatcacggcgcgactatcggcgagcttgacgaggacacgctcttctacttcggcacccgcggaatatcgaaggacaaggctgagaacatcatcgcccgcgcctcgatcgagcgtctcgcgcgcgaagtcggagactctgagaccgaagaaaagatagtaaagaaactcgatgaggtgctcccggatgcgtaattacagagatgatttcccactcctccggaacacagacctcgcgtacctcgacaacgccgcgacggcgcagagaccgaaatgcgtactcgacgccgaacgcgaattctacgagttccacaacgcgaacccgatgcgcgggctctactcgataagcatagaagccaccgaaatgtacgaggtggcgcgcgaaaaagtcaggaaattcctcggcgcggattcttcggaggaaataatcttcacgagaaacaccaccgaaagcctgaacctcgtcgcctacagctacggtcttactttcgtgaagcccggcgacgaagtcctcgtctcgataaccgagcaccacagcgacattctcccgtggcagatggtatgtcgtcagactggcgcggcgctcagatacatcgactgcgaaaaggacggcagcatcgaccttgacaaagtcgaaaaactcatcaccgataaaacgaaaatcgtcgcgatagcgcaggtttcaaacgtaatcggcagagaaaacccaataaaggaaatcgccgccctcgcgcacaaaaaaggcgcggtaatagtcgtcgacggagcccagagcaccccgcacatgaaagtcgacgtaaaagaactcggagccgacttcttcgccttctccggccacaaactcttcggcccgatgggtatcggcgcactctacggcagaaaagaactcctcgacaaaatgccgcccttcctgaccggcggagaaatgatcgaaaccgtcacccgcgacggcgcgacatacgccgaactcccgcacaaattcgaggcgggaaccgtcaacgcctccggagccgtaggtctcggcgcggcgatcgactatataaccgaaatcggctttgacacaatagaatccttagagcacgccgtaaccaaacacgctttcgacgaaatgaaacaaatcccgcacgtaaacatagtcggagcccccgaagccgaaaaccacaaaggaatcatcaccttcacgatagacggcgtccacccgcacgacatcagcgaaatcctcgcctccgacggcgtagcaatccgtgccggacaccactgcgccgaaccccttcacatccatctcggcataaacgccacagtccgcgcaagcttcgccttctacaacacgtgcgaagaagccgacaaactcataaacagcataaaaacaataagggaacgcatgggatatggaaaatagaaacttctacaacgaaatcctaaccgaacacaacatccaccccgatttcaaacacgaaatcgacaaccccgacataaccctagatggagtaaaccccagctgcggcgacaaaatcaaactcgaactcaaactcgacggcgacacaatctccgacggcgccttcaccggcgacggctgcgcaatctcccaagcctccgccgacataatgctcggcatgataatcggcaaacacaaagacgaagccctgaaactcgccgacaccttcatgaaaatgatccgcggcgaagcaacagaagaagaaatcgactccctcgaagaagcctccgccctcaaagacatagcacatatgcccgcaagagtcaaatgcgccatgctcgggtggagaactctttccgaagctatcaaataatcgtcagcttgcaggggaggaaaacctctttggaaaagaggttttcctcccctgcacccctcttttccagaaacttttatacatacaaaaacagccgctgaaaccaaaatcagcggctaatttttttactttatctcaagcatatggcgcagcgccttcgaataaatgcggcgtgccttctcgatgtcactctcgagcatatactcattcttctgatgctccgtctccgggctgtccgggaacagcggtccgaacgccacgatacccttcatcgcgcgcgcgtatgttccgccgcccatcacgaacgcctcccgcgcgtccccggtctcctcacgataaacatccataagcgcacggatcaacggcccgttcttatccatataaaccggcgccttatcctcgtcaaccttgacgctcacaccgtaaggctcgcactccctcgcgataatcgccgcgacgtcgcttcccttcttagttacaggatagcgaatatcaatcgtcatctcgatattctccccgacaacctcaataacgccgaaattcaacgtcagcgccccgctctgctcatccgacatggcacagccaacaaggcttccgtcgcaggtctcgccgaacttttcagagatgaacccagagagctttccgggagcctccttattaacctccgaaaacagcttcagaacagcgttcacgcccttctgcggcaggcttccgtgtgccgacttaccggtcgcctcgaacctctccccgccgacaacagcctcacagtgatccggcaccatattatgcgccgttccgcccgcgaccgtctcaacgcccgaaccctcaagcggcatcgaaagcttcagtataagaatacctttctcgccgtaaaccgccgggaaagacgcgtccggagtgattccgaaggtcggaagctcctcatgctcgcggtaataattcatatcataccactcgccgcgctcctcggtcagaccgaacagaacgcgtatcctgcggttcagcttcacgcccgaatcgagcagctccttcattgcgtaaacgcacatcatagcgggtcccttatcgtcggatataccgcggccgtagacgcgcttctcgccgtcaaccgtcgccctagtcagcccgaagcacggatactcccatccggagccctccggaacgacgtcaaggtgcgcgagaatgccgatgatctcgtccccctcgccgatctcggcgtaacccatcagcccgccgccgatcttcttcgtgcggaaaccgaagctgtcgcacagccccagcatataatcaagcgcgtcgcggcatccgtcgccgaacggcgcaccctccttgtccgaatccaccgcgacgctctttatcgagagcagcccggcgagcgaatcataaaacttatcttccatgacgatcttcctttcatttatcaaaaatggttcttctcacatattatattaacgaaaacaggaaattatcggaggtagtcacatgaacgacacgtatcctttcgtcaacacgccgctcccctacgcgtacaacgcgctcgagccgtacatagacgccgagacaatgcgcctgcaccacgacgcgcacctcggcaagtacataagcgacctgaacgaagttctcgcgaagtacccggcgcttcagaagatgtccctcgatgagcttctgagtcttcccggctgtcgcgcttacccgcaggcgcgtttccgcccgcggatcattctgccgcccgccgacgcgctgaagctctgccgcagcgccggaggcgtcttcaatcaccgtctttttttcgagtcgatggctccgggcgcgaagcgccatccgcgaggaaacctcgccgcggcgataaaccgcgcgttcggcagctacgaggaattcacgaaaaagttcaccgacgccgcgatgtcggtcttcggctccggctgcgcgtggctcgccgtcaggaacggcgttccggtcatcctgacctcaaagaatcaggaggtcgtgccgctctgcccgattctgaacctcgacgtatgggagcacgcgtactatctgaaataccacaacctgcgcgccgcgtatatctccgcgtggctgaacatcgtgaactggccggcggctgaggcgagatttcagagctgtcttgggaaacactgaatcaaatcgggttttggcaataaaaagtcttgaatttatggactttttattgccaaaacgacctcagatcagtgtttcccttgagcaccgccgcggctgaccttacttatcagacccgtccgctatcgaatttattatatggctgtcctcgtcgaaatcgagtatattcgacaggatatagctgctgacatacattcccttcggagtgaacgcgtagcggtcgccgtcgaaggtcatgaagccgttgtcgatgtagataccgagcctgcgcccgtagagcgcgtcgaaattcagcccgaagcgctgtctgaactgttcggacgatatcccgtccgcgagccgcagtctcagcatgatgtactcgccgaccctttcctccggcgttatcgtgtaaagctcatcaacgagcccggcgttcttgtactggtcatatgtcaccgcgacgccgtctccggtcagcgtgccgccgtgcgagacgtccgcctccatcgcgtcgatgaacagcggtatgtcgcgtttgaacgagaacctgagatttctgaaatacgagtgcgcggcgcacccgagaccgagatattcgtcacagttccagtatttcaggttatgccggcactcatacccgggcagggcgaaattcgagatctcatagtgtctgaaccctttcgcctcaaggtatctgattccgtcgaaatacatatccgcctcggaatcctcgtctggcaggataagtgtgtctctcgccgccgcgaacggcgttccgtcctcgatcttgagcccgtacatagagatgtgctccggctcgagcttcgtcacgtaatcgagagtgcggttgaagctgtccggcgtctggagcgggatgccgtacattatatcgacatttatatttctgaatccggcgtttctcgcggcgaggtagctcgcctcgaagtcctctcttgtgtggatgcgcgagagagcggaaagctcctcctgatttgcgctctggagaccgatgctgaggcggttcacgcccgctctgcggtatttcgcgagggtggcgccgctgactgtcgccgggttcgcctccatcgtgaactctgccttcttcggcacgtcgaagtttctgtatatgccgtcgatgaggtcgcacacatatttcgcgggcagaacggtcggagttccgccgccgatgaagatcgtgtcgaccgagtaattcttcgccgccttagaatagtcctccatctgaaggagcagcgcgtcgacatatcgccgcatatcctcgtccccggtgcccgacacggagcagaaatcgcagtaagcgcacttcgccttgcagaacgggatatggatatacagtccgagtgattttttgttcattccgaaacaccttcttctttttgggacgtcttgtcctgccgggaatttttcttcccggcttttttcgcggctgtctcacggctcgcgtgcatgagtgcaaggataacgtcatagtccttcccgcggtcggcaaggacgcttatccagctcttcttgttcatatggaacgccggaaaaacgcgttctccgtcgctcatcgccgccgcgtccgcgcgcaggttcacgacctctgtcttcccttccgttcccgggaggaacttcgcgagcgggacgaccatgaagaccgcgtaccactttccgctctcacggtttctgagtatacagcagtccggcgaattctcccagagaaactccggcgtctcgccccatatcttctccgcgtcggcgataagccttgacgtctgaccgctcctgaaatacggcgaataaaccgcgcgctcaaagcaggcggaagtgacgcgggataccgcgtcctcatattccttcctgaccctgccgacaaactccccggacgcgtccgtcaggtggaggacatactcctcgccgtcgtcataaacgctggtaaaaagctctccgtccctgacctcaaacgtcagcgtgaagccgcacccgagcgtttccgagtacctgagaacgtcgttatccccggaaaagccgtattgtctgagttttctgatatccggtctcccggcgtcgatcctgttcatcacgcctcgtcgtcgagcttcagcaccgccatgaacgcctcgggcgagacctcgacagaaccgagctgacgcatcttcttcttgccttccttctgcttctcgagcagtttcttctttctcgtgatatcgccgccgtagcacttcgcgaggacgtccttgcgcatagccttgaccgtctcgcgcgcgatgacctttccgcctatagccgcctgaaccggaatttcgaagagctgacgcgggatattgtccttcagcttctcgcagatctttctcgcgcggccataagccttttcctcatgaacgatgaatgacagagcgtcgacaatatcgccgttcagcaggatatcgagcttgacgagcttcgacggcacataacccgtcatctcgtagtcaagcgacgcgtaccccttcgaccggctcttcagcgcgtcgaagaaatcgtaaattatctcgttaagcggcagattataatgcagctccgcgcggtcggtgtcgatataagtcatattaatgaaatctccgcgcctgtcctggcagagatccatcagcccgccgacgaactccggcggagttatgatactcgccttgaccatcggctcatacgcgacgtcaatctcgtccgggttcgggtaattcgacgggttatcaatgaacaccgtctcgccattcttcttctctatcttatagataacgctcggcgccgtagtgataagatcaagattgaactccctctcgagcctctcctcgatgatctccatatgcagaagcccg

SEQ ID NO: 512 - DNA, 5678 bp, Unknown
  16S sequences of unknown bacteria
atgtggggccgtacacagacatacttaccggaaccgaaaaggccgaagggatctccatgctgctgcgggctatgaatccgcaagtgattgctgtggacgagattacggcgccggaggatatccgcgccatgactgtggctgccaactgcggtgtggcctttctggcgacggtgcatggccgggatctggacgagctgcgccggcggaagctctgccgggagcttttggatacagagctgtttcaccaatttattgttctggagggccgcggcagtgcacgtacaagccgggtggaacgatgctgaagctgtggggagcggggctgattgccctttcgccggtactgttggccctgtcccgttgggcaaagcactggcaggaagaccggctcctggaagcgtttctcgaggcgctggatggctgcatggggtccatacgctgtgaacacactgcgttgcctgtgttgtcagcgcatatggcacagcaggggccggtattactgcgctctttctggaggcagctgtgtcatgcaatggaagaacgggacgcggaaccggtccggctctggaggcaggagctggatcgtgtcggccttccggaggcggcgcagcggattttagagccgtttccggcggcgctgcgctcttacgatactgaacaggtgctgcatgcgctggagcggatggccgtggcactggaagagtaccggaacaaagaggccggttccttccgcagagatttcaaaacgcatacgggtctgcaagcttcagcggctttgctgctgcttattttattgttttagagggataatgcatggatatcgatctcatttttaaaattgcggccatcggcatcattgtggcggtactcaatcagctgctggtgcgttcgggccgggaagagcaggctttaatggttacactggcggcgctgatcattgtcatgatggtgatggtacagcagatcagcgacctgtttgcgctgaccaaaagcctgttcaatctgtaatggtatggagctgcttgtgaagctcctggcactgtgtgtcttgggagcggtatttgccctgctgctcagggaggaaaagcaggttttggccatttttgtcattttcgccctggtactggcggcgatcccgcttttgtgggaagcattggtagaggtgttttcctttttccaacggctgatcacgctttccggcctgtcagaaaaagtgttttcgcccatgttgaaagtggtgggaattgccgctgtgactaaagtggggacgagcctttgtaaggaagccgaatcggatacggcggcagcactgctggagatgggaggaacctgctgcgcgctgctggcggccctgccactgatgagtcaggttctggatttgctggtggaaatcatttgatgaggaggcgggataaagatgctgcgacgacgagtaacttctttgctgtgccttttcctgctgtgtctgctggcaataccctgcgcgtatggtgcagaggcggaaacggagcagggcgtggcgctggataccctgatggacgctttgccgcaccagacacagtctgttttggaggattccgacatagcctccggcgatatcagcgcagggtttgcctcgttgttggagcagggcaaaggacagatacagcgcctgttccgtcaggcgttgggcggcggtgcggcattgctgctgattgtgctgttgtgcgatggagcacagctgctgtatttcaaggaaaaagacagcaagcttctgcagtgtacggccatgacgggggcattggcaattgtgctcctcagtgcgggcagcattgatcagatgattggcctgggtgtggaaacaatccacacaatgaacgatttttccaaaacgctgcttcccctgatgggagcggcctgcgcggcgtcgggcggcgtaacagctgcggcggtgcgcgaggcggccacatctttgtttgctgatcttttaattacctgtatcgacacccttttagtgccactggtatatatttatattggcgctattaccgccaatgcagtgttgcaccagcacagcctggaggcaatagctgcggcgatccggaaagttatcacttgggcgctgacgattctgctgactgcttttacggcctatctcaccatcagcggcgccgtttccggtacggcggacgcggcagcgctcaaggcggcaaagtttgccatatccggcacggtgccggtggtgggcggcattttgtctgatgtggcttctacaatcctggtgggggcatctattttgaaaaatgcgattggcgtgtttggcacgttggcggtgtttgctttgtgtctgaccccgtttctgcagatcgggatgcagtatctgatgtataaagtgaccgcgtttttggcagaactggtggatgaaacagggctttcccgctttatgagcgagattggcggcgcttttggcatgattctcggtatgacaggagcatgtgcgctgctgttgattatttccatgatcacttcgatttcggcggtgatgcctgtatgaattttttgacgagttggctgctttctgtcatcggcacagcgctcttggtggcactggcggaagcgctgatcccggataccaaggtacgggaggcagggcggttggtgggagggctgcttttactggtggctctgctgggaccgctgatccatctgcgcggcgcagaactggatttttccgtttcagaacatttggcggagacggcgcaaaaagaggaggaataccgtaatgcgcaaaacgatacgttttccttgctcataaaagagcgatgcgaggcatatattgaagcggcagcgcaggaaatggggctggaggtccatacccgggttgccctgcaggaatcggaggagggcatcccgcagccgtcagaggtctggctggatattccctatcacgcttcgctttccgcgcagattacacaagagcttgggattgccgagcaataccagagctggggtaccaaggaaacggggtgagaaccattttgggcaaaaagatactgccgctggcaaaaccgatggagttgatctcaaaataccgcttcgtgctgctgatagcggcagtggggattttactgatgctgatgccttcattcggcggtgaaaagggacaagatgcccgcactgcgcagctgcaaaatgctgcggacttttcagtggaacagacacagaaagagcttgaggaaatcttatccgatatcgacggtgtggggcgtgtgcgcgttatgctgacggtagcctccggcatacagcgcgtgtatcaaagcgaccgggagatctcctacagcggtctggccagtacaccggaagactataccagcactacgcagactgtactgctggaccgcagcggcagcggagacgaagcgctgcagacgcaggagctctatccgccttatgtgggggcgctggtggtatgcgacggtgctggtaattcaggtacagtgctgaaagtaaaagaggctgtgtctgtgctgacagggcttggaagcgattgtatttccgttgccaggcggacggaatcttaaaaaattcttatatgaggtgaaaaggaccatgaataaaaaaatgaaacgcaatttgatgatcttgacggtggtgctgtttgtcagcgcggcggcatacctgaactggaattattcacaaagcgcggcgaatgtaggcaaaattcttggagagtccgcactggtgagcggcacagcggatggatcatccctggaggaagacgcttccggagaggatcaggaagcctttggggcaaaaaagaattattttgacacagcgcgtctcaaccgccaggaatccagagacagcgcgctcagcctgctcaaggaggctgcggcggatgaaaaggcagatcaagcggcaatcgatgaagccaaccgggagattcagcagattgcccagaacaccacgacggaggccaccattgaaaatctggtgatggccaaaggttacagcgactgtgtggcgtttgtcaataaggaaagtgtcagcgtggtgattgccggcacaggagaggggctgcagaattctgatatcgccaaggttacggacattgtcatggaagaaaccgggctgacggctgataaaatcaagatcatggaggcaaattaaggattgttttttacgcccgatgatggtacaatacatacaaatactgtttgaaggggcgtgcacaactgtgggcgataccaagaaggaatatgtggtctgtccggatgagatgggcagcatcaatatatcggaagacgttgtggcagctattgcagtgtctgctgcgctggaagtggacggtgtgggtgagctggatgccggaagcgccggccgccgcggcaagaagagcagtgctgtcaaaggcgtcaaactgaccatcggcgatggcagtgtgattgtggatctgcagatcactgtgaaatacggcgtgccgattccacaggtggcgcagaatgtgcaggaagcggtcacaaatgcggtggaatccatgacagagcttaaggtgtgccaggtgaatgtgcgcatcagcggcgttacattcggcgaaaacgcagcttccgcccagtaagaagaagtgctgcaaacgaggcggagaaactcctccgcctcgtttgtgctccaaagatacgagaaaaagatcgaaatagataaggatgttttaagtatggttcgttcaactgcacgggaaatcgcggttcgtttgtcttatgaactcagcttcaccgacctcagggccgaagcactgctggatcaaacgctgacccccgattattttagaaatctggtccaggaagatgcgttgtatgccgaacttcccggcgaaaagcagtctgcttatattcgtaaattggtctgcggcgtggcggagcacggtgcggagctggattcctatattgaaaagtacgcagtgggctggaagtttgagcgcattcctctggtagcgtccgcaatcatgcgcgtggccatgtatgagattctctatatgccggaaatacccaatgctgcggcgatcaacgaagcggtggaaattgccaagaaatatgaggatgaaaaggttgttgcctttctgaatgggattctcggcagttttgtacggcaggagtgcggggagtgagccggaatggcattgtgtgtgggatttgataccagtaactatacaacctcggccgcctggtgggacggccgcgaagggcggaacgaaagccgtatcttggatgtgccgcagggcgcgttggggctgcggcagagcgacgccctttttttgcacgtccgacgccttcctgaagttgtggcgcggcttttaacggatcgggacgatctgcatcaggcaaaagtggtggcagccagcagccgtccgcgcgcagcggaggactcttatatgccctgttttcttgctggcgtctgtgaagcgaaaacccttgccagtgttttgggcgcagagtatatggagttttcgcatcaacagggccatctggcggcagcggcttggtctgccgggcgggaagatttgctggatcagccgtttcttgcctggcatctttccggcggcactacagaacttttactggtgcagcccaaaaacggggtgccttatgcggaaaaaatcggcggcaccacggatatttctgccgggcagctgctggatcgct

SEQ ID NO: 513 - DNA, 4878 bp, Unknown
  16S sequences of unknown bacteria
gatgataaatctgtagataacaaaatagatttacacttgtgaaaaaactaacaaagaaacttacacacttttcttgacaaaccccggaaaagcagtcacaaacgtatatcccatctcttcatacaggtcgatctgcttttgcgccgagataccgatatagcggggcgcattgagcatcgcggcatcatcgttgaagccgatatgccagctgcaagggtccaccgcgctctcatacagcaggtagaagcttccgatccgcttcaggtcccatcctcgctcagacatctgatccaggtgttccttcagcagcagccgttcattcgctctgacgttggcgatctccagtttccatttcatcttctgtcgcagctttctctgtatcggcgatcatctgcagcagcctgcggtattcatccagcagcagctggatgcctgcctcgctgatgcgatagctgcgtttcctcccttcgcgtttggtttccacgatgatcccctcttcttcaaactgggcgagcagcgcataaagcgtgccgggcccaaggacgacgcggtgcgcagtgagcgtatccaccgcttcggcgatctctgctccgcagcgttccttccgcagcaccaggagcacataatacatctgttcgctcagcgtcccgagcttttttctggccatgtcctccctcctttatcgaatatcgatattctttacaccttcatcataacatcgattatcgataatgcaacaggcaaaacaaagaaacaagtgttaagtaaaaatacttgacacctcggttttctctgctataatgtcagggtatgaattgcaggaggaatttgaaatggtaaaactgagactgaagagaatgggtaagaaaggcgcacctttctatcgtatcgtggcagctgacagccacttcccgcgtgatggacgtttcatcgaggcgatcggtacgtatgatccgaccagacatccgtccgcgatcacgctggacgcagagctggccatcaaatggctaaagaacggcgcgcagccttctgacacagttcgcagcattctgtcaaaagaaggcgtactgaagcgtctgcacgaagaaaagaacgccaagtaagatggactacgagaaagtgctgcttgatctgatcagaccgatcgttgacgacaagaacacggtttccgtgaagcagatggagagtctcgacgagaacgagatcctgctgtatgtgtatgccgacaacgatgatgttgcccgtctgatcggacgccgggggatcatggcaggctcgatccggcagatgatgtcggtcgctgcccgcaatgagcgccgccatgtgacgatcaagtttgaagcatattaaaaaggatgcaggccgcatcctttttttggaaagaggaagggaggcactgacgtggaaacggtaaagatcggaaagatcgtgaacacgcatgggctgaagggggaactgaagatcatcccctccacccatttcatcgaggagcgcttcggaaagggcgcttccatcctgatccgcaaggacagcgtgcatgtgcatgccaaggtagagcgcatgcgcgctgaccgcggcatggtctatgtcgtgctggaaggattgaacgacatcaatgcggtggagatctataaagggtgcgatgtgtttgtcgacaaggctgatctgcatgcgctcgatgaggatgaagtctactattcgcagctgatggattgcgaggtatatacgcgggatgcggtgtatgtcggccgtgtcgtcgatgtgatcgagaccgacgccaatgccgtgctgcgcgtgcagcgcgaatcagacagcgtgctgatcccgtatgtaaaggccgtggtcaccgctgtggacgtggaagaaaagcgcatcgagatcgaagcgatggaaggattgctatgaagatcacggtgatcaccatatttccggagttcttcgcgtccttcaccagcaccagcatcatcaagcgggccatcgagtcgggaagggtggaattcgagaccgtggactttcgcacgttcaccctggaccgtcaccgccatgtggatgatacgccttatggcgggggacaggggatggtgctttcgccccagcccatcgctgatgcgctgcgcgcgatcagacagccgaattcccatgtggtcatgatgactccgcaggggaggacctttgatcagcagcaggcgcgcaggctgtctgccaaggagcatctgatcttcttgtgcgggcactatgaaggctttgatgagcgcatccgctcctttgcggatgaagagatcagcatcggcgattatgtgctgaccggcggagagcctgccgcgatggtcgtctgcgacgcggtcatccgcctgcaggatggcggcatcctggaacagtcccacgcggatgattcgttttccgacggtctgctggagcatccgcagtacaccaagccggcccagtttgaggggatgggcgtcccggacgtgctgctcagcggacatcatgccaatattcgccgctggcggctgaagcagtcgctggagcgcacgctgcagcgcaggcccgatctgctggaagagcgggcattcagcgaggaggagctgagcctgatcgacgaattatgccttgaacgatcaaaaaacatttgcggtgagtaaaaatatgtgttattattttgtggcctgagtggccgaggttccgctgatcatcatgatgaatgaacccaacgaagagatagaaaaggagacgtcattaacatgaacatgaatttagtcaacgaagtgagcagatcacagctcaacccgaacgtgcctttcttcaaatcaggaagcactgtccgtgtacacgtcaagatcaaggagggcgacaagtcccgtatccaggtattcgaaggtgtcgttgtcgcaaagaagggcggcggcatcgctgagacgttcaccgtgcgcaagatctccaatcagatcggcgtagagagaacgttcccgctgcattctccgatcatcgacaagatcgaagtcatccgtaagggtaaggtaagaagaaacaagctgacttacctgcgcaaccgttccggaaaggcagcgcgtatcaaggaaatccgctaaaagagagaaggggctctatcactttgccccttttctttttttgatgtagcacagcgcggaaattgcgctataataaatgagcattgtgaggatgaagaatatggaactacaggaagaaaaacagacaaatgagaaacagagaagattcgggctggaactgcttgatttcgtcaagatcctgctcgtgtgctttatcgtcgctttcggcatcaagaccttcatcgcccgtcctgtgttcgtcgaaggcagcagcatgtatccgacgctgcaggatggggagttcggattcaccaacctgctggggctttcgttcgagggcgtgaaccgcggcgacatcgtgatcgtggaagagggcgatgaatactgggtcaagcgggtcatcggcctgcccaatgagacgatcgaatgccgggacaatgtcgtctacatcaacggagaggcgctggatgaaccatatctggacagcgattatgtgcatgacatcgaaaataatcagggatatttcaccagtgactttgaggcgatcgagctgggcagcgatgaatacttcgtgatgggagacaaccgcgtcgtctcggcggattcccgcgtggtcggcccgttcagccgctcgcagatcgtcggcaagggcgtcctcgtcctgatgccgctggatcagatcggctataagaatcaataagcgtaaagggggagaagcggttgaaagagcggaaaacactgatcagcgtgctggaatttctgcgcacgctggcgctggccgtcctgctggtgagcctgttcatgagctttgtcttacggccgatgcaggtggcgggagattctatggcgcctgtgcttcacgacggggaacgcgtgttcatcaatgtgctcggcgggatgatcagcgatccgcagcgctttgatgtcgtcgtggtccggcaggaggatgagctgtgggtcaagcgcgtgatcgctcttcccggagaacgggtctgctggcgggacgatgtcctgctgatcgatggcgagccggtggcagagcctttcctcgacgaagggtatatggaagaggtcaggacgacgctgcagcgcgatgccttcactgcggacatggaggagcgcacgatgggcgctgacgaatatcttctggcgggcgacaaccggcctttttccctggacagccgcaatttgcaagtcggcccgttccagcgggaggatatcgtagcaaacggcctgctgatcgtatggccgctgaatgaaatgaggtggatcgactgatggaagaacagaaaagcagattgaacatccagtggtttcccggtcacatgaccaaggcgaaacggcagatggaagagcacctgaagatggtggatatggtcatcgagctgcgggatgcgcgtatcccggatgccagcaagaatccgctgatcgatgagctgacggcgcataagccgcggctgatcctgctcagcaagaaagataaggcagaggctgaggtgacggcgcagtgggtgagcgcgctggagaaggaagaagtcagggtgctggcggtggacctgctgcatgagaagctggaaaagaagatcactgctgcatcccaggagctcatgcaggcgaagatcgaacgcatgaagcgcagagggatgcgtccgcgtgcgatccgcgccatggtggccggcgtgcccaatgtaggcaagtcgacgctgatcaacagcctggcgcaccgccgcgcagccgtgacaggcgatcgtccgggcgtgacgaaggcgctgcagtgggtcaaggtaggtaagagcctggagctgctgga

SEQ ID NO: 514 - DNA, 4370 bp, Unknown
  16S sequences of unknown bacteria
gtgctgtaccgctatgcgcagtatgagggccgggatgtgagccggcgggcggatctgagcgcttacaaagacggcgcaaaggtgtcctcctgggcgaaagacgccatgtcctgggccgtggccgaaggcctgatcaccggcagcaaccagaaaaacctcacccccggcggctccaccaaccgggcgcagctggcgacaattttaatgagatactgtgcctaaaagaagcgctgcccgctcttttggttcacaaaagacatccgcatgtcgtatcttttttacacaggtttcattccaaattgtataaaatcttaacaacaatacaaacaggcgtaaaccggcagaaaaatatcctgtcggtttacgcctgttttacgattcattccgccagatccagcagacggctgagctgttccagcgcagcaggggagacggcataatccttcacgctgtctttggctgtccagcttgtgtggaagcgcgcattgtaacgcacgaccagctctggcagcagggcgttgaccgcttccagtgtcacggtttcggtgtggagcgtatcgttctcatccgtgtagctccaggacacataacccaggttttccaccactgccaggatctgcgcagccttacgtctcatgttccagttgatccaagcgataccctgttcatccagatgtgcgccgccgggtgtattgttttcaaaccgcagcgtccagccgtaaggttcttccgccgtttgcaattcattgtcgaacacgcccacctcatcgttaatgcccactgcagcagcaacaatcatcagcgccgagggattccccacatagggggtacatgcatggtacaaagcgcggctctcctcgctgatttccaagccgtcggcccagatcagggtgtcgcccacatagatttcatgcagcagctctgacggcgcaccatagccgtagctgtcggaggaaaaattcaaaaaggaagcacgcacttttttccccgtgaagcgatacgtactctgcccgtcctccacggtttcctcccaggttccgccaaggatgcgcaggtttggatcaaggggcgcaacgcggatatccacatagctgccataatcctgcaccgtccattccagctcataatcccgaaacggcgtgccgaatacataagtgcgcagaaccagtgccaatacaatcagcaccactgtacccgccacggccagcaccacccggcgcacagctttgcgattccaggctgcgaatgcgtctattaccggcgcgtctttctgggcaacttcccgttccgccgcgcccatggtctcatacttttcccggcacgctggacacccttccagatgcctccgcaccgctgcactgctctcttggccggtcagcccgtccacataggagggcagcagatcctccacaatgccgcagggcaattcatacttctccatcctgttccatcgctcctttcagccgctccttggcccggtaaaacgtcacacgggaccagttttctgttttgcccagcacatcgctgatttcccggaaggacaatccaccgaacaggcgcagatacagcacctcccgggccggctccggcagcgtgtgaacggcgcgcagcaggtcgagatattccgcacgcaggagcacgtcatcctccgccgatggaacgggaagcgtaatgtcctctgtcagcgtttcgctctgccgcctggttttgcgcagatgctggtaccacagatgcttggcgatctggcaaagccagacagacagacggcaagagccgtcatagcggccgatggagcgcactgcctgataaaaggtctccgccgtcagctcttcggccagatccgcatcccggcactgggccagcaggaatttatacacggtttgggcatggcggcggtaaatatcctccatttccatggcctctttcacgttccatcgccccctttctgcttgttatatcccatccggacccctttcgttacagaaacggatcactttttttcctgacagaaaaaaccgcctgcggccggcaggcggtttcctccctcatggttctttttcccgcatccggttctctgccgcagccatggaaccgaagcgtttccagcggcccagcagaaaataaccgccgctgaggatcacacccaccagccaggccccggcgtagcaggcaaacatatattgctggccgaatgcgtctgaaatcacatagcagagcaccacgcggaccactaccacggaaatcaggctgctgatcatgggaaacaccgcatcccccgcgccgcgcatcacattattgagcacaaactgtatggcaaacagcgcataaaacggcagcacccaccacagatacagcacacccgcgtccaccacggcaggcgtcttggaaaagagcagcataatgggccggctcagcggcatcagcaccgccgcaatggcaaagcaccagaccacccccatcgccaaagtcgcccgcgtgccctggcgcacccggtccatccgcccggcgcccacgttctgccccacataggtggtggcggcgttggccaggctctgcaccggcagaaaagcaaaacaatccaccttattgcccacattaaacccggcggtaaaatcggtgccgtataaattcacccgggccatcaaagccatgatggccgcagcgatcagcccgttctgaatgcccgcaggcagtccaatgcgcacgatctgccgcagcaggctccggtcgatgtgcagccctcgcagatgcagatgaaattccgaatacatgcggttaatgtagaaaataccgaatatccaggaaaaccactgggcaatgatggtggcgaaagccacgcccgccacgccccagcgaaataccgccacaaaaagaaggtccagaacaatgttgatccccatggcaatgctcaaaaacatcaggggcgttttgctgttgcccagcccctgcaggatacccgcgttggtattgtagccgatgctgcccaccagacccaggctgacaatctgcagatacagcctggcttcggggagcgccgcttcctctacctgcagcagataaagaatcggatccgtcaggaaaaaagcagccagggaaatcggaatggctacaatcagaaacgcagcataggccgtgtcgatggcggcgcggacccgttccgtctctccggcgccgtaaaactgagcaatgaccactgtggagccgatgcccaggccaatgaacagcgacacaaacaaaaacaccaccggaaaggcgatgcccaccgcagccagcgccgtgtcgccggtgaaattgcccacggtccaactgtccaccatattgtagagctgctggagcacattgcccaacagcagcggcagcgaaaacaggaaaatatgtttggccggactgccctgcgtcatatcccgcattttggtgttcgcttccacatacgctccccctctcttctccttttactttccattaccgttacgcacttttattgtatctggtaaaatcgtcctgtcaaggcatacttgcacacaagcgattgttctgcgcggtaaaatatgatacactgctctcacgccccacgttttcctccgttttcccctgctgtggaaaactgtgtgcaaaaagtgaaaaactcaccaaactttccgtttcaaattttatgattctctctattgacacgaatttcaaaaaatcgccctctatttttttacagaaaggatacattgtctatgaaactgatctcctggaacgtaaacggcctgcgcgcctgtctgggcaagggctttctcgattttgccgcgtcggcggacgccgatgtgatctgcctgcaggaaacgaaaatgcagccggagcaggcggactttgatctgcccggctaccaccgcttctggaacagcgccgataaaaaaggctattccggcaccgccattttcaccaggcgagaaccgctgcaggtgcgctatgatttcggcgaggatctgcaccgccacgagggccggctgattaccgccgaatacccggccttttttctcgtgtgctgctacacccccaacgctcaggacgaactcaaacgcatcgactaccggatgcagtgggaggacgacctgcgggagtatcttttgacgctcgaccgggaaaaacctgtgatctactgcggcgacctgaacgtggcgcatgaagaaatcgacctgaaaaatcccggtcccaatcgcggccgcgccggcttttccgaccaggagcgcgccaaaatgaccaccctgctgcagagcggtttctgcgatactttccgcaccctttatcccgacacggtgaaatactcctggtggagctaccgcttccacgcccgggaaaagaacgcgggctggcgcattgactat

SEQ ID NO: 515 - DNA, 32759 bp, Unknown
  16S sequences of unknown bacteria
caaattgccggttgcctatgaggaagtaacggtcacgagacggttatatcggtccggggagagtgaatatctattaaatggaactacctgcaggctgaaggatattcaggagatgttctatgacaccggtattggtaaagagggatattctatcatcggacaggggcagatcgaccggatcttaagtaccagaccggaggaagcccgtgagctttttgatgaagctaccggaattgtaaaattcaagaagcgtaagaagacggcggagaagaagctggatgacgagaagcagaatctgcttcgtgtcaatgatattctgacagagctggagaagcaggtaggacctctggaacgccaggcagagaaggcaaaagaatatctgaagaaaaaagagaccttaaaagagttcgagatccatattttcctgatggagatggaaaatattaagaagcagttgaaggaactggaagaaaccagaaagatcactcaggatcagttggatgagacaaaggattcttttgaaaatacaaagctggaatatgaacggatcgagaaagagctggaggagatcgagcagaagatcgatgcagccaaagaagaagctacctctgccagagtagagaagcagcagatgaaggggcaggcggcagttctcaaagaacaggtacgttctgcacaggcaaatgcaaagcattatgccgaacgtctgcagaatatagagcgggatctgacagagaggcaacaggaaaaagagactgttctggaagaaaagcaggagcaggatcttgcactggcgcaggcagaaaaagtgcagacggatgcagagcagaaagtatccgatattcagcagcggatcgccgacagccagaccaatatggaaaacagcaagaatgagatcatttctcttctgaaccagcggtcttccattaaaggaaagctgcagcgctatgatgccatgacagaacagatcaatatccgtatgtcagaacttaatcagaagctgatccagatccgcagcgatgagatgggacaggaagagctgctggaacagcgtaagaaggagcttcaggaagtaagtgaggaactgaaggcaaagctttctgaacgggcagagatcgagcagaagatccaggagctgcagcagcagatcacattgggacgaaagcgtctggaagcgggacagagcgcatatcacagagaagcatccagactggaatcactgcagaacctggcagagcgctatgacggttatggcaacagcatccgtcgtgttatggagcgaaaaggacaggaagcaggaatctgcggtgtggttgcagatctgatccagacggataagagatatgagacagccatagagacagctcttggcggaagtatccagaatgtagtcacagaggatgaggagactgcaaaacgcctgatccagtatctgaagcagaaccggtatggtcgtgtgacatttctgccattgacggcagtgagaaatccgcaggaatttcgtcagccccaggtattaaaagagcctggagttttgggcctggcacacacgctggtacaggcagatgcccgttatgcggatatctgtgcacagctgctgggaaggactgttgtggtggatcatatcgaccatgcagtggcattacaacgaaaatataaatatacactccgtatcgtcacactggaaggagagtccctgaatccgggaggctccctgacaggaggtgctttcaagaacagcagcagtctcttaagcagaaaacgagagatcgatgaattacgagagcgggtagacagacttaaaaaagagctggaagctacacagactacgttggtggagcttcagaatgagaggagtcgctgttattccattctggatgaaggagcagcagtccttcaggagatcaaagtccgggaaaatacagcccgcatgaacgtggagcagttgaaagtgcaacgtaaagcagccggtaccggaagagaagcactggaaaaggaaagtgcagagctgaaaaaacagacggccgagatcgaagagttccgaaaggccaatcagacggagctgaaagattctgaggcaatggaaaaggcacatacctttgcagtggagacttatcagcagcgcctggaggaagataaggcactggaggctgatgcagccagagaactggaggatatccatctggatacggcatccatccgccagaaagcagaattctcatctgcaaacctcaggcgaatcgagggagagctccacaagctttccgaggaaaaggagcagattctgcaggaacaggttcaggcagagttcgatacccacagcagacaggaaggcattgagaccctgaatgcgcagatggaagcggcagccagacggatggaagatctggagcagaagacccaggagctgcagaaccagaaggaagcgcaatcctcttcccacaaagcattcttcggacgaagggaagagctgtccggcagaatgaatgagctggataaggagctgttccgcctggacagccagaaggagaagctggatgagaattcagagtcactcatgaaccatatgtggtcagaatatgagctgacttacaatgcggcgatcccgcttcgcaaggaagaatatatcagtcttccggcattgaaaaaagactgcggcacggtaaaagaagagatccgtgctctgggcaatgtcaatgtgaatgccattgaagattataaagagatatcggaacgttacacgttcatgaatggacagcgcaatgaccttcaggaggcagaagaagccttgaagcaggttataaaggaactggatactggtatgaagaaacagttcatggaacagtttgtgctgatccagagggagtttgataaagcattcaaggaactgtttggcggcggtaaaggaacgctggagctgattgatgaggaggatattctggagacaggtatccggatcatctcgcagccgccgggaaagaagctgcagaatatgatgcagctttccggtggtgagaaggctctgacagccatctctcttctgtttgccattcagaacttaaagccgtcccccttctgtcttctggacgagatcgaggcggcactggacgactccaacgtggtacgttttgcaaaataccttcacaagctgaccagcgatacgcagtttatcgtgatcacgcaccgaagaggtaccatgaatgcagctgaccgtctgtatggtattactatgcaggagaagggtgtatctactctggtgtcagtgaatctgatcgaaaatgatctggataaataggaggtggccttatggctgaggagaaaaaaggatttttcagacgtctggcagatggcctggcaaagacgagaaacaatattgtatccggaatggatgctattttcaacggtttctcggacattgacgatgatttctatgatgagatcgaagagacactggtaatgggagatattggtatcaatgcgaccactgccattattgataatctgaaacagaaagtaaaagaacagcatattaaagatccccatgagtgcaaggagctgctgatcaacagtatcaaggagcagatgcaggtaggggagaccgcatatgagtttgaacacagaacctctgtggtactggtaatcggtgtcaacggagttggtaagactacatctgtaggtaaactggcaggaaagctcaaggaacagggaagaaaagtgatcctggcagcagcagatacgttccgtgcagcagcaggagagcagctgacagaatgggccaaccgtgccggagtggagatcatcggaggatcggaaggtgcagatccggcatctgttgtcttcgacgcagtaagtgctgccaaagcaagaaaagcagacgttctgctcattgatacggcaggaagacttcacaacaagaagaatctgatggaagagctgaagaagatcaaccggatcatcgaaagagaatatccggatgcatatcgggaaactctggtggttctggatggaacgactggacagaatgcactggagcaggcaagacagtttggtgaggtagcagatctgacaggtatcatcctgacaaaactggatggaaccgcaaagggcggaattgcagtggcaattcagtctgaacttaacgttccggttaagtatatcggagtgggagaacatattgatgatttacagaaatttgacgcagacacatttgtaaatgctttgttcttaccaagttccgagaactaacatatatcgcaaaacacaacagacaacaaaggagacacaaaaaccatgatgacagcaatgactttggaaaaatttgaagaagcatgtgagattgtcggccgtgtgaccaacaagaccggcctggtatacagccagtgcttcagcgaccagtgcggcaacaaagtatatctcaaaccagagaatatgcagaagaccggcgcattcaagatcagaggtgcttactataagatcagcactctgtctgatgaggacagaaagaagggactgatcactgcatctgcaggaaatcatgctcagggtgtggcatatgcggcaaaagaatatggctgtaaggcagtgatcgttatgccgacagcaactccgctgatcaaagtcaaccataccaaggagtacggcgcagaagtcgttctctatggaaatgattatgacgaggcatgtgcgcatgccattgagcttgcaaaagaaaaaggatataccttcatccatccgtttgatgacttggatgtggcaaccggtcagggaacgatctccatggagatcatcaaggagcttccgctggttgattacattctggtacctatcggaggaggcggactggcatctggtgtagccactctggctaaaatgctgaatccaaagatcaaagtcatcggtgtggagccggagggagccaactgtatggagcagtccctgaagaagggcgaggtgatctgtctggatcacagtgcgaccatcgcagacggtactgcagtccgtcagcctggaaagctgatctttccgtacattcagaaaaatattgatcgtgtgatctctgttccggatgacgagctgatcgtcgcatttctggatatggtagagaatcataagatgattgtggagaactcaggactcttaagtgtggcagcactgaagcatctgaatgtaaaagacaagaagatcgtctgcattttaagcggcggtaacatggatatcatcaccatgtcttctgtggtacagcatggactgatccagagagaccgtatcttctcactgtctgtactgctgccggataagccgggtgaactggtacatgtagcttctgtcattgcaaaagagaatggaaatgtcatccgactggatcacaatcagtttgtcagcaccaacagaagtgcagcagtagaactgaagatcacgctggaagcatttggaacagaacataaacaaaagatcatcaaagcactggagaaggccggttatacaccgaagcttatcagtgtcaacatttaaggagaatatgtacgtatggagagccgtgtaaaagaaacgatcgtaaggcatgataaaggatacaactgtgcgcaggcagtggcgtgtacttattgtgacctgtttggctataaggaggaagatgttttccgcatgacagaaggattcgggcttggcatgggttgtatggcaggtacctgtggcgcactgtcaggagcagtgcttctcgcaggtcttaaaaacagtgatggacagatcaatgccccgaagaccaaaggaaaaacatataagctgtccagacagctgctggagcgttttcaggagcgctgcggttctaccatctgtgcagagctaaagggcgtgaccaccggaacaccggtgcattcctgtgcagactgcatcaaagatgcggctgctattgtagaggaagtgttacttggaggagaaaatgagtaaatataacgagatcaaagcggcactgttaggtgccggaacagttggcggcggtgtctacaagctgatcgaaaaacggaaaagtgagatgccaagcaagatacaggcagagcttacgatcaccaaagttctggtaaaaaatctgaataaaaaaagagaaggaatcccggatgaggttctgaccgatgactggcaggaaatcctggatgacccaaagatcagtattgtgatcgagctgatgggaggcattgaaccggcaagaacttatattctggaagctttgaaagctggcaagaatgtagttactgccaacaaggatctgttggctgaacatggaaaagagctgatggatgcagcagaagagtatcacaaagatctgtactttgaggctgcagtaggcggcggtattcccatcatccgcccattaaaggagtgtctggcaggaaacaatattacagaagttatgggtattgtcaatggtacaaccaactatattctgactaagatgacacaggaaggcatggattttggagaagcactgaagcaggctcaggaacttggatttgcagaggcagatcctactgccgatgtggaaggactggacgcaggtcgcaagatggcgatcctggcatccattgcattccattccagagtaacctttgatgatgtggagatcaaaggaatctccgacatcacagccagagatatcaaatatgcaggggagttcggctacgtgctgaagcttcttggtgtggcaagaaatgtcaatgacaagattgaagtcagtgtatctccggtgatgatcccggagcagcacccactggcgaaagtcaatgattccttcaatgcggtattcgtacatggtgatgcagtggacgatgccatgttccagggacgtggagcaggtgagttcccgaccgcaagtgctgttgttggcgatgtgatcgctactgccagaaatatgcagtatgactgctgcggacggatcggatgcagctgttataaaaatctgcccatgcagccggtgggagattccagacatcgctatttcctgcgcttcttagtagaagacagaaccggcattctggcaggcgtggcaggcgttcttggcaacaatggtgtgagcatcagtcaggtgatccagaagccggctgtagatggcgtggcagagctggtagtcatcacagataaagtagagaccagacatctgcaggatgcgcttgtgatctttggcgagatgtccatgatccgtgaagtggcttccgtgatccgcgtatactctcaaaaataaaatttccgcaaatcgggaacactatagactgtgcaattcagaaaggagtgtgtcgattggaaatcaaagagattaccggggacaattttcagactgaagtaacaaaagctgcacagccagtcctgctggaattctatgcagacgggtgcagcttctgcaaagcacagctttccgttcttgaagaagcggcagaagaagcctgtgatgtgaagtttgtccgcgtcaatggggacaaggagcgtacactggctggtcagttcggagtgactgtactgccgaccatgctgatcatgaatggagaacagatattccggaggatcacaggatatcagtctttggaagcgatcctgtcttatctggaaatgtaaaatgcgaaaaggccggagaaagatgcgttctgtccggtctttcgttatgtataaaaacagtcaggagaaaatctatgaaagttcaaaagctgttaagcctgatccgtcagtcctgtgaacggtacgagatgatcaaagaaggggacaagattgctgtcggcgtctccggcggcaaggacagtctgacgctgctctatggattaaaagaactgtcacgtttctatccgaagcattttacggtgacggccatctgtgtggatctgggctatgccaatacagattttacaggaattgaagcttattgtgaaaagcttggtgtggaacttacgatcattcatacccagatcgggaagatcgtcatggaagagcgaaaggaacacaatccctgttccctgtgtgcaaagcttcggaaaggggcgctggtagatgaagcggtccgtcagggctgcaatgtgatcgcttatgcccatcataaagatgattttgtggagactatgcttatgtccatgatctatcagggacagttctatgcatttccaccggttacctggtttgaagataaaggaatccgtgtgatccgtccactgatgtatgtggaagaagggcaggtcagaggatttatcagaagacaggagatcagaatcttaaaaagcccatgcccggtggacggaaccaccaggagggcttatgtaaaagacctgcttatgaagcttgatcgggagacgccgggagcaaaagagcgtatgtttcatgccattgtcaccggcaatatttacgactgggtggatcctaagatcacagatacccggaaaaactgatcggtcacatcgaattttatttgtccatgatagcgttctgtcagtgccttgacggattccgtaccgactccatagccttcatgtttggtggacaagtatttatcctgatgtttatggatcagatttttataagaattttctatccgaaaatataatttttcattctgccacccggctttgatctgaatgtaagcagcgggggcagcaacctctttgcaggcatcatatgcattttccagtaaattaccaaacagaatagacaggtcaatgtcggagattggtagatcagcaggaagctgtgcatccacagcgaacttgatctgctgcttctgacagagaccatgatagtattgtaaaatagcgtcgattacaagatttcggcacagaaccgtacgttctcccagttcataggaatcctcgtattcgttgagatactctttcatctgttcgtattgctggtgctccagacagcttcttaagagctgcatatgatgacgctggtcgtgacgcatacggatcgtctcgtcgatcttctctgtcagactgagataatgagactgctggatcgccacctgtctggtgagctgacgtcgttcctcctgaaaagaatagcggaaaatataagcctgcgtaatatcgtgccataaggtatataacatacaaaggaagaggatcaaggttccccattctgtcagccagccgccatagacaggctcataggcgggaagcagcagatcccacagaaaagcggttccgtaaaatacatctccgcagaacagtgccagtgtatccggctggcggcgggaaagtgcatctgcggaggaagccagcagatagaggacgcaaaatgccttgtaccagttggtaaggatggaaaaaccgttcatgacagggactgtcaaagaggcagaggtcagtccatagcatagggcaatggtacagacgatcagtgcggttccctgactgatccggcatagatgctgatccattgagcacaggcggttgtggagtaccagtaccagccaggccactacatatccagagaacaattccagagagtaccagggaaagaccggtacaatcagaaaagtatggaatagcgggtatgcggtaaatccaatgatagagatacacaaaactacaaagatcagaatatttttctggtgactgtgcagaccaagaaaaagcgccaggacagcgatcagcaatgccagcgattcaaaggcaatacagatcccgatacgcagattgtggtaaagctccacattgtgggacggaccgaaggcaggaggatagaccatcccgctgtagtagtgtgaataatcactgacgcagaggatcagacgcgtcatgccagtggacgtaaaggtgatcagccgttcctgaatacgggggatgtaatgggcagggtcaggatcaccaagtgtcagcaccagctgatcatccacatatagcctgcatgcactgaagatctccggcaattccagcgtatagctttgctctgcaggcagagaaagccagagcacataagtgccgtatccatggggactgtctggaagactgtaggaatgaaagtggctgcgttgtccgatctgtgtatagaactggtagctgtcagggatcccatctgaaaaatcctcgggagacagcagctggtctggataaaaggaccagccggattttaagaaccgaacagggttggtctgaagctctttctctgacagaatcagaagaccattggccggctggatcgtggtccgggtatatttgttattgtactggtacaggaacagataaaggcaggaggctgccagaaaaggaaccagcagccagagaaaacggatgtgcagcttatctttcatggactcctcctatctttcgccgcagaagcggtaagcaggaaaagccagctccaagacttaaaactacaggaagaacagacagcagggcaccagaggactctgtagcagacactggcaggatctgttcatgttcaggagcctgttcagagacatagtaggttcctggttcggaaataataaatgtaagaagcttttgctcttcgtcataggctccggtgtatatggtatccgactttttatcctgaagaagaaaatcagaggccggatcctgtgcattccatggaaccgttatcttcgtatcaggaatggacagaatctcctcgtcattttttgaaacagacaccaggatcatgtcagaggcaggatgctggatcgagacggtcaggaaatcctcatctgagagggcaagctggtccaatacatcagaagagagctgaagctgaattccgtgcttggaaaagagcgcattaccgccggaggtctgccgcatgagattcaggcggacaccatacagacgatcctgatccgcagagaaggactccgtggcaacagagtcggtctgattggacggagcagctgtggtgccggatggagcagcctgtgcctcggacggagcagctgtggtgccggatggagcagcctgtacctcggacggagcagctgtggtgcgggatgaagcaccctgtgattcggatgaaccagccgtggtactggatgaagcatcctgtgacccgggggaagtaccctcggatgtggacggaccgggggtaggagcagctggtgcaggctgtaccaacgacccggacggggcatcatcggaactgcttccatcacggtcaccgccagtatttttataattatattcttcgccattgtcctggatcatcagaatggtagaacgctgtgtggaggacacgacctggaaataatggtagattcccttggtaagcagagttcttgagatctgaaaatctgatagataaggatttaaggtcgttccatcatctggatccggaaaaacttcccaattctgagtgttaagttcctcttcggtcagttcggtttcacttttcagccagaacagctttgcgtcagaagctggctttgtaagagacgttacataaaatgcagagttatcgacttttaaggtccacaattcatagacagacggatcagagaccttgacgggaatgtgccaggtcttcagatcatcaggaagtgtaaattgattctgacaggaatcagccagcgaataagagataaggatctcgtattcaccgggcacattgatattgacagaatgatcgtcaaattgatcaaggacaagtttggctggccgtccatcggctgtcaatccacagacagctgtagcaagaaaactgtggagcagatctctttgctcattccaggagctgtcatcatggacttcaaatatcatgccagttattccagtctgaatgttgaacagagaggtaatggcagatttgacagaagcatcatggatgatataagggatccggatactggtcataactccatctgcaaaggtacagccttgcggaggaaggatcgtacctgtcagctcataagatcctgctttggtcacatcttccggaaaatctgaccaggagagagagagctctgtttcataggtctgaccgtcctttgatacgattgctgtcagggagcttatattctgaagctgctcctgaaggtaggatatcagatctgctggatcgttagcagtggaaaaatgagtaggattgatattttccagaaatcgctggcgtgggatcgatgtgatcacaccaccggacagatcaggctcttcggctgcaaaaaccggtgtggaaatgcttaaaaacagaatcaagcataggaaaataaaagagtttctatgaaacataaaagttcctcctgccatctaggaaagaatgtgttcaaactgaaaatcaatataggtatttttgacagatggataaagtctgcggctgataggaacaaactcgccgttatccatcaaaaatccatctttctggatatcttttacgtgggacagattcacaacgatcccccttgcacaagtcagaaaacgttcatctgtcagtaaaggtgctactgtctttgaaaaggtgtgccgggcagacagattcagatgagaatcctgaaaatgaatctcgatattattgcccacagacatgatatacagtagattccgataaggaatctcatggatcttcttgccgacagaaacagtcagccttctctgattcttccgggactgtttcagacactcaaaaagcactgcctgcacatgctctgcctgtggaggcttcagcagatatcggagggcgtggatctcatacccttcatatacatagtctttgctgctggtcaaaaagacaatagaaagatcaggatccagggcacggagttcccgggcgactgtcataccattcatttctttcatataaatatccagaaaacagatatcgaactgctcaggttcaaaagcttccaggagactttctccgctgtcaaattgtgtaatatccaaagcataagcttcgtgctcaagagaaaccttgatcagctggatcaggagctctctgtcattgacatcatcatcaacaattgcaattttcatatagctatcactcaaaagctttcgtttatttttacattaaaagtatagcatatcgaggatcgcatatccagtttcttttcacagattcgacaacagattcgacaaaagccgacagaaaaaccatttgtctaacattcgctaccatttgggcaacccttattgaagatgtcttcagaaaaaggtataaaaaagatatatgagaaaaagggaggtcaggatgcagaggacaatgcaaaaaagtgaagaactttatatagagaatcccagactggatcataaactctgccaggatctgatcaactatgatatcatttatatacaagcgtctttaggctggggaaaatatacatttctatctcatttttctgaacatcatccggaatataccatacagatgctggatatttataatatagatcaacagttgtcagagcttcctgtaaaagacgggcagattctgttgatcccgcggtatgaaaaacttcaggattctgaagaaaagagcagattgtggaaacggatccaggagcagggtcgcagagaaaagtatgtctttgcatccacgatcccgttgccggatgaacttctggcatacaaggtttccggtcgtctgctcatctatgggataaaagaattgaaaccgggaaggaaagaagtagacagttatttctgcaaaaaaggaatccatctttatccggaggaactggcacggatcgagcatgattttaataatatacctatctgtctgtatctgttggagaatccgctgttgaattcctcaaggggatattgccggatcgtcagggaacagtgtctggaggatctgttttcctggatcgaagtagattattttcggacattccggctggatgagcagtatgccctggtgaacctgtcctgctttgagcagctgacagaggaacttgtctggacaatccttgatatgcccagtgagaaagcaagagaatttattcagatgcttcgtatgaaaggaagtattctggatgactgcggaaacggatgctggcagtttactccgctgttccgccgcttcctggccaggatcatctataaatatctggatcaggagaagatgaaagccttgtacaacaaggcgatgcattattatgaggataaaagaaattattttgcagcattaaaattcgcggatcttctgaaaaacagagaacagatcgcattgcagatagacagacttttatcgcagaagttaggctatgatgtatttctttcgctggaagagtattgtcttcatctgtcggatgtctatctggaggaatatccgagactggtcatggcaaaggccatgcttcaggcaatggaaggtgatctgccagcttttcgtaaatgtgaacagtttttgaatcgtatgctggagaactgtctgccggaaaagggaagacagatccgaaaatgccagcttttccttaaactgattggaccaggcggtatgacaccggagcttcttgaagaggcacaggaactggcggatcaggtatatacttctgtagatgtgatgtgggatcagcttctggtaccgggtcagatctctattctgcacggagataaagattattgttcctttttcccacaaagtgacaaagcaggtctgggccttctggccttgagaaggatcgcaggcaggaaatatgcttcgatggttttatatatgcaggctgaggtcagctatgaatataaccggctggatgaagcattggacagcctgtcggaaagtctccgccatgccagactggagaaaaatgaacggatgcagaagctctgcaatctcaagatggcagatctgatgatcgcacagaatcaggcacatggcgctgaagagtttttattgtatcgtctggatgaagaagcggatgccagagaattgtggacagatatcatgagagcgcacaaggtacagttttacttgttgaaaaatgatgaggcgaggttaaataactggctcacaaaagaggcaccgaatgaaaaggaaagattctgtacgcacaggtattaccagtatctcatgaaggcaaaggtatatatctggcaggaacagtatgtacaggcaggcatgctccttcgttcactgttggattttgcagatcagtacgagatgatctacctggggatacagattcgtgcactggaagccatcattcatttccgatgtgggaactcggcatggatagagaagctggagcaggcgatcctcatagcaaaagaatatggatttatccgggttctggcggatgaaggagaagcaatctatgagcttctggcggatcaatatggaaaacagaatggcagacagctggatccatttatcaagcaggtgatgacagcggccagagcacagatgctgatctatcctggatacctgaagcagcgaaagctcatgaagatcgacagcttcagcagctacgaaagagatgtgctgcatcttctggcaaagggagaaaagaacgcggagatcgcaaaggctctctgtgtttcggaaaatacagtaaaatatcatctgaaaaatatttatcagaaactgggggcaaagaacagaagccaggcgatcaatctgatcacggaatatcatatactataaaattaaaaatgaccgcaatccaagtgtttatgctggattgcggctttgcttaagaggcacatcaatcagcaatggttgatgtgccttttttagaatcttacccgttcgggtggtcacattttgaacaacgtctgttaagatcattataatatgcagagagaatgcaaatggggcggttataaaatgatagatttgattctggaattgatacgtaaaaaagcagggctttatgtgaagtccattcagcaggaagagctggcagtggttttcccgcaattattggatacaaaaacgaatgaacaggaaatagaacaattacaaaaagagattgtcctgctgataaaagagagtttgctgtccgggaaaacggatcgttatgagaaacttgtaagagggtttaatacggtggccgaaacagcgatggaactggcccttgtgcagtatatttatcctgaatggaaagaggtatgggaagctatcagtgacggaaatctgacaatagaaaatgctgcacgtatctgttattgtgacaaaaacccgatgaaatctgcgtataagcaaatgacagaagcatatgagcagcttcagaagtggttctggtttgagcaggacggcaagacagcgaatgcaagaaaaaccttgatcatggatgaaagattgtattcatatttacagcagaatgatcagataaagaaagaatatttatccattggaaaacgcacggacagaagggcagaagcgaaagatctttatattcatgaaaaagaaaaggaacagttactttcctatatcaaaaagacttcctccaagagaacatatcagctgattcatttgcagggagaggcggaaaatgggaagaagttcctggcagcatatgtggaaagagaacttggcaatgaaatggtattgatcaattatgattcactgaagctgcaggacagtaagattgccaaaaaattgatctggtatttttacagagagtgttttttttaccatgccattccgtgtttctatggattgagtaaaaataattgtgagaaccagggagaaatggaagaatttctccatttgtgtatttatacttatggagatcaggttccaagggtgtatatctgcacttcagaagaagtagatctttcaccgtctctctcatttccggtgtaccatctgtatctggggatgcctgacagaaaccagagaattaccttgtgggatcgtttttcacaggaatttgagatggagacaccgctgaatacggaagtcatatgtgcgaaatataaactgtcggtggggcagatcaggctggctgtaaaatatctgagacaaaaagaactcagtggtatctgtgtggatgaaaaacaggtaggaactgtctgctgcgaaatccttccgcagccaagacagggaagcatgaagcgtatttatacggaatatacgattgatgatttaaaaatacagccctcccagaaacagatcctttacaatatctgcagtcatatctggcacagacataaagtgtttgatacatggaacctgcaaaaaaaatattcctatggaacgggagtttcctgcctgtttgcaggccctccgggaactggaaaaaccatggcggcgcaaattatgtcttcgatgctggaacttccattatatcgggtagatttgtcacaggtagtagataagtacatcggggaaactgaaaaaaaactggagacgattttcagtctggcggagaagagcaacacaattcttttttttgatgaagcggatgctatttttggtaaaagaagtgaagtaaaagaagcaaaggaccgttacgccaatacagaagtttcctatattttgcagcgaatagaagaatacgatgggattgtaatactggcaacaaatctgaagaataacattgacgaggcattcataagacgtatccggtatgtggtgaattttgtaatgccggattcagttatgcggtatgaaatatggaagagctgtttttcaaaggaaattccaacgaaagatcttaattttcaatatctggcagagcagtttgaactatcagggggaactataaaaaatattgttctgaatgctgtgtttctggcggcatcagaagataggccggtatctatgagacatattttggatagtcttcggatggaaaacctgaagataaaaaaagtgatgattgccagtgattttggtgagtatggctactattttgaacaggaacgaaaaatgtaaataaaatgacagaaaggggcaggagatatgtcgttattcaaatcaaaaaaagaaaaaaaagataatacaggcatggaaaatgcagtggccagaatagtggaagaaccacaaaatgatgaaaatgaacaacgggatgaatcagtatttcgggcaattatgatggacagaggcattttcagtgccagtgcagtggaacgggcagcaggatacagtaaagtaaaatcgaccgcttctgtccgcagtctgattcgtcatgctgataattacgaagccgcattgaaaaggtttcggattccacagaaatcagggacagatcaggattttttaaataaactggcagagacaaatggagaagtggctgcatatatgcaggagatgatgtcatatctgaccaggaaagcagaaggctatgcagaaaaaggaaaaagctacagcggaatgatgggggtctgtgcagcagaagccaaccggattcgtacgcagctggatttgattaacaaaattcaggaaaaatgtttttatagtgtccgtagcggagaggaagtgccctatggcaaaagctatgaagagcttctgcagaacattgattatacgagaattcagcagatgggtgacagcagtacgatgaaaaaactgggaagcgggcagatcaattctgtctaccttgccaaggatgagcagcgcggaacagagcgagtgttaaaagaaggccagaaggatatggcaatggataatgaagcagcaaccagtgtctatagcagaattaaaataaaaagggcaacagagaaaaaatatacgatgaacactgcgtatcgtgatgttgcagtatctatgattgacaaattatttggcttaaatgcggtcgtagatacgtcttttgtcagaagtgcttcaggaaagcaatcatcactgatggataaagcatcaggagcaacaatggctgatagttatgtatacaaaggggcaaagaatataggacaggcttccttgattcaacagattaaaatgaatgagagttatctggtaaaaggtattgacacgacattaactgctggggagttacaaggtagaaatcaggctgcaaaaaaacagttggttgatgttggttcagatcagtttctggaaagtacgtttaatcttgcagcattggatttgattgtaggccatgtggatcgtcatagtggcaatatcatgatatctgcagatggtgtgaaaggaatcgataatgattcagctttcagtttacgcagcctggggggagagttgaaaggagatgcaaaaaatatttcagatgaggattttaataaatattattttcgtatagaagagaaagatggaaaaaagattaaacatgaagtggcgaatccgaatcaggctgctttatatttagatacaacatttccttatgtgacagaagcatttcgagaaaaaatagtacgtgtgtcaccggaagctgttgctggaactttgcaggggctgcttgaaaaagaagagattgacgcctgtgtggaaagagtaaaggatctgcagaaatatttgaatgatcttccggaagacagagtagttgacagttttcaccagataaaccagaattatggggaggaatatagtagtcaaataacgcgtgctcctggtatgttcgctgatacacacagtaatattatgtctcaggttgttggagttggaaaaggtgatttgcttaaagactatacatggaaagaatataaacaacttagttcaagtatggggtcgagtggagaaatcccgatcatgcggatgtatgtagaacgcatgacgggatataaagatttggatgctttaaaaattacctattacatgatgaaagaaatggcaaagagagcaacatcaggaggctttgatgtctacaacgcactggcagacggaacgatgataggaattctgaacagagcggagaacatggtgaaagcggagaaaaaagaagagcagacatgagtaccatatactataaaaaaagatacagactacccgtttgggcagtgtgtatcttttttatttatgtgaaaataacagtagaatagagtgcgtatgtatatagaagaatctggacaacgtgaaaggaatacatacaacatggaagcagaacggaagctggaagaaaaaaaactacaggaccttcgggaaacatctgaccgcctgacagcggccagccatgtacaggtggaatattttgcaaaacatcagaagatcgaagggtattatgaaagtcagatgccgggcagactcttcggctgtgaccggcttatgaagcaggataatatgtttggaacgctgcagcttggctacaaccccaacagggagcgtgtatttctgtttgccaatatgaagacttccagatatgacacggtagccagccgttatcagaaagagatgaaagagtaccagcagaaatctctgttaaaaggggataatgagaaccgggcatatgtgtccagacgctgggagatgtccacagtgctgatcgagaaacgggaaaataagccttggacaaagcgctccatcgcatcgtatcttggacgtgccaatctggaagcggtgagaaagaatcttccattttttatcaaggatgaagagcagaaggaactggatgtaaaacgtcaaagacagaagcagatccagaaagaagtatgggaactccgtaagacacaggccatggaggcgcaggaaccagcacaggaacgaccagcctggtcggaacaggaaaaagatcagaaagaattgcagggactgcgggcagaagcagtgcagggactttccgtgatcagtctgctggaatccattctgaccagaaaggatgctttgtccagaacatttcttcggcggatcaattatgcttatgattttcagaaaaaggatatcaagagctactatcgggagaagagaaagacactggaggagacagccacagctgcagatacagaagaagatcattcgggggataatacataatgaacagatcggcggagccatttcatacagaacaggaatattataaagaattgattgcctgtgtccgtctgtttctggaagacaatccagagcaggacaaaataaaagtaagagccatacttctgcagagcagagaaagagccagaagaaccatcagaagcggtggaatgattgccttggaatatatattccatgtgcttcagttcagcgaatttgaagcatatatggtgattctctcactgagcagtgagctggatcatgaactcagtcagatcatcagccgtctgaatacacagacctacagcagaattccaaccatcggcctgtgcatccgctcttatgctgatggggaagaagaacggctggagctgtggagacagtttgtagaaaataagaagaagctgggacttctgtttgacagacttgagaatacggaaggatccatgagtgctcaggagattccgctgaagctggatggaaggatcagttcctatctgcaggcatatgagcaggaggacgaggaactgggcaggttcgttcgtttgcaggcttcctgtaagggagagcttctgattcagcaggagatccagcagggactgctgcatctgtatgaccatggagcaagaacctattttctgtgcggcgaggcaggatctggaaaaaaacttcagtgtggacttctctgtgaggcgaagaagctgccggttctctatgtggacagtgtgcggcttatggaacagagggagccatcagatcagatctgccgccggatcaaacgggaagcgatcctgaaggggaatgcagccatctgttttaccggacttccgggagatgaggaagaccgggtggatgcacaaaagacagaaaagctgctgcatggaatgcgggactggaacgggcttttgttttttacatcgatatatgaatggaatcgaagcatagaaggagaacggaaagttgtaaagatccggataccggataacacaacggaggacaggatcctgctgtgggatgcctgtctgcaggaagaattaagaccagcggatctgaacctgatctatctggcagacaaataccggctgacagcaggaacgatcagggattgtgtggaggaatatcaggaccggcttctgatgaagggagcacagcccaatatggcagatctgcttgctgcctgcacagatcatctggagcaccggctgggaagagatgctgtgcggatcgaagcaaaatacagatgggaggatctgatccttccgaaaccgcagaaaaagcttctggcagatgcatgcgaccaggtgctgcttcatcatcaggtctaccaccggtggggatttgacaagaagctggcctacggaaaaggagtgtccatgatcttctacggaccgccaggtacaggaaagaccatgggagcccaggtgatcgccaatcgtctgcagatggaattatacaaggtggaaatgtcaggggtactctccaaatatgtaggagagtcagaaaaaaaactgggaaatatatttgagcaggcaaagaagagccagagtatcctcttctttgatgaggcggatgtattgtttggaaaacggacggatcagaaggattccaatgacaaatattccaatgccggaactgcctatctgctgcagaagatcgaagaatacgaaggaatcatcattctggcaacgaactttttacagaattttgataatgcattcttaagacgctttcagtttatcattgaatttccgtttacggatgttccgcgcagaaaggagatctggcaaaaagtatttccgccggagctgccaagggaagaactggatcttgattttcttgcagaggaatttcatttttcaggaagccagatcaagaatgtggcagtggcagctgcatttcttgcagcaggggaacagacatcactgaatatgaaacatgtgctgacagctgtaaagagagagatgacaaagacaggaaaaacattgatcgccagcgattttggcgtgtattactatctgatggaggaggtggaaggatgaattggttcagcaggaaaaagagagacagcaatttagagcctatgcagggacagtccagggaagaggcgaacagcggacttgatgaagcgcagagagccagggaacagctggcactggaatccatgcgttcactgacagagtcacttcgacggatgaagtcggcggaggaccgggcagaatacagtaagatcgagcggatccgcggagcggtggcaggtaaagcgggcgcatctcccgcagcccaggcggccgttataagactgaatgaggaagcggaagcggccaatgaccgtatcgcagcttcggaactcaaaggagatttccagcaactggtactggattttacggcaatcaattccagagatcatgaccagactctgacagacaagagtaaggagctggagactctgaaaggggtacgcagcaatcagaagctggcgcaggacaagagccttgccagggcagaggcccacgcggagaaggagagagatcaggcaaaggaccgtgttgccagagacaagaagcattatgtggctgattcctatcagaagctggcaggcggtatcggccggatcaatcagcatggcgagctgaaggaagaagattatgcaacacttctggctgcctgcgagaagcgatatgcagcacttaacgagatgcgccagaatgaatatgcgggcgattcagagaacattaacaaagcgatcgcagcggtggaagcgcagcttacggaacttcgttccaaatatccagcaggaagagcaaaaaatgagcagaacgaagcggtaaagaccatcaagaatcagaagaatacaccgctggagactctgatcaaacgggaaaagaatctgaaaggtactgcagaggcagccaacacgcagggaaataaagcaaagaatgcggattacatcccggatggacagggcattgaccggaagatgatcaagaccgaagaagctgtgaagatgaccacaggggatgtgatgaaaggtaagataaagggaatccccgggcagatcaaagatggatttacaggtggaaaggataagctgctcaaggcgaaggataagctggaaggtctgaagaactggggagaagcactggatgcagtgcaggatcagatcagtggaacctacggagatgtgacagggtttatcgaggatccgggagatgtgaccgagatgaaagagctggcaaaaggctttatgtccggcgaaaagtcactgtcggatgtaaagggtgatgtcttcgacgataaatttgataattcagcagtaggtatcattggaggagtgctgtccggtattgccagtgtagtgacgttatcaaagacactggtcgcactggtcaaagctatccgcaacgaatacaagagcggaaaagatggcggggatgtgaccattgataagcagggacggttccagcaggtgagaggatttatccacaaggctgcagatattatggaaggctttggagataccttcggaccgctgacgcaggtgatcccgttttatgattccattgtgggactttgtcagggaagtatcgccatggcaggagatactatggatctggtatcaagctccatgggtatccacagtatgagaaaataccgtgacaagatctatcagagaatacaggaacgtcatgcactgtatacggcagacgagaccaaagacaggaaagcagccagtgcctacaatgtgaccggtaaaaaggggctggagaaaaagcgccatgagctggagagggaagcagcgatcaaaggtgagaagacaggagctgtcaaaatcgttgcagcagccagcagaagatccaggaatgatacgatcttccgcgaagcccagtatggtctgggtgagcgtatccaagctactgaggatgtgggtgaccagagacgactggaagccatggagatgatggaagagtaccgggaagcagatcaggcccataagaaaaatgtaaaagcgctgcttcacaatgtggaagcaatcgtaaaaggtggtatcgggatcgcgtccagcggtatgagtctggcaggagagattgcctgtatgaccggtgttggcgcggcagcgggactggcacttaagacggcgtcaggagtcatggatctgggaagctccatctatgaaaaaggaagggaagcaggctcctttatctacaagagtgtccggactctgaccggtgcacaagataataagaataccgtccgggaagatatggcgatctctttgatggagcgaatggaagaagtatccgcttcacccatctggacgaccgataacaaaggatttgcagaggatcaggatctgtattcgctgggagagtccaataccagacagcttttccgccagagccacaacgtggagcatctgcatcagatcctcagaaaaggactggatacggatatgccggatctgctggagagcgagagccgtgcagaactgaagggaaaactggcagcagcatttagtcagggagatgattaggaggattgatgtatgagttatacagatcaggaaaaaatgcaggaatttgaaagactgaaagattttctggagagtcttgacctggcggcagagatcctgcccaagggaaatgtactggatgatattatcctgctggtaagccttccaagtatcgaagaatatcccagtgaccgggaagcgacggaagcagatcttcatctggcagcaggatatctgatggatcttgatgatacagatcagagactctgtaaatatctgttgttctactcccagatcattgtggacctgagcggctttgagagaacagagattctggagaacatcaatcagctgaaccggaacgttcgcatgggacattatttttatggaccggcagatggaaaagaagaggaaatgctgcagtaccgggtcatggtgtccggggcagaagatcaaccgctggatgagggtaccgtggcagatgcattgctggagatgggagttggctatgacattgcactgcatacctttcaaagagcggcacataagtagatgaaggaacgggagaaggcatgaaatatacagagattctgaacagacgtctgaaaaaagcaggacgggaataccggacaggcaatcattctgataagaaagaacggctttggaatgccattcaagagatcatggaggaagcagaagggacaggttcctttcttccatggacgcaagcagtacagaaactgaagctgaatgaacagcagcagatgctgatcgctgtattgtggggaacagaaacctatggggatcgtctgtccgtggaagagttcagaagactctggatacagatttacgaagaagagccggaaaatatgaaggctcttccggtctggtattattttaacgaggagtatgtggagctctgtccggtgctgtcaggctggctggaaggcaccatgccggtgcttccatcgggagtgcagctcagacttacggaagagaagaaaacctatggactggaagaacttcttgcggaaagtcacaggatcttttccctggcagagcagacaggcgaccctatgatcctgtgtctgaccggagcggcgggaagcggcagagaatatgccatggagcagatctgtgcaggacaggatctggcattgcttctgatcgatggagagaccttccgcggaacagagcgagagctgaatgcttgtattttgagtgcaatgttgtatgaagcgtatccttgtgtatggttaggaaagaccgaacggtgggaactgctggaaaagatgagagagagcttttccttctacggagtgatcagggaggaaggaagagcactggctgaacgcccggaagcttccgtgatcacgagaaaactggagcagccggaccggaaactcaagcagcagatggcagaagaattgctgggagatctggcggatcggctgccggaggatatcagtcttgcacacctggcaggacggcagcttcctatgggagactatcttagatacctgaagactatacggacagagctcctggcggacagcttccatgagcagacctggaatctgccttcagatagtctgcatcttcagcttctgaccggaaaccgtcggttctcagagctgaagcttccaaagcctcagtatgaacagctccggcggatctgccgcatggtagaagcaagagaagaagttatggaacaatggggatttggcaggaagttttcttatggaaatggaatctccgtgttgttttatggagcaccgggaactggtaagactatggcagcccaggtgcttgccacagaactgggaagacctctctatcgggtggatctgtcccagctgatcagcaaatatattggggaaactcagaaaaatatcggaaaagtctttgacgaagcagaccggtgtgattgtatcctgctgtttgatgaagcagatgccatcttcaccaggagaagtgatgtgtcagatgcacaggaccggtattcgaatgcagagacagcttatctattgcagaggatcgaacagtacgcaggcatctccgtactggcaaccaatcttttgcagaattttgacgaagcattccgaagaaggatctcctacatggtgcattttcctatgccggatgcttcgcttagaaaggaattatgggaagaaatcttcccggttgatacaccggtagatccggaggtggatacatgcatgctggcacaggcatttgaaatctccggtgcggcaattaaaaatgccgccatgcacggagcactggaggcagcgtcagagcacagcccggtgaagatgaagcatcttctgtccgggatccagaatgaatacagtaagcagggcagaaatttcagtgcagcacagaaggagctgctggaagcctttttatagaatacatacgatagaaagatggaggcacagatcagatgaagaagaaaggaatcataacttggatcagaaagaaaaaggtcagatatgcagcggccggaactctttgtctggctgtggccataggaatcctgacactgggactggggatcggttcgagggcagagacgagcgtgaagcttggggatcttgatgtgaactttgatacgattacggaatctggagagaccgtgtatctggtggaaaacacagagcagatgtcaaagcttgggaaggcgagtgcggatcagacaaaagggaagatattccacctgaataaggatctggagattggaatcaaatcagctgctacaggaacctttgcaggaacctttgacggtaatggacatgtgatcaagatcaactgtctggatatcacggacagcacatccggaacagagacacagggagtatctcagggtgcgctctttggtacggtgtcaggtacagtagaaaatctgatcattgatgtgaccgctgagaatgcgtcttatgagcggatctctgatgcgggggtgacggaaagtagtacaacggatccggtaagtccagcagttcagcagtatgatctgaaggatggcgaaaaggttacggtgaacgatacagatgagaagaagaagaaagcatatcaggctatctgttttaacgacaaggactatacaacggtatatctggataaaaagggaaaggaatgtacagaagaaaccgaaggggcagaggaatatcggaaatatgtagggaacgaagtaaaacgtacaacgacaacaaatacggcatcagaagcatctgtcacagattcctttggaatcctgtgtggaacgatcggttcaggcggaacagttaagaaagtgagtctgaatggtgcatcagtgacagttcggcaggcaggggcatcccatccggaaaaggtaatatctgataataagacaccctatgcattttattataaagtagattatatgccggtcacagtagcacatgagatggatgtgacgaaagacaatacattggaaataaagattccggaggtagaacagaaaacttctgtagttgccggaaatcaggcagtcggggaattgctttctatggaggtcactgcacctcaggcagtggcatctaaagacggaaatacatataccattacttatcatttaaaactgtcagcagttaatgaaactgtccgcgaagcagtactgaatacagatctggcaggaggaacatggagcagcaatgcagcgaatggaaaggtaagctccatcacaaaagcaggaacaactgtcacatatacttatacgggaacggcatctgcattgccagatggtatttcagcgaagttttgggcggatgtgtcagatggcacaggacagacagtaccggttactccagaagagcttactacaacgattgttgatgaaaaagtaccggatacggttgatacaccactgaagttaagtgtgtcagcaccgactggaaaagccacggaagcaggtgagacatcaccaaagacagaattcacggtggttctggagaatataacatcgcgaacactttcagatgcagtgctcacctatgaagatggtatgactgttgtggataaagaaggaggaacggatgattcagtaaaccatactatcacattccctacgcttatagctggtgaagaaagaacagtaacaatttcaaaagcagattctaatcccggatcagctagcaccgttacgatcagtgggacctttttggcatcagccaaggatggcaatcagagaacagccgaagcaaaggcaacggcatctacgttggtgtatacgacagtaaaaccaaagtcagtcagtaaagagaaaaatgcattgtggggaaatccaggtgtatccgtggaagtgtcagcaccggagatggtttatagtccggatagtactgctgaaataacatatacgattacggtgaagaatctgcataagtcaaaggcagaaaatatctcagttgttgatgggaataacaatagtgtaatacatacattttccaatatagctgcaaatgatacagctacttataaatggacaaagacggttccagctcccacagaagcctcaggcattcaccagttgaatcagaaaatcaaggcaacagctacgtattcagatgggagcaatgaatcagcttccgctgaaacaactgccagtacgacagtctatggaacagccagtatggaggaatcggtcggaagtgctgccttttcagcaaacggagtacaggcacagatattaacttcaacaaatgcagttaccaaccggagcgatgctaaggtcagctatacgctgaagattactccgccagccagtgggacagtgacggtgacagctccagcaggtggcagctggacgggagattacaaagaaaatgcgggattaacaacgtcagacggaagacgaatggaagtggtttccagtggttctggtgtgaaaggaatcacgattacttattcattaaaagatgttgatgcatcggaatatgaatcggtattttcgtttgcagttgtcaacaagaaagtatccacatcctgtccggatctgactgtgacaaccgcattgaccaatggaagtgataagacagtttcagcaaacaatgagaagatttcggaaaatcagctgaaactggaagtgaaggcacctggaaagacagtaaaagaccaggatggaagtgcggagttagtgtatgagcttacaccgacggtggctgctggtatcacaggcattcaactgacctcatctgtagagggaacctggggaacaactgaagagagtgcgcgtaaagctactccgtcaacgaattacacggtcacaacttctgatcagacgatttattttatccgtaagacaggtacgggggagagcaagtcggccgagactgttttccagattgatgggaaacagggtcgtatagcatatactgcagcaacggagaagcttcagacgactctggtggatctgaagcctgaaacagtaacgaagacccccggaaatctggaagtagagatgaaagcaatgccgtcgatccttacagaaggcaattccatggttctgactcttactctgaaaaatgtaagtgacaaaaaagatgaagataaaaaaggaaatcccatccatatttcaacagatctgactaaggccggttggacagtacaggaaggatccgcctggtctacgaacagttatacggtgacagacagtgcgacaggaaataagatcgattataacagtcaaaatctggaaccaaagggatccgttgttctgacaaagacgatcacatcccgcccggcagatggaacagtgcaagtggagatcgagggatatgatatttatgccggaaagctgccgacttatacgtatgatgcgggaaaatcaaacaaacaggcaggagaaccgtttactgaaactgaagagcagggtactgtgaagtcagcccagaatctggcagcaggtggtctgactggtagaaatgaaggaacgatccaggaaatccggcagaatctgacaatactgcaggcagacagaaaagagatggataatcagccagagctgaaggttggaggaatagcaggagaagtgacaaagggcagtcagatagagaatgtctatctgaccggagcagtgaagagttccgtagatggtgcagtgacaggactggcagcaggaagcggaacgggaaatcttacaagagtgattgcaccggcagcctcatcagaaggggatctgggaagtggtcttacagtgaccgatgtaaagactggagcagaggcaaaaccggaggatacatggagcaattgttggaccgctttttcctactatgaatccacagatattacggcacaaagccgggcagatgactttgatctgaaatggctggtaaatccgggaacagaggaaggaaaggatgtttttgcgttccagaaggaggcggcaggatccaggatccagatcagttttacagaccagaaatcaggccgtacatttgaatatcattccatatatcaggcaagaaagcagctgacagatgcggaaaacacagtatatgaaagtgagacaaatatgttggagctgggtgacagcggttattatcgaccagtatctgtctatgcaacagacggatatttccagtatgtacagtgttataagaccaatgatgagctgccggcagcatattacccgtatgaagaagaaaataaaaaacctgtgtttatatggaaacctgcagatgaaacggaggctgagaccaagtcagcatggagtgtggtgcggaagaatgaaaagacattagaggatcagattgttctggcacttaattcaaatattcagaccagtggtctggttatctgttatggaaaagatggagcactcacagcaaccaggtttaaccgcaatgtatattttccatttgaaggggatgctgtacagatcactgcagtaccggtaaaaaatggaaagatatatgaggaagaagtatcaccttcttataatagtacaaacagagaaaaattgccgaaaccggaggtgttctcagcagggtattatgataagaaaggagatgcggtagaacagccgttccagtcaggtggaacctatgagacagaggaagagattttcctgagaggtcaggagatcaatgggtgcagttatcagtatctgatctcaggtgaggatgttaccagtgaatggacaaaagatgatgcagatgtaagctggacaaaagaggaaactacattaaccggatggaaaactgtgtcgaatggaaaaatgtgccttccggataaggctgcaaccaatcaatacctctatgtaaaggtgcaaaaggagcattatccggatacggtttattgctttggaagtctgtccctgacagaaaaggcgggtattacagcatctatgtattaccagtatgatcagactacagggacaggagaagcgataccagaagatggaaaaatccttccgggagatatactggtagtgacagcgaataataaaccggaggcaatgcct

SEQ ID NO: 516 - DNA, 15513 bp, Unknown
  16S sequences of unknown bacteria
agccacgagcgctttatcatgacagttgtggaaccgccgccgtcgaggttaagagccgtgacgcagcccatctcgcgcatgacggctgacagctcctcgagcgtcagtcccttgccgttcgcggtgcgcccgtcgttcgcgaagaacagaacctttccttccgcggtgagaccgaccgcagtgcgcgggttcgcgaccttttcgtgctgctcgtcgacgattccgtccggcattgcgccgttctcgagtatcaggtccccgccgcctatcgcggtctcgaccgtctcccagccgggattgcaggtcgtctcgagctcgacgtgatcgccgaccttgaagtcggtgtagagcgggtaatcctcgtgcgacagagcgatcgtcagcacggcgcagccctccggtatcggagagttcgactcgccggtgaagatatcgcgtatcacacagccgatcgtcccggacggagttatatcagcgccctgaagatcaagcactatctcaagcgactcaaccgccgaaagtgtcgtcgacgcgaaatcctcggtcacaaggtaggaaccccagatagtcgggtatttgttgagctggtcgatctcaatcgcgccgttgttgcctttcaggtagatatgtacgcccggcttgccgattgccgcctgtccggtcttcgagaagcctatcgaatatttgccgtcgtcggtcgagacgagctttccgccgcttatcatgacgccgagcggaactcctgtctgcatactgaaaaagtcgccgtttatcgcgccgagcaccgggatattgccggatcctatccgcgcgaccatactgcctatcctgtcgcggccgtagatcttctcaccgtaatcgattatcggcagaaccccgccggcggacgggtcgtagagcatacagtacgcgctctgcttccttccggacgaatcctgcgcggtataagaagaatatgtaagccccgtgccgatatcgtctctcgtgatatacgtgacctcgccgagccccgtgtaggaaagcgcgccgacatttccgccaaggcacgccagagcgagaagcgtcgacagagacactttcagaaaacgacgttttttcatttattctctccttttattcaagtataaccattctcgccgaatattccttcgggagccttactttcagaattccgccgtcaagcttgcagtcggtcgatgacggataccacggactgaccttcgtgaagccgtatttcttaaggtcgatctccgcctcttccctgtcgtcgccgacgcgccagaccgcgagatacgccttctttcctccctcgcacagcagaccgtaggaaatgatccccttctgcccgatgagagccgttccggtcgggagcatcggcacggcgcaggacatatcagcgcgcatacgcttgaacgcggaaattccctccttcacgagagccatgttcttctcatccatcaggtcgagccgtccggactgatatagcgcgccgcagagaccgttcaccatgttgaatatcgtctcctcgccgtccgcgaatctctccctgaacgccggaacgtcaatgtcgtcgttccgctcgtcgtatctgaccgggtacggataggaccatatccccgccttttccggagcgtactgcggcgcggagccggtgatgatcgacggatagttatagtagtactcctgatcgctcgtcgactggagatagaaatgcttcagcgtcccgtggtcggcgcggcaggctccgcttccgcagttctctatgacaagtccggggtgcttctctatcgcgtcgtctatgaacgccgagaaagccttatagttcagtatcagcccctctgccggggaaactccgccgttgtcacagccgatgccggtcgtctggttgtagtcgttctttatgtagcggacgcccatattgtagagctcgtctatccggctcatcaggaatgccctgaccttctcgttccggaaattgaagaaataccgcgggatcggcttgccgtaccgctcgagcaggcagtcctctccaagctctgagatacacccagcgtccgggttcaccgtgtcaaactcgaaccacacgccggggacaagccccttttccctcatgtggtcgaagattccctgaagccccttctcaccgaagcgctcgttcgcgactatccagtctcccgaggcgccgagccttccgccggcgttcttgtgccagcccgcgtcaatgcagaagtactcgcatccagcctccgccgcggcgtcgatcagcgggaggagcttcttgtcggacgggacgccccacaggcagttcatgtaatcgttgaagacaaccggaaccacgccgttatcgaaacggacaagagacgtctcgcgcttgtatccgacaagagcccgcgccgcctcctcaaagccgccgtcgacacagccgtacacagccggttcggtcgtgtagctctctccgggcgccaggagatatgtccagccgccgttctcctcgtgcgccgccgtgccctcgagcgtccagatactctcgtcgttcccgcgcgtgacggcgtgggtcaggcgccagttgtgcgcgccctcgatctccatgaaatatgtatgcttgccgtccgaaatcatcgtgagcgggtagaaaacgccggtcgaccagcttccgaccgaatcgataacaaacgtctccctctcccacggatggcaggacgccgggacgagcccgcactgttcgggcgtgaagcggttccactgcccctcagcctgccacctgttgcggtcaacgaagatgtctccgcgctccgtccggataagcgccgacgaaaccccggagagcagcacaggctcgccgccgttgttcctgaccgtagttctctgtcttgtgactccgcattcgtactcgtcgagcgatacgctgacctcaagcgcgcccgatatatacctgtctcctgtctttttccatcccccgacatccgccgagccaacgcggacgacaaacgggatttccgctttattcttcataaattccgaatctcctcacatatttctgtgtatcttcattacataattctatgtatcaacattataacacaaacagcggtatttgtcaagcagattgtgaatgttaacaatatcggcgaaaaaaggaccgccgcgacagtgcgcggcagtccctccgttcatcacggtttatttctcaaaattcgcgaagaagttgagtatcttctcataatacttcaccgacgcctttgacttcttggcgtagtagctctcgaaatccttcgacttctcggttctcagcatgtactcgggatagaagctgactcccttccacgcgtcgtagacgtatccgaaatcgaacacgcggctgtcgactatcatgtcgagcatcttcaccgactcgtcgtcgtaggtgtacttcttcttgagcgcgacctcatagtacgccgggaagacctgcttgtggctctccgcgttcagcgcctcggtcatgattccgacgaaatccggatcctgaatcgtcttcggtaccgcgaggatcgcgtgatagccgtcaaccatcgtccggtactccttctgcgactcgtcgagcttcgggtacggaagtatgccgtactcattcttcttgtcgcgcagatacagtgtggtcatcagaagcgagccggacgccagcgcggacagatcgtcacggaaggagtacgccgagatatcctgatacccggagttgtttatcttctcatacttcggtctcgagttgtttattccgtcggactcatagcagagctgatacagcttctcaaagatagtcgtcgtgcgctcatccttgtaggtatactgcgggatgccgctcgcgtccctcgtgaatatctttccgccgaaagcccagaaatacgcgttggcaggcgaacccatcgactgcgtcagaccgtagaaatcatcttcgtccttctccgcgtttccgttgagatccttgtacatcggcttgcacagctcctctacgtagtctatcgtccatctgccgtcgttcacgacagcgtagagatcctcaaaattatagtcctgcgccgccttcttgtcatagtagtagcagtatgtgccgtagagcgccgacagcgcgtagtctccgatcgcgaaggtcacgagatcatttccgtaagccagatcctccaccgttgacttcgaccaccacggcttctcaaagttgatatacggcaagtcgcacatattcatgaagagcccttcggtggcgatcgttcccatcgacacgacatggttcgcgacaagctggaacgcgtcgtcccccgccatcaccgacgtctttataaagttcgtggcgtcaccgaaggtataatcggcgatatactctatcttcgcgccgaaacgctcggacaccgtctgatcccggcggtactccgcgtccttcacgacgtctccggtctcctcctcaaccacgtagtcgtcctttatgtagtcgtaggtcagaaccgtgaaggtcttcccctcaaagtttgtctccggcagatcgtcagagatctctctgttttccgtctccgcctctgtcgtctccgtaatatttccggaatccgtggtgacctctccgccggaaggctgcgcgccgcaggacgcgagtatgccggcaaaaatcacaatactcatcgcgagggatatctttctcttattcatctttaatagccattgcttccgtcacgcggaagctccctttctcccctgttccggggcttttctgatcttttcctcagtgacatattgctggattaacactctgttaatgatatattgcattatcgtacaataacacaacaggtattataacacaattatacgcaattgtcaatacaaaaaccgaaaaaaatacagaattttcggggtcaggccatatccctctcaacacttttcaaccgtgtagccgccctcgtgataattcacggtgatcaccgttccgtccgaatatgtcacgcggtaaacgtcctctccgatcttctcatgcttatccatgaactcatactggagatgcttcagcgtcctgtactcctcatccgcgtcgcgaagcgcttttacaacgccgtccatgtcctcgtccgacaccagccgcaggtcaatgtctcccatctcggtacggttcaccggatgctccggatgacagcagggcatgacctccaccgcggtaagctcgtctatgaaatgaagtcccgaaaagccgtaatcccgcaccttcggaagctcactgacgccgtatttttcatacgcctcctcggcgcagaggatatacggcacgcctccggacagccctccgctcatcgcgtagccgtcgcttcgcggttcatcggggacgtcgacacggtcgaggcactgttcacgtccggcgtcgtcagtatgttcgcggacgcctgccgggtcatatccatcttcgccgtgatagcggtcaggaacattggtctcgcgctgctgctcatcgtgattctgccggtggtcttcctcttcacgagattcatacagaagaggatgctcgcgtcgcagcttgagaaccgcgtcgcagtcgcgggcgtttccggacacgtgccggagactatacgcaatatccgcacgatacacacactcggcaaagaaaaatacatggaagacctctacgacgagagaatcgaccggagctacagggcggtcgagaaaacaaatttctgcgacgccgtctactcgccggtgataacgatacttaacgccgcgacggtcggcgtcgtcatgctgctgtcggcttctggaaacgcgtcggtgctgagcttcttcggtatgtcggtcggcgcgtcggtcgcggtcatgaactacatcgccgggatattcacgcctatcgaaagcctcggaatggagatccagacggtacagtccgccctcgccggagcgaaaagaatagacgagtttctgaatctcccggagagggatatcccggacgaaacaaaacggcatatattcggatatgtcgaacagaccttccgaccggttccgggcactgttctcgatcagctgacgctcggcgacccggctgtgacgaaggagatggcgatacgcgccgcgtcggagggcagaacagtgctctcgatatcgcacagggtctacacaagcctcggcggcaagatgattcacatctgagcataagaataccgcccgtcagacgacgaacggtattcttgtatttattcaggaattctccgcgcagatcgtgacgccgttcggcacgtctatatcgacaagagtagatgatgtctttttccatatgtgcgtgaaatacgctatttccgctatcgccgttatcgcccatgagaagacatacagcagatagagcgacgggagcgtgtggaaatacgcgaagatcgtgtatatccagattatcctgaacacgcaggagccggaaattactataatcgtcggtacaagactctttccgagtcccctcgacgccgcgatcgtgttgtccatgaacgccgacacacagtaggagaacgccattatcttcagccttcccatagcctccgcgatgacagcgtcgtccttcgtgaacagcgagaggaactcccgcccgaagaacgcgagacaaatgccgagtaccagcgcgattccgaacgcgtacgcgagactgatgaagtaactcttaacgacccgcttcttcttcccagcgccgaggttctgtcccatgaaggacgagcacgccgtatagaacgccgccatcacgtcatatacgaggttatccgcgttagccgccgccgagttgccctcgacaactaccgagtcgaagctgttgactcccgcctgtatgaacaggttcgccaccgcgaagattgagttctgaaagctcgacggaagtccgagcgagacgatctgcttcgcgaagcgcggcacgacacggatctttcttatatcaaacctgtgcgccgcggacgttctcataagagatatcgtaacaagtatcgccgaggtgtactgtgagattatcgacgcaatcgcgacgccgtcgacgtcccttccgaaccccacgacgaggataacgttgagtatcacattgagcacaccggagatgaacaggaacgcgagcggctttctcgtgtcccccgccgcgctgtaaaccgcgttgccgaagttgtaaataccaagcgcaggcgcgccgagcgagtatatatgcagataaagctccgccccgtcgataaggtcagacttcgtcccgagcagctcgagcagccaccgcgtgccgaacagtccgaacgccatcacgcagaagccggtgatgagacagatgataaaagccgtatgtatcgcgtccgacgtgtccttatcgttccttgtgccgagacagcgcgcgacgacgacgttcactccgttcgacattccgatgagtatgccggtgaaaagcatgactatgatcgtcgtcgaaccgacggcgccgagtgccttcgcccccgcgaactgcccgacgaccgctatgtccgacatattgaaaagcacctgaagcacgttcgacagcatcagcggcagactgaaaaacagtatctgcttcgcgagcggaccgtgcgtcaggtcggatgattcctttttttctttcatattaaattgtttccttttcccccataaaatgagctgattatcattatagcacagtcccctgtgtttgtcaagacgtccggcaaaagatttccataggcaccgaaagtgcaatcaaaactgtctgtttgtgtattgatttcgcccctctcgtatgatataatctatatatagctcacagaaaggacaaacatatgctatctgtaaacttcaactacgagaacggcggggtcgattcgatcgtcgataccaccgaccggtacgcgatgaactgggtcgagggaaagtcaacatggggactcgtcaaggacgccgaggtcgtctcggtcgaaaagacggacaccggtctgaaagccgtctacaagacgaaacacatgatcatcgacgtcgagcgcgtcattgacggcgaaatcctcaccgagcgctacacattccgttccggaatcggctgtgacatcttcatgcggcgcggtgagacgggaatatacgcgaccttcaacgacagctacgacaaagcgtcaatctgcatgacaaagcgctgtcacgcgcacatctggtgcggaggcgaggtatcctacgtcgaggcgagacggatgggaccgtccgaaagctgtctcggtctcgtcctgacaaaaggcagtctcgacacatacagcgtcgagcgcgacctctccgagtggagcaacgaccgcggtgacataatccttcatccgtcgccgttcgatctgcgtccatctcagacaatgactgtcgaatggaagctcttcttctgcccggatgggaaattctatgagacgatcgcggatatgcccgaggtcatgctcttcgacaccgacaattacacggtgtatcagggcgaacacataaagttcagcgtgaaccgcccggacgcggagataaccctcgacggagtggaaatcccggcgtcacacgacgtctccgcgacatacgtcgattatatccccgggcgaaccggtgagcacatatttcatgtgacatgcggcggaagaaccacgaaagccgagttcttcgttcacatcccgtttgaggagacggcgagagggcgcgcggaattcatcgtccgcaatcaacagtatatcaacccgaagagcgctctcgacggcgcatacctcatctatgacaacgaggacaagctgaagatattcgacaacctgaacggagactacaacgcctcgcgcgaacggctcgtaatggggctcttcatcgcgaaatatctccagtaccgaccggatgacgaaatgctgacgagtcttctccgctactaccgcttcataacccgcgagttcttcgacgaggagaccggcgaggtctacaacacaatcggcaaggacccgacgacgaaacggctctacaacgccccgtggatggcgctcatgacgcttgagatgtacaagctcaccggcgaccagacatacctcgacaagatggtgcggcttctgaaggtctactacacgataggcggcgaaaaattctatccgaacggtctgtcgatgttcgaaacggtcgacgcgctgagaagcgctggaaaaacagaagacgcggaagagatcacggagcttttcagaaagcacgtcacgaacataaagaacttcggcataaactaccccgagcacgaggtcaggtacgagcagacgatagtctcccccgccgccgccctgaacgtcgagatgtatatgatcaccggcgaaaaggaatggctcgacgaagcggaaaaacacgccggcatactcgagcgcttcaacggccgccagccgagctatcttctgaacaatctcgcactgcggcactgggacgctttctggttcggcaagcgccggatattcggcgatactttcccgcacacggcgtcgatacactcgtcggacgcgctcatccagtgcgcggaatgctcaggcgacagggaaatggcaaagcgcgcagtgatgggagcgagaaactgcctatgcctgttccgcgaggacggaagcgcatcctgcacgagagttcacccgctgtatgtcaacggcgtcagagccgaatactacgacgagttcgcgaacgagcaggacgggtatctctacttcatgataaaatacttcggagcactcgataaataaacagcaaagcttccgccggaatccgacggaagctctttttcagttgtttctgatcgcggtcgcgatctcacggtaaaggttcgcggcgtacacgcagaagcccttgtcgttcgggtgcagcccgtccgtgtagaaatcatcgaggtgcggagtcatgcgcgttccgccgacgactgttatgttatcgagcggcgcgcatatctcgcggattatatccgcggttctctcaaacggctctccgaacctcgtctgcttatcgttgtcgtccctccatatcgggagcaccgcgaagatccgcgatgaccggtatttttccgacaaggcggaatagaatcgccggcagtccccgacaaacgactccttatcctggatattccagttgttagtgccgtaggcggcggtcactatgtcgggagttatcggctcttccggtataagcagctccggaaagaatatgtcaccggcgatagccttgttcgtgttgtccgccccaagcatccgcgacagcgccgacgacagcgcgagcgaagggtattcggcgtcatatccgtgcgttatcgagtctccgtaggatatcatcgtgtatttccgtctgacaggtacgacagccgcgccgtcatcaagagtgaaccccgagattgtcaccgcccttgaccacgggaaacagatctcaacgacctttgtaccattgccgaggtcggcgtctatatgaccggtctcaggctttccgtccgcgctgcctgtatgcacgaccagcgcgccgtccacgcagatatcgaaccaagccggttcacggtgagaaccgaacgacagctcatagtcgaacccgacgcgctccgaatccgtccggaacgccatacgcacgtcagctgtagaatttgtcatcagacagtaatcctcacacctgtactttctgtacatttccgcctgctccggtgtgaagcggaagaacgagattttttcatcacactctgttataagctcggttccacgggtgatatcgcggacagcttccgcgtcaagccgcatattatcactccgcgaatttctcgacgagatcggcgaggagcttttcgagctttgacatcttcttcgctgcggtcgacgcccagttcttgttgttgtccctgaccgcgccgcgcatcatgccggggattccatcaagtccggcgaccgaataaactctgccgaaatcgtacattatcgacgctttgattatatcgtacatcctcgatgtgtcgtcgtctgacgaatatttgaccttcatcgccgtctcaaagaacgccggagcaacgcggtaatatccctcggacgcgagcgcctctatgaccgctgatgatacatccgtatccttcgcgtcggtcggaatggcatacatagagcctgtgtaggtcgccgcggttatgtagttctcctgcgcctcgtcccacttcggagtcgggagaacgccgtattcaaatggcgcgtccctcagagtgctcgcggcgtagtcgatcgaattcagcatgaaaacgtacttctggttaaggaaatccaccggattctcctcatcgttgctgatgaatccggaatttgagccatgaaacgcatttgtcatcttgttgatgaagtcggacgccttctcactggtgagcagcggagagaccttctgtcccatctcatcatcctgttcaacgaccctgagaccgcaggcgtaccacgcgttgtctatgaatgtgtcggacattccgatgccgaaaaagtcctctttatctttctttgagtcgctgttgaggtcagtatagatgtcgctcgtgagtgaaaacagcttgtcaaacgtccacttgccctcgtcaaccagagagtacagtccgcttatctgatacttttctgtaagatccttgttgaacagcaccccgaaggatgtgccgatagtgttcgtcgaaatgtcgcccgacgccatatagagctttccgaatacgctgagcgcgccagtcagactgtccggccaccacggcatatcaaagtcgatatatttcgtgtcaggcaagttgtagaacagtttttcacccgcgagtatcgacatcgataccccatagccggcgacaatgtcatatgccgattctccagcgagaacgctcgacctgacggctccctggaatatcttctggttcgcgttcagtccgtccgactcgatgaagttgaacgtgacgttgagtctctcctgtacggcgttgttgcgctcgtatatggcgtcgttgacgatatcgccgtcctgctccgcgttatactccggaatgagcatctcgcggtctacgaacagattcaccgtctccccgccgaaatcgaggtcatccggaagtgtgtcgcgcgcggctgtggtttcctccgccgttgacgtgccctctccggacgttgtgtcgcctccggacggcttctccgccgctgtaccgcaggacgcggtcatcagcatgacggcgagcagaagcgtgagggctcttgttcctgtgtttcttttcatctggttatcctcctgaactcattaaaattcctgtcataagcacaaaacggactttccggggtttacaacccgctgtttatgtgttataattgagtaaagctgtttgggggtattcttttatgaacgagtactttgaaatatacgactggacgggtctcagcatcctgttcgcgagccacgcgtacgccataccgggagaacactcggtcggcttcgcagacagggacaaatatcagctcggcatcaagatgaacggacgcaccgatatactgtatgataacgagcgttacgactactggggcggaaccctgctgtacttgccgaaagaatcgcgcgacaatattgtctacgacaggaaggtcatcgaagagggaaaaggtgtctatatcttcttcgattccatgaagccgctcccgccgcacccgatactgagaaagatgaatgactccgaaaaaatctacacctgtttctgcaaggtagcgaatctctggtcggcgaagggtggcgcgagtgtcgagtgcatggcggcgctgtataagcttctcgcgacgatccgcgacgacacgacgccggcggagcgcgcggatcgctcggcaacgaagctcgcggcggcagaggagtacatatccggacatttccgggatgagtacatagacatcgcgattctctcgtctattgccggaatgacgccggactatttccgtcaccggttccagaaagcgtatggtctcccgccgctccagtatatgatgcggctgaagctcgaggaagcgaagcgtctcctctcgtccggaaagagcgtgaacgagacggcgaggctcaccggattcaacgacgcaaactacttttcaaggttcttccgtgatcggaccggtgtcagtccgaccgagttcgtgaagaaaagactgtgttagtgaagaattcagtttattccaagatcgtccgctatcgcgttgtgtatctcctcgcgcatcttctcgatctttccgtagtcgtatccgtgaaaatcgttcgccatgttcgcgtatcttgtggcgtttgtcaggattattacccggagatccctttcgcggctcatgtacattgaacagccggtgtggccgcagtgaccgaagctgccctccgggaagagtcttccggtctgagtataacgcttatcgaccacgagccagccgagacctcttccttcctcaaactgagctccgggagtgtagtccttctcggcgaggtcatacagatacggcgcccagagctttccgctcctttccatgaccgccttgcagaagacgtcgatatcgcgaagtgtccagaagttcgcgccgctcccggcgataccgcccattatctggacgttttcgtcgtcgacacggtacttaccgggttctctccacctgtagcttatcacggcgtcctgctcgtcgatggctatgttgaagcggcttctcgtaagaccgaggggttccttgatgtatttttcgaagagtctgtcaagtggggcgccgtatatcttttccgctatgaaaccgagcagaatataggcgttgcaggaatagacatacttcgttccgggcgtgtaggcgagcgggttcgcgatgatctgctccgcgagggcgtcgtttccttttgccgccgcctcgggggagagcgggattcggacgattccggatgtgtgggtcagaagctgggttatcgttatatgcttcttggtctctttgtccgggcattccgggattacgaagaatctgtcgagcgtgtcgtcgagcgatatttttccctccccgacggcgcggagtatgagcggggcggtgataagcgcctttcccatgctggcgatatcgaaataggtgtccggaccgacatccggcgacgtgacaaacgcggtggtgtcccccatgcacacgagcacggcgtaagagccgaaccgcgcagaagcgagtcccgcgcgcataagacctgcggtgttttcaagaatcatgtgtacctcctgtataccgtatgaacggaaatatccgatttgttcatcattattatatcattatggcacagaagaatcaagataacgtttcggtgataagcacaaaacggactgcccgaagctgttcagacagtccgtttttcaagaacactgacagaggattgttcagtgtctcttgtgattattccggttcaaccgatcatgtggttgacagtgattattgactatcggctccgggagctgacccctggcggtagatatcggtttccaggtcgggggtttgccaggggtcgttgtgccaaagggttatgccggtgtcgagttgacggcagcggtgcatggtacagccggttttttgtttgaagacacgctgggcgtacctcaggtccttgaagccggctctggcggtcagttctgagagaggggaagagctttctgagcttatgaggcttcgaagcaggctgacgcgtgttctgaggatgtgttcggtgagagagataccgcattcgcggcggaaaatccggcccgcgtagtcgggggagagtccgattgcgctggcgatgcgtgtgacggacaaatcctcggagatatggtcggttacgtagtgcctgatgcggtagacatggtagtaggagcttgatgggatatctccgcttttttcgagttgtgagtagatcccggagcggaaagcggagtcggtctgggctgcgagctcataccagagggagaggcatctgagacggccggcggcggtgtgttcgagacgggtgctgatgagggagcgcatggtggatatgaagacctcggtgtcgtcgcgggagagggagagcgtttcgggaagggcgattgaatcggctgggaggtcgtcgattatccttgcggcttcggcgtcacttgaggtggagtgcctttcgaggcgcatatgatcaatgcggactgagactgagttcatctgggtttcggcgttttttgatattattggagagatggtgtatttttcgtccggaaaatagattccgacgcggtcggcgtgctggacgcgggtgccggttccggattccacgcggaaatctatgttgctgtgaatgccgaattcaatcataccgctgcggtggtcgattatgttgcgggattcaggcgtcattatttctatagtcgagcaggcaaattcgattctgggctgtgagaggatttcgagtgcgtagaaaatcatggtattcctccgtccttcttttaagacaaccataaatcagtgtttccttaaggatacactgaataaatcgggttttcgcggaaaaaaggcttggatttgtgggcttttttct

SEQ ID NO: 517 - DNA, 3551 bp, Unknown
  16S sequences of unknown bacteria
ttcaatcaaagaaaggcaagaaaggtgcaccacaagttacaagcaaagccaaaagcccctttgaggcggctgttttttctttcatggcgcaaaatcctttgttgacagaaaaaaatatttctgttaatgtaaatcaaacgaaggtgaacaaaatgacaattcttattatttatattctcataatctcgataatatcaacggttttaacggtatacgacaaatcggccgcaaaaaacggcagccggcgtataagcgaaaggtgtcttttgctttttgcgggtatcggaggagcaggtgcaatgctggcggcaatgaaaacaattcgccacaaaacaagaaagccgaaattcatggtaactctgccgatatttttgggagcgcacataattgtcatttgttttcttataaaaaacggatatttgaatttttaaagaaaaattcccgagccatgcaaaagcacaagtcgggaatttctttttttaataatgatgagcctcttcaagcatcatgttttttaccttcataagccttgtggtggtactgcgctcgttttcgtcaagcttcatggtgatatattttatggtttcctcatatctcggaatcatgacgtgctcgagagcgtttacccttcttcgggtcttttcaatctcgtcggcaagcaaaagacaggatttttccacctcggccagtctgaccattttcggaaaaacctccgacagggctctcacaccgtcgtcaagctcggaggaagtgaaggcataaccgtaggaatatatgtccgaagaatcctgtgatttaaattcggttttaaaaacgggaatgtgaacgctcatgacatttttttccgaaagctccaaggaaacctgctgtttcggcattaaaaacgccgtttcaagctgctccctttccatggaagccgacgcggcggcaaagcatttgttggcggcggaaataccgctttccacttcctccctcagccgctcgttttcatgcaccatatccataaactgccgcatgagctcgtctcttttgtccttaagaagcttgtggcctcttcttgaggtattcagcttttttttcagatttgtaagctccattcgagtggggtttacgtttatcctcgccataatttcacctcggtctactcgtcgccgtcgtagtatttcctaaggaagtcttcatttatgcgcttaagctcgcttcggggaagaattttaagcagcttccagccgatgtccagcgtttcctcaatggaacggtcggtgttatatccttgggacacatattccttttcaaactcgtcggcaaacttggcataaagcttgtcaatgtcggtgagggccgattcgccgagaatgaccatgagctcctttgcgtccttgcctctggcataagccgagaaaagctgattcatggtgccggaatggtcggctctcgtcttgccctcgcctattcccttgtccttaagtctcgaaagagagggaagcacatctatgggcggggtgattcccttgcggtaaagctcgcgggaaagaattatctgaccctcggtgatatatcccgtaaggtcgggaatgggatgagtcttgtcgtcctcgggcatggttaaaatgggaatcatggttatgcttccctttttgccctgctgacgtcccgcgcgttcgtaaatgctcgcaaggtcggtatacatatatcccggatagcctctgcggccgggaacctcttttcgggcggccgacacctcacgcagagcgtcggcatagtttgttatgtcggtgagaataacaagaacgtgcatttccttttcaaaggcaagatattccgccgcagtcagcgccattttgggcgttgcgatacgctcgattgccgggtcgtttgccagattgacaaaaagtacggttcggtcgagagcacccgtttccctgaaggattcgacaaaatagttggattcctcaaaggtaattcccatagccgcgaaaacaacggcaaatttttcatcatcggaacgcacctttgcctgtcgggcgatctgcgccgcaaggtttgcgtgaggaagtcccgaggccgaaaaaatcggaagcttttgtcctctgacaagggtgttcagtccgtcgatggccgaaacgccggtttgaataaactcgtttggatactgtctcgcggcgggatttatgggacgtccgttgacgtcaagacgcatttccggaattatttcggggcctccgtcaatgggatttcccagaccgtcaaatacccgtcccagcatatcctccgaaacgccgagttccatctggcggccggtaaagcgcaccttgctgttggaaaggtttattccggtggacgcttcaaaaagttgaacaagcgcgtttgtgccgttgatttcaagcactctgcagcgtcttatctcgccgttttcaagctcgatttcgccaagttcgttatatttaacgccttccacgtcccttacaagcataagggggccggccacttcttctattgttctgtattccttaggcatcttcccttgcctcctttacgctttgctcaatttgtgccgcaagtgtttcggtcacctttttatactcgcttgcaacgtcctcttcctcgacatatttaaaacgtccgatagcctctctgaccggcagagccgaaagtctttcgatgcttgcgccgtcgtccagcgccttttcgcagaggtcgtagtattcaagaatcaacttcatcatgtcgagctgctttgaaaggcttgtgtaggtatccacctcatggaaggcaagctgatgaagaaaatcctctcgaattgaccttgccgtttccattttgagcctgtcctttgccgacagagcgtccataccgacaagcttgactatttcctcaagctcggcctcctcctgcaaaatcgtcatcatacgctgacggagcttcatccagtcgggagaaacgtttttgtcaaaccaaggagcaagcaaatcaagataaagagaatagcttgtgagccagtttatggccgggaaatgacgtttataggcaagtgaggaatcaagtccccaaaagaccttgactatgcgcagagttgcctgggaaaccggctcggaaatatctccgccgggaggggaaaccgctccgataaccgaaagcgcaccctctctgccttcgcttcccaaggaaaccactcggccggcacgctcgtaaaactgagcaaggcggctgccgagataggcgggatagccttcctcgccgggcatttcttcaagacgtcccgacatttctctgagcgcctcggcccaacgggatgtggagtcggccataagcgccaccgaatatcccatgtcgcggaaatattccgcaatggtaatgcctgtataaatagacgcctcacgggcggcaacgggcatatcggaggtgttggctataagcacggtgcgctccataagggattttcccgtgtgggggtcgataagctcgggaaattcgttaagaacatcggtcatttcgtttccgcgctcgccgcagccgatgtaaaccacaatgtcggttcctttaaatgaaaa

SEQ ID NO: 518 - DNA, 12075 bp, Unknown
  16S sequences of unknown bacteria
tgaacggccgggcaaaggggatcttggaacagttggagtatccgaccgcatgcgcggttcccgaatccggcacgccggccacgctgtcgatgtgcaggtcgtcccgcatatcatgcttggccagcaggtctccgcagcggttgcgcatgcattcgacattgatgccttcgtaagtggatgtcggataaccgtaatatacccacaggaacgaacagatcttcatctcttcgcccggctgcttgacgacttccacccattccggcgtcacgaaatcgatctcccccggaccgagatcacggtaatgacgatagcccaggttcaggaacgcgctgctctcaaaagtgatgcagtaaccatcatccttatgaccgaggatcaccggcgtgcggcccaggcggtcacgggcagcgtagatcccttccttcgtcatgaccaggacgctcatggagccttccaccatgtcctgcacataagaaaggccctccacgatgctctgcttatggttgatcagcgcggccaccagctctgtcggattgatctccccgctgctcatctccagaaaatgcgatgttcctttgttgaagcacagcgccttcagcgcctccagattgttgatccttcccacggtcgtgatcgcgaacgatcccagatgggaattgacgagcagcggctgtgcctcattgtcagagatgcagccgatgcccagattgccctcaaactcttcgatatcatgttcgaatttcgtccggaacggagaattctcaatgttgtggattgcgcggttgaatccgttttccccatgcaccgtcatcccggcgcggcgggtccccagatgggaatgatagtcaactccgaaaaacagatccagcacacagtccctgcgtgatgccaccccaaaaaaaccactcattcaattttcctccaatcgtcgtgacaccggacaaagcgcgctttgcctgatgccgttccttcgtcaaaaaataacaggtctattgtatcataaacctacctttatggtacacacattctttacatattttctgatgactgacggccggaagccatgctcatctgcgccatctgccgttccagctgatcatggaactgtccctcatgcatccgccacatccagttctcgccaagcgtccccggcgcattgatgcgcgcatgcgaatccaggtgcagccagtcctgcatggggatgatgcagtccgtgcacgcgctgtccatgagcgtgcggatgcacaggtcgcacaatgcccatacatcctcttcttccgtgtgcaggcaagccttcagggcatccttacgcacacgactcatgcggttcagccagcccgtcagcgtatcctgatcatgggtgccgctgtagcagatacagcgatccggatacgcatccggcatgctgccgcagtaatcaaatgacgtctgcatcacccgcatgtcgctgagcgcgcatgcggaagcgagcagcgtgacatccgggtgcaggccgtcattttccacgatgatcttcagatcaggaaaggccgcgcgcaccgcgctgaacagcgccgtccccggaccagcgatgcgctgtcccaaagaaacgtcttccccatatggaatggcaaaggaagacagacatcctgcggcatgatcggcgcgcaccccatcataccaatgggcggcctgggcgtatctgccgatccaccagcgccatccttcctgagcatgcgcctcccagcgatacagcgggcatccccagttctgtccctgcggatgatcgcggtcgcccgcacagccggcggtcatctccatttccaggcgcgcgttgagcatgaacagctgcggatgcgcccatacatccacgctgtcatatgccgcatggaaaggcagatcgccgatgatctcgatccctttttggttcgcatagcgcttcagcttcatccactgctgttcgaatacatactgcgtaaaggcatgaaaggccatttcttcacacagctcctgcttggcctgcgccagtgcctgctcatcccgaaagcgcagcggctgcggccattcgtaccagggcgcgccgtgataacggtccttgagcgccatgtacagcgcatgatcttggatctcttcctgctgctggaaacgcaagaacgcctgatcctccgctatgccgctgcgcgaaaacgccagatgcagcaaatgcatgcgggtctcatacagccatccataatccacacgatcgcggtggatctccctggacggcagttcatccggataaagccacccgttctccgccagctcctccagcgagagaaaatacggatttcccgatctcagagagagcggctgataaggcgaattgccataaccggtcatcccgagcggcaggatctgccagatccgctgcgcgccgcgctgcagctgatccacaaaatgatttgccgagctgtccaatgcgccgatcccatacgccgagggcagggatgagaccggcatcaatataccgcttttcttcataagctttcctccatctgtgcatgcacgcacacttatacgtttattataggagaggaggtaagcgttttcaataccgatcagccatgaatcacataatcgaaccatgcttcatagatgtccgcgctgtacggatcgctcttgatcatatgctctgtgttcccatccatcgccgtccatacatccagaccatgctcatcctgtcccgcatgctcaaacgacaatttcccagcgtcgctgcggaaacggcggacaaatgcctgcaccttctgcagccgctgcgcctcgctcagctgcacctgctctttctgatcgtaaaatgaccagagatccagcgtataggatctcagatcctgcccctcatagctcatccggatccagctcctgcctgtctgtcctttgatctgcacgggcgcagaatacgcatgatttcgaaacagcacatcctcgctcatggaccaggaacaggattccatatccaccttgttccagatctcatccgggatcatcccctgcaaagcggcaaaggcctcatcagagctcgggtaggcagaaggatcgttttccgctgtgccgcgttcatcatacatcaggtaagcctgcacgaaatccgtgaagctgtctgcatcggtgatggcggtcttcgatgagcgatctggcgcctgatagacgagatacagcgtctgcgcatcattggtcagcgcataagtgacatcctgcagcgtctgctgcaaagcgatcagcgcaaaggcattgcgtttcaagctctgctggtccagcgcatcccgctgagcaaacgacagatcctcatgcgcacagcccagcgtgatcatcagatgccggggaaccccgtcaacagacgtaccgtctgtgcccatcttctctacgccgcgataccgcatcccttcgccaaaatccatcttcgagaggaggtcgtctggatcttcggccgcctcccatgcgccataaagattctgcagataatgcagattgcgctgcgccagcggatcactgagtgagcggagcggaataagcaagagcgcgagcgcgccgatcagcagaaggacgatgagcgagtgatatttgttccaatgcggcggcttcaggatgttgcggatgcgcgagcggacatctccgcttcgaaaacgcgctgccgcccctgcccgctcctgcgccacggacagcagcacacgggcatagcctccgggaggaagcgcgttgcgacggaccgcctcctcatcgcacgacatttccatatccgattccatcagccgccaggagagccagaccaatggatggaaccagtagatgcagcacagcgcataagccagcagccgaagctgatgatcatgacgccggatgtgcacccgttcatggcagatcaccatggcctgctcttcctcgctcagcccagacggcagatagatccgcggatgaacgaagccgaagacaagcgcaccgtcgatctcctcgcagcgacagatctcttcatgcagcgcttcggcatgctgcagacggcgccgcagcaaggaagcggaaatcaggccatatcccgcaaagccaaggacgcctgcggcccagaccgtgctgagcatgtcaaaggggtccgccatcatctccacaccggctaaaggggcatcctcttccttggccgcagccggcatctgacgcgcagcgatgccttcctcttccaggatctcatgcgcttcaggcggcatgacccgctcgctcacatccgcacgcagcgcatgatcgctgcgcacgaaggccggcaggaccagcgcggcaaagacgatcagccacagcgcataagagaagcgcttcggcgccctgcgcagcaataggcgcgcgagcagcacgatcaggatcaccgggacagcgttcaatccgagccgcagcacttgcacgaacagcgcgttcatgagcggatctcgtcctctgcctcatcgatcagcgtgcgcagctcctcgatctcctgttcgctcagcgagcgatccttcatgaacgaggcgacaaagcctggcagagaaccatcgaaaaatttctcgagcagctgaaggctctcgctgcggcgcacgtcctccttcttcaccagcgaagtgaccagcgcgtgatcattcttcagcacgcccttttcacagagctttctgagcacggtgtatgtcgtcgtccgcttccagcccatcttctcctcacataagcgggcgagcgcccttgagctcagcggctcattgtcccagacgatacaggcaaattcatattcacgttcatgcagcttcatccttctccctcctgtctatcacaatagaccacacatttagtctatcatgataaacagacgatgtaaaggcttacagcatgatgtgatgcgcaaaaaaacgtccgatgcgttttccatcagacgtcttccactcaacggctcacaagttgatcttccgcatgcagattgcctcgatcagcagcgtcacgccgctgacgatcaaaaaggccgcgatcatcacattgagcagcaccacgcccaccatcggcatgatgaacagcagcaaggccgcgatcacgctgatcacgccgcagaaggtcatcgaatacgcccgggtgatccggaagtaacgcagccgggaagccagggagatcttctgtgcaccggcaaacagcagcaccaccgcgccgaggaagaccacggagaccgcgctcagatacggcggtgccatgatggacgcgatgcccagcagcaaggcgatcagcgcgatcggcaaaagcatcagatccctgaaataatccgtcatgctgaagtactccacgagctgaaacaccgcgtaaaacacgagcacgccgccgatgatccactgcaccacctggtatacatccaccgggaacagcacgcacagcacgccggcagcaatcagtaccagccccgcaagcacattgatcactcgcttcttccgcaggctgcggttccagcaggagacatattcccgaatataatcatcttcccgaatataatcatcgcttccattaaaccatctcatcatacgaccctccattgtcaaaaaggggggcatcgaaatgccccctgcatcacattcgatccatccgctccatgcggtcatggtgtatctttcctgatggaagataccctttgttcacgacccattatacaccgacgatcggcgctggcaagggcgcatcgtacaaaaactagacaaaattcactttctgtctaccttatgtgcgcgggtgaaaaaagatcaatcgcgtctgctgccagagaaaattgatgacatcaaaaatgaacttgcgctcctccgcgctcatcgcagacagctcgcgcagcccgttgatcccctgacgaagcccgagctggctcatgtcgctcacgctgcggatctccaggcggtccatcacccggaagatgagatcgacgaatcggcgccgctcctcatcgcttcgatcgagcaacacacgctgaatgtaatcctgcaccttgtcgctctcctcgctcaagccctcagcaaggatgaaatcatcacagcccacgctccagcaaaacgcatcgtgctggctgagcccgctttcccgcgcctcgatgaccaccgcagcttcccgatgttccagcagtcggccgatgatgcttccctgcggcaaataagtgacgatccgcgaaaggatgccgctgcactcatagtgcgcgtaaaacgtctctcgaaagccggggccgtcaaaattgaacaccttgcggatctgctggtgcaaggaagtctcccggatggcggcgtacatggcaagattgccgcccttggaatgtccgcccagatacagcgtgggcagatcgcgccggcgcacccgtcccaaaaaccgcttggtctgcacatggcgcttcgcgcactgccgcgtatactcccaggcgagcacctgcgcagggacgctctcctgatacgtcatcttcatgtcttccttccacccgatcatgctgctgtccgtgccgcggaaagacaggaacagcgcgccatcgggcagcttcatcgtcacggccgcaaactggatctcctgcgcctcatcgaagacattgcgatagtcccccatcgtcacctcccgataacgcacgctgtccttcagcagctccagcagcctggggatcagcggggaatacgcgaatatccgcgcaaagtccgcaccttcacgccgctgcaggaaaagcgcgcatgcctcgctgagcggtctttccgcctcattgacgacctcttcccagtccacataagacagcacgctgaagatcagtgcgtctacaggattgaacccacgctcctgaaacgtgatgtctttcctcagttcagcataatccagtattccctgcataagcatcttcctctctgataagcaaaaggctcatcgctgagcctcattcatattccttgacatgtccgtttgcggagcaaagcagcagcgaaagattgatcttctgctttgcggctgcagaaaggcgtttccagtcgcgcagataagctgcatcccgcatgacgacgatggaatacttctccacgttttcatccatctgcgtcatcagctcaaacagcttgttcttgagcgagaagcgctttccgcgtccaggcttgtccacgacgatccgccagacgccgttttctccatgcaccaggagctcatcttccttcacgtccgcattgagccccagatcggccagccagtcggccgcgatcgacgccaggtccttcttctctgccgctgccttttccttgcgccgtccggcagcgcctttcggcttgccgcggcggatgtcgaacatcggctttttatccgcacggtccccgacctgatacttcaccgtcagatggctgtcatagccattcttgctccggctgtccttgacgatcttatcgccttccaccatcatctgcttcatgacgctgcagcaagtgctcatgaccggctgcatgccggtcatcctcgccacatccctggcactcagctcgatatactttttttttccgtccttcgcttcgtccagtgctttgacgatgacattcacataatcctgtttttttgcgttcacccgaaaagtcctccttgcagtctgtatcttcagctgaatagctaaaacacttatatatttaatatacataaatttgatcaaaaatacaactgaaattattatattttttcatttttttcactcatgatgatcatatcgttcctgactgcaaaaaagcagagatgagaagcctcatccctgcatacagcttatgctttgtctttgatggctgcctgcgccgccgccagccttgcgatcggcacgcggaacggtgagcaggaaacataattcagccctacacggtgacagaactcgatgctcgacggatctccgccatgttcgccgcagatgcccagtttgatatccgctctggtcttccttcccaattcagttgccatctgaatcagttttcccacgcccttttgatccagatgagcgaatgggtcgcgttcaaagatcttcttttcgtagtaatccgagaggaatccgcccgcatcatcacgagagaagccataggtcatctgggtcagatcattggtgccgaatgagaagaattccgcttcctcggcaatctcatccgcaagcaatgcagcacgcgggatctcgatcatcgtaccgaccttatatttcatctgcagtccgctggccgcgatgatctgatcagcgaccttgacgacgatctttctgacaaacttcagctcttctcgatcgccgaccagggggatcatgatctccggcaccatattccaatccggatgtctgcgctgaacattgatggcagcttcgatcaccgctgtcgtctgcatctcggcgatctccggataagagatggccagacggcagccgcggggtcccatcatcggattgaactcatgcaggctggtgatcacgctcttgagctcatccacatcgatgtgcatgtccttagccagctgcgtgatgtcatatgagctggtcggcaaaaactcatgcagcggcggatccagataacggatggtcactggtctgccctccatggcctcatagatgccctcaaaatcgcttcgctgcatcggcagcagcttatccagggcacgcttgcgctgttcgctcgtcttggatacgatcatctcacggacggccttgatacgctctccctcaaagaacatatgctcggtgcgcaccagaccgatgccctctgcgccgaaggcgacagcctgcttcgcgtcatgcggcgtatccgcattggtgcggatctgcagctgacgacgctcatcggcccatttcatgaaccgttcaaaattgccgctgatcgctgccggaacggtcttgatggcttctccatagaccgcgccggtagaaccatcaagagagatccactcaccgcggtgatactcttttccatttacgctgaaatatccttcatcatcgtgcatatcgatatcaccgcatccggatacgcagcatgcgcccatgccgcgagccacgacggccgcatggctcgtcatgccgccgcgcacggtcaggatgccctgtgcgacatgcatgccctcgatatcctccggggaagtctccaaacgcaccaggatgaccttctttcctttggctgcctctgcgatggcttcctccgcgctgaagacgatctgtccgcatgcggcgccaggagatgccggcagtgccgtcgcgatcggtttggccgccttcagctccgatgcgtcgaacatcggatggagcagggaatccagctgcttcggctctaccatcatcagcgcctcatcgatgctgaccttgccctcatcgaccatatcgcaggcaatctgcaaagcggccgcagccgtacgcttgccattacgggtctgcagcatgaacagctttcccttttcgatcgtaaattccatatcctgcatgttgcgataatgattttccaatgtatcgcagatctccacgaatttctcgtatgcctgcggagcaacttctttcagctgatcgatatgctgcggcgtacggatgccggcaacgacatcctcgccctgcgcgttcatcaagaattcaccgtacagcttgttctctccggtgctcgggttacgggtgaacgccacgccggtaccgcagtcattgcccatgttgccgaataccatcatctgcacattgaccgccgtgccccagctgccaggaatatcgttcatcttccgataataaatggcgcgcgggttattccatgaacggaatactgcctggatcgccccgaacagctgcgtacggggatcctgcgggaattcgctgcccagctcctgcgcatagaatgccttgaagcgcgcggtcagctccttcatatcatcagcttccaggtcgatatcttcttttacgcctttctctttcttgatctcatcaatgatctcctcaaaacgggatttattaagccccatgacgacatccgcgtacatctgaatgaatcggcgatatgaatcataggcaaagcgcgggttatccgtcagcctggcaacgccttcgaccacttgatcgttcatgccgaggttcaggatggtgtccatcatgcccggcatcgacgccctggcaccgcttcgtacggagaccagcagcgggtcatcgacatcgccgaacttctttccggcctgctcctccagcttgcccaggtaagtctcgatctcggcgcagatctcatcgttgatcttctcgccgtccgcataatactgattgcaagcctctgtcgtgatcgtgaacccgtaaggcaccggcatgcccagcttgctcatctgcgccaggttcgcaccttttccgcccagcaggtcacgcatgttctcatcgccttcggcgaagagatacacaaatttcttactcatgatgattcctccttaaatgcctgaatgtaatcggttacactcagtgttgaaactattataatacaaatctaagcgttttcatagtctcaatttcaaataaaaaggatatggagcactgccccatatcccgttcatgactgtttctgatacgcctgcaggatcatctccgtgacctcctccggcgtgaactttccggtattgatgcacagatcataattgtctgccctgccccatacccggtcagtatagtactgataatagttgctgcggcgcttgtccaccttcttgagcatgccttcatccgcgtcttccacatgatattcatcgatcacgcgggccaggcggctcttgagatccgcgcagatgaacacgttgagcacatcgtcgcgatcctccagcacatagtcggcacagcggccgatcaggatgcacggccctttttccgccagctgctcgatgatgctggactgcgctaagaaaagctcgtcgttgagcgaatactcatagatcccgccggcaggagagcccagcgcgaagccgatggcccccagcacctgataaaaccggccggtctcctcgccctcgctgcggaagatgcgctcatcgatgccgctctctttgctggccagctcgatcagctccttatcgtaaaacggaatgcccagtctttccgaaagcatcttgccgatgctcctgcctccgctgccaaactgtctggaaatggtaatgatgttctttttcatacaggatccctccttgttaatttcattatagcaccgtttcaacacttttccatgacaaaagtcactttcggcggcgaagctgttccagctgctgcatccggcgctgcaccttctcctcgctgccataggcgctgggctcatagtacacatgatcctggatgcattccggcagacagaccatgtccgtgatggcgttctcctcatcatgcgcgtaccgatagccctttccatagtccagctccttcatcagcttcgtgaccgcattgcggatctgcagcgggaccggctccttcatcgtcttctgcgcatcgtccttcgcccgctcatacgcgcgatacagcgcgttggatttcggcgccagcgaaaggtaggtcaccgcatgggtcagatgcacgctgcattcaggcatgcccagaaaatgcgctgcctgataggccgccacacagatctccagcgcacggctgtcggccatgcctacatcctcgctggcaaagcgcaccagccttctggcgatatacagcggatcctctcccgcttccagcatgcgcgccagccagtacaccgcggcctgcacatcgctgttgcgcatcgatttgtgcagcgcggagatgagattataatgctcttcgccctttttgtcatacaggaaggacctgcggctcgtacattgttcgatcagctcaacgctgaccttcagccatccatcttcttccacggcgttgtatacggccatctccagcgtattgagcgccgtccgcgcatccccggccgcaaattcggcgatcatctccaccgttccttcttccatgcgcagcggcttgcggccaaagccccgctcatcgcgcagcgcacggcgcagcagctctgccagatccgcggtttccagcgcgcgcagcacgaagaccttgcagcgggaaagcagcgccgagttgatctcgaacgagggatt

SEQ ID NO: 519 - DNA, 9724 bp, Unknown
  16S sequences of unknown bacteria
ttttccgactccgttgcgcggcgggcgaaatctatccctgtcttcgcccgtccgcgatcgcctgaaaatttcccgaaagaatcggcgccgggacaaaacgcccggaaagaggattcgtttacgaaacgattttggacgaggtcgtctgcgatgccgcatagtccacgcggtcggaatgttcgtcgtttttcatcgcgacgggaacgcccatggtgctgggcgccttccaaagcgccgtcgtgacgctctcgtaagccgcgcccgtcgccgcgtcgcccgtaagggtgattttgaccgcgtcgctgggtttggaggcggaaaaagcgctggaagtcgtgtttgccgtcgccgtcacccaataggtgcccgcgtccagcgtgtacgtgtaaatgtcgttgagataccccttatccccaagcggtttatgcagggagtcgttcgaatagccccagatatatccgcccgcggggtgcacgtctatcgtcgccagcagatcgtgcaggtccaccgtgtccgtcttgacgaccgtcgtcaaagcttcgtccgaatagaaattgaacgtgacggtaggcaggaactgatacatataatagtcgttgatggtgtaccagtcgatgacgagttccacctgattgccctccgtcatagcgagcatttccggcttttcgaggacgccgccgacgccgtactgcgctttgagcacctgcgtttccggagcgccgtatcccgaccccgccgccgcgaaggtgacgagcttgatgttataatccccccagccgaagcccgaaacgtccacgttgcccgtcttctcgcccgtgctgccgcccgcgatgcgcgaggagcttaccgtgtacgtattggcttccgtgccgttcgtgacggcaaagcagcgcacgaagtagtaacccgcgtttttatccgtggcggtgaaggagaaatctcccgtttcggtgttgaaggtgaaattggtcggcgcggacaattgatggagcgattcggacgaggaggaactgtcttttcccttgctatcctcttctttgccgcagcctgccagcagcaaggaaaaacagctgacggcagtcaaaacgcctacacaaaatagaaacaatttattttttctcttcatttttttatatgcccttataaattttatttttcgcgtcacgatccgcggggaaagtccccgcagaccgccgcacagtaagctctttaagcctttttcgccttctttttcttggcgacgttgacgccgacgataacgcccgcgattacgaccgccgccgcgacgccgccgacgacgcagccgatgatcagcgcggagttatccgtgctgtcctgcgtaacgccgatggagccgttgccgcagtattggaagaggcagtgcctcatggtgttgtggagagccacctgaccgtaggtatagctcgtggcgtcgccgtaagcggcaaccgtggaaggggcgttgatatagcagccgcgggaaagcatggcgccttcgatcgagagcatggcctgagcgctgttgtagacgtcgccgtccgcgccgtcgccgtcggtgatgaggaatccttcccatccccattcgtgacggagcacggtggtatacatcccgtaatggaaccaggacatcccgatacgattcagcgagcccatgatgccgtttgccttatattccttgcacgcgatctcataggtgcgaagataaatttctctgatcgcctgctcgttcgcccaagtggtgttgccgccgcggttggtatcgccgtcattcaaagcaaagtgcttgatgagcacgcccgtgcccgtagactgaatccccgccaccgcgctgccgccgatattgccggaaaggaagccgtcctcggaataatactcgaagtttctgccgccgaagggagaacggtgaatgttcatagcaggcgcgtatcccgccccgacgccgaacagaaccgcctgattgccgtacgccacgccttccgcacgggcgagatcgttgttccaggtcgccgcgatcgcaaccgcgcaggggaaccaggtggcgcccgccatcgtgccgttggcgacttcgcccggaccgtccaccgtcttctggctctgtttgccgacgctttccacggcggagatctgccagcccgaattgccctgtatttcgatcgcttccgcgagggtggtttcttccaccagcttatcccagatcgctttgcccttttccgtggtgatgggaacggtcaccatatcctcgcagcagagtttatgatacttgctgccgtccgcaggcgcttcggtgagcacttcaaaatagccgttgtcgtcggtgatcacctttccgtccgcgtcttccttgacataataggtctgtccccacttgggcttttccatcgtcgccgtcgccacgccctcgggcgtgtattccgcgaagggcatcatgttgttgccgtgcgcgtaaatggtggaagtcagcgtcttcttgacgcccttgacgtaggtctgataggtgtatgtatacgattcggtgccgcgcagattgaggcatttttccacctcttcgttgagcacctcgttcgccttttcgttagaggtgtgcttcatgatcgcagccatgccccctgcgatgtcgctccgcgaaaggtagccgtccagcatattgccgtcgcccgcagtcacgtcgtccatggcgtttgccgcgacggaagcgtcggaatcccgcttgcccgcgccgtcgtcgttgtagacgatcgtcgaatcgagcgtcacggctttggacgcgtacaccgcgttgtcgtccgtgctcgtctgcgaccagcaatgggcgttgtcctgcaaattaaagtggtattctcccttttcgagaacgtagcagccctgtccgaagttatcgaaagaagcgagatcgtccgtcttgaattctatcgtgacgtcctgcgtcttccccgcctctatttcgtcagtcttggcatagccgacgaggacgaccttggacttttcaagccctttgcccgaaatgccgagggagccgtcctgatgatagggagcgtccatatacagctgtacgatctccttgcccgccacagaacccgtgttctccacggtgaccgtgacggaatttgtgccgtgcgctttcagggacacgtcggaggatttgatggtctgcgtaaaggtggtgtaggaaagtccgtagccgaaggggaattgcaccacttcgtcgtagccgctcgccttgccgtttttgaattcgatcgccttaaaggcgtccgaatcgaaatagcccacggaatcggcggtttcataatagcgatagccgacatagattccctcttcgtactgataaaaagtctgcccgttcgtatagcggttgtcgtccgtgttgtagtaagtgggattggtagtcatatcgtagccgtacgtatccaccaaagcgcccgagggattgcttctgcccgtcaaaacggtgcccacgcccacgatgcccgcttcgccgggatgccctatccaaaggcacgcgtcgacgttataggcggtcgaatcgatgaaccccagctccatcgccgccgccgaattgacgagaacgatggtatgtttgaaattttctttgcagaattgcagcaagtccttttcgtcctgattgagttcgagataggtgctgcccgtcagggtgctgccgtccccgtcgtagtccatggaaggcgatgcgccctccgcgcccgaacgggagaacgtgacgatggcgtagtcggtataccccgattgcaggatggaatccttgcccgcgttataggtcgtgacgggaaattcatggattttcgtgtaactcgtccagccgactttcgcaggatcggtatcgtccttgtttctctttccgccgcactgatttttcagccagctccaagccgtcgcgttaacgtcgagtcccgcttccgcaaaggcgtcgttcatcatgacggtgttctcgtcgtcgttgccgcccgccgagccagtgccgccctgtacgtagttgtaagccatagagccgagaagggtgactttcgtctgttccgcgagaggcagacagttgttcttatttttcaaaagcacggcgccctcggcttcgatattcacacaggtattgtacccttcctgatagcaataatcgttatcctttgcggcttcttcggcaaacgcgccgaaaaaccgagtacggggaagcgtgccgctgacgaccagtgccgccgcgacgaccgcgacgcccaacgctttgcatctgccgaaacgttttttcgttttcatcatttccttaatttctccttgtttgcgatacttttttcaggcgaaaacgcctttgcctgccttcctgcaaaaccgccgaaggctgaatgaaacccgaccattttatcctcctaaaaatattttttacggacctcccgtaagttcgacacaaattttacacatcccccacgggcttttcaacattttcttcatatcctgtcaaaaaacgctcatactttgtcgcggcgcgacaattttaggcgttaaaaaagcgggtcgctttcgcaagctcccgccccgtttttattgccgccgattttttctctcttcctccttttttttccttttaaatcgctgctttcgttccgatttctcccctctatctttctttccgcgacgcgtatccccgcttccttctcatgcccttttcgccgcgcctcttccctttcccgaggcaaagcgttttttcccaaagattcttttgctgaaaaaaaacgctctcctcccgacagggaaaagagcgcttttcgttttttatttccgccgcggaaggatttttcatatcgcctttctcagcggttgttcccgcgcggaaatttcctgttcgcagggcagaatcatgttcagattgaaaatatccccttcctgaataaaagaaatttccccgccgtattttttcaccagcatctgcatggatttgaccccgtatccgtgattgttcttatcgggtttccccgtctgcggcaggccgttttcaaacgacaccttttcccgggtatagttctgcaagtgcacgctgtaaaatttccccaccaagcgcacggtgagtccgatgtacttcttctcgggatcctccacgttctccaccgcctcgatggcgttgtccaccgcgtttccgaaaagcgcgtataaatcgcacggattcataaaggaaagctcgaatccattggcgatacaggtgaatttaatgttttttcggttgcagagcaggctcttttcggtgaggatgatgtccagcgtggaatctcccgttttcatattgcagtcgtaggcgtcgatgatgtgctccatttcgctgagcgactcttcatcgatcattccctgactgcggaactgacggatctgatgctttaaatcgtgacatttgatattcagcatctctatggtttccttggagatctgatattgatccgcgctctggcgcagcaattcctctatccgcttctgttcgttttgcaggagcgagaaggtgaaaatgccgtattgatagcaaagccccgtaaagttgcaggcgagatccgccatacggaaggactttccatcctcgtgacgctgacccgcatagatgcccataaagacgcacacgaagagaatgacgcacaacacgacgacgacctgcacccactggactttatcgagcgcttccgaattcaccttgcgaaggaacagcagccagacgacgaagaacacggcgagcaggaagagatagtgactgaacacgacccagcccgacggcgccagctccccgcgcacgagtctgtccaaacaaaaagcggaatgctggatgaaataacaattcgcgcccatgaacagcaccttccagacggacatacggaaacatacccccatgacgagcagcataagcccgaattcgatgctgtaattcaacgaacttctgaacagtccgtttttgaatatccaaaaatcggacaccaaatcgaggagcttggggcagtagtaggtcaaagcgatgcaggcgggtacggaaacgagaactctcacgaaaaataattttcgtttggggaatctcgccacggtcaaaaacgcgaccagcagcaaatcgaagataaacattctgtctatcaaaaaattcaaaatcgccattaattgcaccctcccccgtaaaaatccgccaggctttttatgaacgcttttctcttgggacgactcatctgcaattcctcgcctcccgcgatcaccgtattttttccgatctccgtcacgtgccgcagactgacgagatagcaattgttgcagcgcgcgaagccgtaggattccaacaacttttccgtttccttcaagctgcccttgatctcgatatttcccttttcggtgtgatagaccacgttatgcaccatcacctcgacgtaaatgacgtcgttgacgcaaatccgccttttgacgccgccctcggaaagcatgaaatatttttccgagtattgctgcacgacgcgcacggcttttttcattttcatgttaaagtcgtaatactgcaagggctttaaaatgaaatcgaccgcgttcacttcgtaccccttgatcgcgtactgcgccatattggtgacaaagacgagaacgactttgttgtcgatctctctcagacgcctgctcgcctccatgccgtcgatgtcgggaagctctatatccataaacaccatttccgcatccgatttatattcggatagaaacgtcagggcgctgtcgtatactttgagggaaaaagtttcggaattttcttccccgtaccttttcagacaagccttgaatatcccggcatcctttgcgtcgtcttctacaagtattaccttaatcactcccgttttcccctctatgtttagttctgcggcgatacttattccgccatgattataacataacaaaaaacaatatgcaagtatttccgtcaaaacaaatttcctcttttgtctttttcttctctctttttttcaaaaaacagaaaggggttacccctgaaagagcgttttgcccattttcaaaaaaatttcacaaaattttcatttttatttaaaaatagattgacaattcctttcaataccgttaaaatataggagtaagtgttgagagaacttttattaaattcgtttatcctgtccaaaataaatttgcagaaaaaccgagtctttttcaaggctcggtttttctttccgcactttttatacgcccggcttgcggctttcgctgcgggaaggattgggcggacggtgcgcgaaaaaactatcctttttttctccgcgaaattcacgccggcggcaccccgtcgaaatttttttagcggcgaaatgcctgaaacgcgcgctcttttttaaagaggcttttatttttaaacgcatcctcgcagggcgttcatctcttccctgcccttccctttttagttttttgatcgcaatccccctgtcgcttccggcacttttactccccaaagacgctcttcccgccgcgcgccctctttcttttcttacctatctctgtccttcttttttcgtcccgccgaccgctgtcgggaaatattttatacgaaaaaaaagccctcctttgtccgaggaaggcttttttgtactcttaaaaattgtcaattaaagttccgcgaagtatttaatcgttctcaccatctggctggtataggagttttcgttgtcgtaccaggaaacgacctttacaagcgtggtgccgtcgcccataggcatacatttggtctgcgtagcgtcaaacagggagccgtaggtgatgccgatgacgtcggaagaaacgatctcttcttccgtatatccgaaggaagaggaagccgcagccttcatcgcggcgttgaccgtagccgcgtccacttcgccctcgcagattgcgacgagctgcgtcaaggaaccggtgggaacgggaacgcgctgagcgcagccgtccaaaatgccgttcagttcgggaatgacaaggccgatcgccttcgcggcgcccgtggaattggggacgatgttgacggcggcagcgcgcgcacggcgcagatctcccttgcggtgaggtccgtcgagaaccatctggtcgcccgtgtaagcatgaatggtggtcatatagcccttcttgatcttcgcgagcttgttgagggtgttcgccatgggagcgaggcagttggtggtgcaggaagccgcggaaatgatcgtatcgttggcggtaagggtcttttcgttgacgctgtaaacgacggtgggaaggtcgttgcccgcaggagcggaaatgacgactttcttggcgcccgccttgatgtgcgcttcggatttcgccttggaagtatagaagccggtgcattcgagcacgacgtccactttgagttctccccaagggcagttcgccgcgtctttttcggcataaattctaatggtcttgccgttgacggtgatcgtgcccgcttcgtcgtccgcggaaacggtgtcggcaagagcatatcttccctgagcggaatcgtacttcaaaaggtgcgccagcatcttggggctggtgaggtcgttgatagctacgatttcgtagccctcggctccgaacatctgtctgaaagcgaggcgtccgatacggccgaacccgttgatcgcaactcttacatttgccatgataaaaatcctccaatatatgatttattatgattttgaaacaacttaacacacttttctgtcggtaatattctaccatactttttgcgtttcgtcaatggttttaaggggctgtccgataaaataattccgctttggaacaaaactcgcgcagccgcatttccattattatatataccctgcaaacaacgttttcaaacacattcagggcaaaatacggctctccctcgccctctctgaacggtatccgatctttctccatttgagctttcgggccttgatataatccccttcgtagcttaaatcctcggcttccagattgccgtccgcccaaaacacccccgtggctgcgacgagcaacgtcccgtcgtctatctcgttcatgcaatactccccgaaaggcgccaaatgcagatcgagaagcccttcgaagcacaattccgccacgccgaaccaacaggaattatcgaaaatcgcgtttacgcgcgtcctgccccgatagtcttccttatatgtcagctttttcaacgccgcgtcatgaaaacccgcgaacagtgtcataaattcgtttgcgtcctcttgtgtgcggatctcatgccacgcggaaaaattctctttgggctttaccgtcgtttcttccaaagggacttttttattccgaagtattttccgcataaattcacggtcgccgactacttccggatagcccgtacagctgtccggcattttccgaacgccctgctcttccgcccattgtttaagttccgccaaagccgaggcttcgcaagccgtccatccgttcaaatccccgcccatgtattcgtataacaagcaaggcttatagtagtttttgtccatacggtcgaccaattcgaaacagccgctctggggattgaacacgattgtctgttccctatcgccctcgttcagtttcgcatatgccatcgatttatagaaaagtcccttctccgtatcgtatacgttcacccacatttttcttcccccgacaaatcaattttccgattcgtcaaatacctgccccgtccctttctttaaaaacgcgaatcgccgcaccgttgtaacggtag

SEQ ID NO: 520 - DNA, 5689 bp, Unknown
  16S sequences of unknown bacteria
tggtatccgaacatcgcggaagcgccgagcgcgcggacctttccagccttcacgagcttgtcgagcgcttccatcgtctcctcgatcggcgtgtcatagtcaaagcggtggattatataaagatcgagataatcagttccgaggcgtttcagcgagccgtcgatctctcgcgctatcgcgtcctttgacagccttccggggttaaaatagaccttcgacgcgatgacgaccttgtcccgggaaatattcttcttcagagccttgccgaggtattcctcgctcgttccggcggagtagcagttcgcggtgtcgaaaaagttgattccgaggtcgagcgcgcgcttcacaagcgcctcagtctcgttctcgccgagcgtccagtcgtgcatcgtgcccgccttgccgaagctcatgcagccgaccgccagtttcgatacttcaatatcggtttttccgagttttgcgtattccattgctcttttcctcttctgtataatcacgcctgagcggctttatcgatacacgatatcgcgttcagactgcgcgggtagcctatatacggcacgcactgcgagacgacgcgcttcagaaaatcgctgtcgtttccgagattcatgtttcccttcgcgtgcgcgacgagctgcggctcacagccgccctgcgccattatgaagcagaaagttatcatctcgcgctgtctgaggtcgagcccgccgcgggtgtagaaatcgccgaagcagttgtccgcgagccagcggttgatatgccccttcttccatgcctcgcgcatatgctcaccgaatatctccgcctgtgcgtcgatgcccttttcgagccggttttcagtgtttgtcgtcgactgtggagcgagcgggagggtcattccggtgctctcgaaatactcgttcatcactttgagaaacggcagcatccttccgtagccgagataatcggtcgactgatagacgcactccctcaccatcaccggcgtgacgccgttctttaccgcgtccggaagcacctcgcggaaagcgtcgaccccgccgcagccgatgagagaagcaagtatcgcgagatacctcacaggagcgtcaagtcccgctcccggctcattcacgacctcgtcatgcgcgaacctgtcaaatatccccacgaactcggggtctgtattccggatattcatttttcttcactcctgttttttccttcattatattaaagtggcgtacaggcacttgtttttacgatatgattataccacacgcactccggatcataaagtgggtaatcgttaattttgtgtgatgataacagcgtggcggagaaaattccggaaactattgcaatccggcggaaaatatggtatactatatagagtacatttttgaaaggaatctgtcatgtcaacattcacctacaagaacgagcattttctgctcgacggcgagccttttcaggtcatcagcggcgcgatgcactactggcgcattgtccccgaatactgggaggacaggcttaagaagctccgcgcctgcggcttcaacactgtcgagacctatgtcgcgtggaacctccacgagagaaaagagggcgtcttcgacttctcagggaatctcgatatcgtgaaatatatcgagatcgccgagagtctcggactcaaagtaatcgtccgtccgggaccgtacatctgctccgagttcgacttcggcggacttccgtcctggctgctcgcttatccgcagatgcacctcagatgcaacgacccgatgtacctcgaaaaggtcagaccgtattaccgcgagcttctgaccagaatccgcccgcatctctgcacgaacggcggcggaatcatcatggttcagatcgaaaacgagtacggctcctacggcgacgacaaggaatacctgagagcggtcgccggtatgtacctcgagtacggcatcgactgccagctcttcacctccgacggtccgtgctactggatgctgaacggcggaacactgcccgaatatccgtgtgtcgcgaacttcggaagccgtcccgccgaggcgttcaggctgctttcggatttccgccccagacagccttcgatgtgcggagagttctgggtcggctggttcgaccactggggagaagagcaccacacccgcaccgccgaggaaaccgtgcgcgatctcatcccgatgctcgatatgggggcgtcggtcaacttctatatgttccacggcggcacgaacttcggattcactaacggcgcgaaccacaccgggactgagtatcagccgacgatcacgagctatgactattgttctcctctctccgagtccggcgacatgacgaagaccttcttcgccgtccgcgacgtcatctccgcgagaaccggaaagacgccggagctcgatgtttctgacccgaaaaaggcggcttacggcagactcgacctgacggagcgcgctccgctgttcgacaacctcgacgcgatcggacgcgtcactcacaacgcggctccgctgtcaatggaggagatcgggcaggacttcggatatatcatgtattcgtcgactgtcaccggacctgccgaggagagacctctcgtgctcgagcacgttcacgaccgcgcgcttgtcttcatcgacggaaagctcgccggaatccgtgagcgcaccgggcgcatggacgagataaagttctccctcgcgaaaggcgagacgaagaaaatagacatattcgtcgaaaacagcggcagagtcaactatggtccgaagctcttcgacaagaagggcatcttcggcggcatacgtctcggtcagcagtaccacttcggatgggatatgacttcgatgacgatggacgatctgtccgggctttactacacgaccgacacggcttgtgatggaaaaccggcgttcctgcgcggaaatctgagcatcgcggacacgcccgccgacacattcatccgccttgactggttccatcgcggattcgtcgtcgtgaacggcttcaacatcggccgttacaacaacgaccgcggaccgcagaagacgctctatgtccccgctccgcttctccgcaaaggtgagaacgagatcgtcgtgtttgagactgacggatatgacaagccggtcgtcgagttctttgacgagccggatctcgggtgaacaacataaatcgaggttttctgtaaaaacagagtttaacaaaaggcagtcgcgctccggcgcggcagcctttctgtttttttattgtcacgctgacaggctcagccgtcgcttatcacgctgacaccgtatctcctgaatacttcagctgcgtcacttgtgtcgagatcggttgtcaatggttcgggcagggtgtttttcattccgagcgcgttgtatctcgacgccgcgagattatgatatctcagcaccctgacgccggtcacgccgggcgtcctcgagagaagctccgctatcttcggcgtctctgtgtcattcatcccgacgacgagcggaaacctgatctcaatacgacatcccgcgccgctgaggtacttcagattatcaagtatctgtctgttgtccttccctgtgcatcttctgtgcacctccgggtcgaccgcttttatgtcatagaggaaagtatcagtaaaccgcgatatccgctccagaacgccgcgcccgacatatccgcaagtgtcaatatcgacgcttattccctcgccatgaagccgctccgccagagcgagcgcgaactccggctgcgtcagacactcgccgccggacagcgtcacgccgcccttcccttccgcgaaaaacggcacgtcgagcattatctcgtcgagaagtccgccgactgtgtacctctttccgtacccgactgccgcgccgacagggcatacatcggcgcacgcgaagcaggcacgacatttttcgtgatcaatgaccgcctttccgtcaagtgaaaccgcccccgaccggcagaccgccgcgcagctcccgcatccgatacatttgtcacggaacagcgccgtctgcggttgatacgatatgctctccgggttgtggcaccatacgcatttcagcggacagcccttgaagaaaacggtcgtccgcagtccgtctccgtcgtgtatctccatgcgctttatgccggaaatcagaccggtgatttctttttcaaccatattcacccttcttttttcgatctcgctatgaactcgtccttttccttgtcgctcaggctcgagaagagcacattccaaccgcacagtcttacctgcaaatccggataatcgcccggacgcttccttgccgcctcgagcgtcttcgtgtcgagaatattgtagtgaacagcgaaaccgccgagcccgaaaaatgtcctgagagtcgtcacaagagcgtctgtccccctctcgcccgccacagccgaggagtgaaggtcaaggtcggttatcgaaccgttcggcgtaagagatgtgtcaatcgacgccgcggatatcagatgagccgtggctccgttcctgtccgcgccgaatgacgcgcttgtgttctgcgatattgtctctccggagtgtcttccgtcagcagacgccgccgcggcacgcccgaagtcccatctccagtcaatcgaaaaggttccgaggcgatagactccgcccttagcgttcggacgaccatcgaccgcttttccgagtatcccgacaagacgcgccgccagctcatcggtctttttgtcagccatgccgtatttcgggaatctgttcttcacgcgaaggcggagcgtttcgaagcctttccagtcgtttctcagtatgtccgcgagctcgccggtcgtcagcgttccgtcttcaaaaacgagctttcgcacagccgcgagtgaatccacagccgttccgagccccagagcgtttatcgacgagttgttgtactttgccgaataatcgcagtagagatccgcgccgcgttcaaccgacgactcatataccgacgacatgaacggctccgaatgcaggtatctgtagtttcgctcatagttatccgtgatcttcacggcacagtcgacgaaatacagcagctgacgcgtgacctcatcgaagaactcctcaaaattcctgaaatgtccgtcgttctcaggtccgatctgctttccggtcagcatatcccgcccgccgttcagcgccgtctcgaccgccttcggtatgctcacgcgtgagctgcatgagcaggtgagctctcccctcgcgccgcactcatagcagccgacgacatggtagtcgcgcgcgtcggacggctccgcgccgagcttttcgagggattcgactatcttatcgtccgacatgaagacgattgagttctttccctcacggacgcagcggaacgcgagagcgagaaagtcgtccggcgtgtccttccggcatagaatatgaagtttcgtgtttatcgtcggaaccacgcggtacgcctcgaggatcacatatgacagctcattcaggagtgatccgccgtcagctccgctgccaccgagcgcgaacgggatatttgacggcgctttcaatgtgtcgatttcacggataaaatcatgtatgatcctgattgccgtgccgcgctcttcttttataaaataggtgttgagcaggctgtcaagccgtccgagagagcggagatatgttccggagaccttatgctggaagacatagtacgcgatgatg

SEQ ID NO: 521 - DNA, 2195 bp, Unknown
  16S sequences of unknown bacteria
ggataagtgagagttcccccgcgcccggcctcggcgctttattccgaccgcgcggttattcattgcatacctgccccgcccgttttatttttgctttcgttcgggatattcccgcggttgccagacgtatttcaccccgacttcatcgcggtatttcttccgttttgccgcttctatgctgttatcctcgaatacctcgaaaatttggtcgtagaaatgactttttactttcttcatttcttcacagctcggatgcaaatctttgtattgctcaaaatcgtttaacccgtattttgagcgctgcacctttttgtcgtaaaactctttgattgcgtccgtcgcaaaccgcgccgaataatcttttttcgttgataaataatacttccctttgtccgtcagtttctcgtccgtcattccgttcgatacccgcaacgtcgacgtatataccgaatactgattgaatatccgcacatagtggttgtttatcagactatatacttttttcagcagatacacaaataaagtattatccccgcgcaggtttcggatccgatagtaaaccttatcaaaaaaatttgtcgctatcagatacgccgcttcttctatcaggaagcccggcattacgattttcgcctctgacgtctttttaatcataatgatgtcgcaaaggtctttgtcgtccgcggccaaggaatccggcctttggtcgtctaacaacattctgaaataagtataattgtctatcgttgcgacatggccgtgcattttgacgtccagctcgaaaagatcgttgtgttggttacagtccggggaatcctttttccccgttctcgtgtgctggttcccgcgttctttcgcgtgttccatttctgccgctactccgatttcaaacccgtctttatacggatcgctttcgcctttcagtttccctaatctcatggcgttataatcgaggatatggcaatattcttttttcagctcttttgcgctccgactgaaaaagtcgtcgtcaaacaaaggaaaattcccgttatctattctttccgtgtccgtccggattgcatagttcgccacgatcaacggcgtaggtgccgcatagatccaataactttgcgcatagttctccaagctctcgaatacgtccaccatatacagattgttgttatattccaagccgtaacgctcgaaatcataaccgaaaataaaatcctttcgcatatggcggttatgttctttcaaatatgcttttttctgttctttactccactctttcggaaaaacatatttttcggtgttttccccgtatatgtagccgtatctttcgcggagattctttaacagtttgtttattctcactccgcctatataatccgaattttcctcaaagccgttaaacagctctttcagttctcgaataaattttctcacccttgccagcgtcggcaaagtcccctttgcgattccgtattctattaccttttcaagatatatccaagggaaaaacggaaattgtaaatcccgttcccgcagcttctctctcgccttctctcggaatatggcggcctgtgaaagtgccatgctcgtgattgtggtcgtctttttcgcacgctgtttccccaccacgaacagcgcgcccgggtgcgattccagaaagtcccggtcccgcgcttcgtaaccacgcagccgctgcgttcctatgttcttgcggatcgcgtcgaagatcagaaatccgactaccacccacacaaaccacggcaaaaaattgattgccaccgtcagatccatcgccagctttgcgatttgcgtaaagattcccaacacatcgaaactcaccgcgaaatagaacacgaacgcaacaaactccatgacgattgtcaccgcgttcaggttgtacgaccagattaaccccgctgccagaatatagcctcgacgttcgttcaggaaatctgcatagcttttgaaaaatactttgcactttccccatgtggtcgcttcgattttcttatacagccgtagcggctttgtgtccacgttgtaattgttattcggctgtctgtatgcgtttttgattaaaagccacaacagaataagcagcggaagaatcaggatcgccgctttggcgaacgtcgaaagccccttcaacagtcccagaaaaaacgcctctgcgttttctttggaaatcagggctttcccgt

SEQ ID NO: 522 - DNA, 17567 bp, Unknown
  16S sequences of unknown bacteria
acccgggtggcgccgggatcgtaatccaccggcacgatgttcgcaccgggatagcggtctttgatcttatggatcatacccttgccgcacacatgggtaggcaggcacccaaaaggctgggtgcagatgatgttctcataaccatgcacaatcagctccaccatttccgcgggcaagaaccagccctcgcccatgcggtttcccagaccgatcaaccccttcatcggctccttggtatcctgataggcagaaagctgcataaagtcggaaaacttttccactgactccataaacacctgttctattttttccagataattaagcagctttgtcgccaccaaatattttacccggctgccgccgtaaatcaaaaagtcctggatgcgggcgtccactttgaacatcaggaagcccaaaagccccggaaccatcacttcgcacccctgctcggccaggaacttctccagcccgttgttggcaaaggatgcgtatttcacatagatttcgcccaccacgcccacgcgcacctttttctccttgcggcgcgggatggcagcaaagctgcggatgatgtttttgaaattctcccgcatctcccgcagcgtgtatccccgggaagcgcggaactgtttggaaatattgtccacccacagccccaccagctggtcagttttgcccgcctcaatttcataaggccgggtctgattgctcaaaagcataatcatatcgccgtagatcacaccggccagcatccggcggatgatgggcagcgtcagggaaaagccgggattcgtctccgtcagagagaggttgaaagaaatcacaggcacataatcaaagcctgaacgcgccagagccttgcggatgatgtggatatagttggaggcccgacagccgccgccagtctgcataatgatcagcgccactttgtggggatcgtattccccactggtcagcgcatcaaggaactggcccgtgaccagcagcgcggggtagcaaatatcgttgtgggtgtatttcagacccagctgcttgacccgctcgccggaattgtccagcagcgccaccttgtagccctcgttcaggaagatattgcgcatgatgttgaagtggatgggcagcatatccggcaccaggacggtgtactccttcttcatctctttggtgaagagcaatctgccgttcttgtcgtatttcaattctgccataacttgtttatctctccttctgctccaatgccgccaaaagactccgcaggcgcaccttcacggtgccaaggttcgtgatttcgtcaattttgatctgcgtataaattttcccggcgcgctccacaatggcgcggcattcgtcggacgtaatggcgtccagcccgcagccgaaagaaatcagctgcaccagctccatgtccttctgggtaccgatgtatttggccgcggcatagagccgcgcatgatacgtccactggttgagcacatgaacggggaatttcttttcccgatcgctcaggcaatcctccgaaatcaccgccaggcccaagcttgtcagcaacaggtcaataccgtggttgatttcgggatcggcgtgatagggacggcccgccaggcagaggattcgcctcccctcagcgcgagccctgtcaatgatctctgcgcccttctgccgcacagcagccagataggcatcccgggcagcataggcctgatccgccgcgcgccgaacgtccttgagccggatgccgccgaaatacttctgcagcgtttcggtcatcttttccggaaagtcgtgacgcacatggggaccgacatagtcgttgataagcaccgtgccgccgcgcatggtcatgttggccgcaatcgtttccgggtaataagccactacgggacagttgtagtggttgtcgcccaaatgctcgtcaaagttgaagctcatgcaggggtagtagatggcgtccacccccatatccagcaactcctccacatgaccatggagcagcttggccgggaaacacaccgtgtcgctggggatgctggcctgccctttgaggaaggtcgtccggctggactggggcgacacgatcgtctcaaagcccagctcggtgaaaaaggcatgccagaagggcgccatctcccacatgttcagccccagagggatgccgatgcgcttttcccgcatccccggcaccggggcaaggcgcttcatgtattcctgcttaaagcggtaaatattcagctcatcgctgaccgcttttttggtcaccggccgttcgcagcggttcccgccaatatattttgtcccgtcggcaaaagtattcaccgtcaaacggcaatggttctcacacaggccgcaggtaacggagcgcacctggtgggtaaagccctccagcgcctcccggcccaaaagcgtactcctctgccccggcgcagccatggactgggcgtgcagcgcacagccgtacgcccccatcagcccggcaatggccggccgcaccacgtgggtgccaagttctcgctcaaaggcccgcagaaccgcatcgttcaaaaaggtgccgccctgcaccacaatgtgctgccccagatcctccaggcttgatggccggattaccttgtaaatggcatttttcacaatactgacagacaagcccgcagagatgtcgccggtggtagcaccatccttctgcgcctgcttgaccgaagaattcataaataccgtgcagcgggagccgagatccaccgcaccggcagcatagagacccagcttggaaaacgtttccacatcatagtgcagcgcgttggcgaaagtctgcaaaaaagagccgcagcccgaagaacatgcctcattcagataaatattatccaccacgccgccttgtacatggaagcacttcatatcctgcccgccgatgtccacaataaactccacttccggcataaagcgccgggcggccgtaaaatgggccatcgtttccaccagcccgtaatccacatggaatgcatttttgatgatatcttcaccgtaccccgtcacacaggcggcggcaatgtgaaggtcgggctttctccgatacaggtccagcagaaagtcccggatcaccggcacgggattgccggaattggagagatatgcagagtgcagcagcgcgccgctctcatcggtcaccacagccttgagggtagtggatccggcgtcaatgcccagatacgctggccctgccagcgtttccagcgtgccccggggcacgtccgccgcagcgtgacgcgcacggaatgcctcatattccgcctctgtttcaaacagcggcggcagcgtttcccactcgctgtgggaaacatattgtttcagcgtttcgataaccgccggcagatcgcagcgttctttggctgcataggccgcccctagagaaacataataaagcgaattctccgggcacgttccggtaacacccagcacctcgtcaaagcaccggcgcagcataggcataaacgtaagcgggccgccaaggtaaagaatattcccctccaccggccgcccctgagccaggccgccgatggtctgattcactaccgcatagaaaatactggcggcaatatcgctctttttcgccccttggttcagcaggggctgaatgtcgcttttggcaaatacgccgcaacgggaagcgatcgtgtacacccgctcatgctgcccggccagggcgtccatatcagcggcatccacatcgagaagggtggccatctggtcgataaaagcgccggtacccccggcacaggtgccgttcatgcgggcctccatgccgccgttgctcacaaaaaggatcttcgcatcctctccgcccagctcgatgatgcagtctgttcctggcgcattgcgctctgcggcaagtttggccgcatacacttcctgcacaaaaggcacttttgcaaattcggccatgcccatgccggcgctgccggcaatggccagccgccactcccgctcggcgggaaagcgctccgccacagcgcgcagcatttccactgttttggccgtgatttgtgaaaaatggcgctcataggtttgatatacaatttggtccgcgtcggacagtaccacgcatttgatcgtggtggagccgacgtccaagccgatcaccaaggtcaggttcccctttctttctgcgacgatttgcttctcttccgcctgcgtttgaaagtctgcattacaagattctctttattctaacattccgccgccataatatcaactgacattctgcatcagcatgtgcggatttttcataggcattcctccgcaaaacgacggatgccctttctgccttgttttataggataccatattgacgcagccttttctatggcaaatgcacggcttttcttgcactgatcctgagaatgttgtataatgccttacagaataaagcggtgcggcgcgctgcgccggctggacgcaaaatcagaaaggcgggttcttccgccaggggagaaacactatggaatctgtgaaaaatatccgaaacgacgaactggtgaaggcctacgaggctctgcacacagacaacagcaaggagcgccaggctgctgttacgcggcagatggtgcacgctgtatttctgttgcctgtgacgccggtgaaaggcaagctccccgaggatttcccgcccaaggtactgaaaaacgagcagggtcagatgtttcttcccttgtttaccgacgccgggcgcgtgggaaaagccatcgcagggctgggcgacgtcctgctccccatcgacatctccgacgcctacgcctatcttgtggacaaacccgagctgcggggcctgatcgtaaatccgttttccaagcccaacctggtctgcgtgcgccccatggtggaaaatctggccaaactgtggagccgtatcaaaaccgccgagctgaacaacgaaactcccgaagccgccccgcgtccccagagcacgggccagcaggtaaagctcctggtgcccaaagaatacccggacggcgtaaccttcactctgagcgcagggctcaaagcgcaggaagacattgaaaaggcctggatgtgtatggtgcagaaagccccggacgataagcctgaggagcgggattggatggtgatcctgcaggccggaaagcctttgaagggccgggaggagatcttccgcgccatcggccagtccctttccccgtttctgcccaagcgcaacgtaatttttattgaaaacaacgccggcatgaacgggctgaccgagcaggctatgcccatctatgtccgcgagagcaaaaccgtgtaaggcggatcaactgcaaataggccccggcagcgcatagcgccgccggggcctgtttgtttcatatgggttttgtttgccgggcgcaaagcgccgctttactcgccagccacaccggaaatgatccacggcacgggtttcgtttcaaacatgccgttggcgcgcagtttggataccgagatctgcagcgcctccatgtttccgatccggtatttttcaaacagggccgggatctgagccaggatattcaactccagcgtgtaaatgatgatccgcatcttaggattgcgggccaaaagcgcgcgcaactccccttccagcttttccgtggccacgataaaagccgtggtgggcacgggcagcatttcaagggtctccgggttcgtatccggcacaatcagcacattgttcaacccgaatttgctgacgttttcttccatggagtcgcggtcgctctcatcatattccacagcaatcactgcgccctcgctggcactcatggcggcctccacggcaatgctttcgccgctgatgatgcagatggtatcgtgagagcgcacctccagcatactcataatgaccgcacggatctcatgggcaacataccgaaccgatcctttggaaaaacgcttgttctgcagtccgattttgtaggcgctgtcagcctgctcgtttacgatcagcagcaccgtgggtccggcaatgccacggtcgatacagctgctgactttgcagctcgacacttcgccctcggggtcaagcccttccttgagccacacgtcgcacgcgccgagccccgcgttccacatatcgtaaaacaacgtggggcgcgtttcgccggcaaaggccagcacaacacggttggcttccaccgcagggatcagattcttgtttttgacgctgacatcgatcagcttgagcgcctccacgtccagcgctgtcttttcggaaaaatagcgcatccacgccatcttccgttcattatcgaataaggataccttgtcgcccatcggaaaatccctccattgcagcttgataagagtatcatagcacacaacggagggattggaaatatttatttttcactttccgcgcgcttttctgccgccacagcccggctgtgctttcttcggccggcaatccaaagactccagagcgcgccgttgagcaccgcgcacaacagcacatacggcgcctgcagcggcagggcgcccgctgcgagcagccccacgctgctcagcagcgctgccagcggcaggatgccgctccacagcaggttcctgcattgacgggccaaggcgtcttccagtgccagaagcactgtggcagccacaaaagcaatcaatatctgtttcatcggcagcctccttctagccctttccaatagtttctgccacggaacaaaccatgtttcgtatgggcggcccatggccgtttcccagtcttccccttattcgagattcagccggcggcgcatcaaaaattccgtcacaacgaagaagatcgcacccagcactacattggccgcagtgacacccagcagcatcgtgctggtaagccctgcaacacccatgctgtccagcatactgcctactgcaaaccagatcccttccggcacgaacaggcccatcagaatcagggcatacatcaggatgctcagcgcaaactgaatgacaaaatacgccactacagccatggcaatgcggtgcttatccgcctggtgtcccagcataatggccgcatagatctgcaggatgctgaccgccagcgagaccagcatcatcaggatgaactcaccgcacaaaagccacagcggtatctggtattctgcagcaaacgcccgctgcagctcggccatctcctgcacaaacccgggaagcagagtgtggtcggcgcagagcaccagaacggagacgcacaccacaaaaaagctcagaaccgtccataccaccgcagcaatcaatttgctggcgatatgctgccagggacgcaccggtagcgtatgcatcagatagccctcaccggagagcaggttcttataaaaccgctgcagaatcagtaaaaatgtaatcacgcacaccgccacgatcatgaccgcatacgccacgccggacagccccgtcagaaactcggtgaacagaaccacgcttctgggcagcgtatcgctgaagccgatcgaatcggaaagcaggcccaaaatgcgcagcaacagtgcagcggcaaccacgcccgcataacacaggccaaaggtgcggcccgtggacttgaattcatatttcagcagtttactcagcatctgaatacctcccggaacaaatcatccacactctttccatcctcggcacgaatttcatccacgcttttgtgcagcatgatccggccgtcgcgcaaaaacacagcttcgtcgagcacctgttcaatgtctgcaatcaggtgggtggaaaggatcaccgtcgcattttcactgtaatttccgataatcgtgttcaaaatgtaatcccgtgccgcagggtccacaccgccgatgggttcgtccagcagatacagttccgcccgacggctcatggccaggatcagctgcaccttttccttagtgcctttggacagggtcttgagccgctccgtaccggaaattttcagggtctgcagcatttcagcggccttggcggcatcaaaatctgcataaaagtccgcaaacattttcaccagatcctgtacctgcatccagtcgggcaggtaactggcatccggcaggtaggacacccgctttttgctctccggccccggcgcaaaaccattcaccaggattttgccctgattgggcaccagcagcccgttgatcagcttcatcagcgtagtcttgccgctgccgtttgggccaagcagacccacgatgcggccgccagacacctgcaggttcaatccctgcagcacccgttttccgccgaagctcttgtatacgttttcgcatagcaacaattcagccattgtattcttctcctttgctccacaatttgatccacagcgccagatcggccaggccgtccgccacgctgcacagggcctgcacaaacgcccgcaccgaaccgccggtcatcgctttcgcactcactgcgcctgcgccccgctttcctgcagcagcaccggcagctcgctgcggtggtagcccagcaccgccatgctctgcacaaaagcttccacccgatcccgggccagctgacggcggacggcggcgatcagctccttgtcctcggtcacaaagcggccggcggtgcgttcggcacgcaacaggccgctctgctccagttcagccaacgcacgctgcatggtgttggggtttactgcggcttccgccgccagatcccgcacggaatcaatcttcgcaccaggtggataggccccggacacaatgcggctctgcagcgtttccaccagctgcagataaatcggcctgtttttgtctaatatccatcccataatgtcgcctcctgtttcattgcgcagcctccggtatatatgttttcaaaaaatccgcacgctgcgccggtatctcatagctcccagtcaccagatcttcgagccagttctcgcccagcagctcttccagccccgtgctctcctgcacgttccggatttcgccgctcgccgtcacggacagcgtgaggacattggaatcctgatagagcgtatagcgcagcatttcagtatagcctgcgcgcgctgtctgcccggccagaaccgtatcctgctgatacaccacatacacacattccggcgtcagattggccacagcctccgtcccgacggaatacgccccgtcgccgaggtaggtatcctcgttcagaaaatcctccacaaacgcccgggcggcggcattgtcctcgatcacaaaaaggctctcgccgccagccgtttgcttttccacctgcaccgctttttccgtctcctgcgccgaaggcgcttccttcggagcgctgcagccggccaaaacgcccagcagcagcgcagcgcttactccggtcacaacgattttcccggttcttgtcacaacagtctcatcccctctctccgcttttcacatccagggcattgcatagccaaaagccagcaagcccacgctcaacaccagcgccagggcgagaagcgcacccagcacggcggttaattcctctttctgccgcatttcaatcacgttcgctttcttcaaattgtacttttgtactaagcaattaatacaataatacatcaatagcattttgtcaacccttttttgcaaactctttttcccgctgcggctgaaagcaccccaaaaaagtatgcgcacccccgctgcagcgggggtgcgcatactggaatccttctccggcacttaaatggagatcgactgctcggcgttgtacagcgcctcgtccagcgtctttttcatttccaatgcttcctctatttcaatatccacgatttgaccgtgctgcacagcgacgatgcgcttttctttgccttccatcagagcatgcaccgcatagctgcccatttgagttgctataatacggtcccgggctgtgggggatccgccccgctgaatatggccaaggatcgttacgcgggtatccataccagtctcctcctgcacgcggtcggccacttcctgggtggtcatggaatagccttccgagacaatgatgatatggtgatgccggccgttgatgcggctgcggcggatcttttcaatcacatcgtgctcaaaattcccttcgtgctccggcaccagcaccgccgctgcacccacggcacagcccacattcagcgccaggtgccccgcccggcgtcccatgacttccaccacggaaatgcgctcgtgggactgcatggtgtcgcgcagtttgtcaatgcactgaatcgcagtattgctggcactgtcaaacccgatggtgtattccgtgcagccgatatcattgtcgatggtgcccggaatgccgatgcagggcacacccagacgcgccagggacaacgcgccgcgataggtcccatcgccgccgcagcataccagcccatcaatgccaagataccggcagttgtcagcagcgcgctgctgaccctcagtggtcatcatttccgcacagcgggctgtatacaaaacggttccgccccgctggagcagtccatccacactgcgggcggtcagcttgcggaaatcgttgttgatcagtccgctgtagcctcggttgatacccagcacttcaatcccattggcacaggccatgcgcactacagcccgcaccacggcgttcatacccggcgcatcgcctccagaggtcagcaccgcgatcctgtgaatatccttttcagccattgcaaaaactcctctctcaacgctctgatgaaaacttttgtcctgctttatgcattcagtgtaccccaaacttccgcttcaatcaaccgaaaaagcaccgttcttcttttcggggcgctccgtttcattcttcaatgggcgcacgacgcagagcgacaggatcttttgcccccgtatgggcatcagggaagcaactgccggagatcaggctccacccggtattcttcgtcaattaaatcaaaggggcaaccgtatttccggcacagttccagcgtgcgcgcattgtcctccaatacagagtccaggatgcaccatgcgtcgttcacacggcgctcaatgacgctggcatgctttttaatttctgcaaaatggcgctcaatatagcgccggctcatcacaaggcagcaataacgtatttcattctcggcggcatctgcaaaatcctccttccaccgaaatggaatataactgccctccacaatcagattttgccggttttccatggctgtccgtatcatctcccgcgcaattggccataaatacgcttccagcgcctcatcgtcctccggcgtcagggcattcgccttagtctcgtgggctcggagatgtgtataagagacagcaaaaaaatcatcgtttcttctccaaacatcgtgttttatcttaatcatagcatacgcatccatgggccgcaagacattcccccacatggggagcattttgcagaatccatcggcagaaatccaaatgtttcttgactttacgccgcccccagcgcaaactatagcaagagaaaacagatacagaaggaggacctttccttggaatttgaacagctcgaacgcttcaccgcttttctaaaagaaaatctgagtacacccgattttgacgaggacgcctatctcgaacgtctcatcatccactggggcgaaaccggcgccctccgctttacgctgtcggctgaggaaaccgtttccggagcgccggcccatatcgcttacacggtggacaaccgctactttatccgcgaagacggcaaagaaatccccgtggaagatctggaccagggttatgatctgtaccgcccggttctgcgcttcctcggcccagcggaaacgcccgaagaagaatcgtctatagtcggccgcgccctcaatcccatcgcactgattcgccacaagtcgggcaaaaccctcaaatcggtttccgccctctccggcatcgatccggaacgtattctttcctacgaaaaaccggactacgacatcggctccctccccttgtctaccgctgcagcgctggccaaagcgctgaacgtccatgccgaagatcttctctcctgcgcgccgaccatgcccagaggccgctgaagccaaaaaattcataaatttgtaatacttttttgaagattttgtcacgattggatagtatgctgaacgtgtcagcaggaatgctctttttcatcttttttcattctctataccccgcggcggcgccggagttcttctcctgcgccgccgcggggcttttcttatctgcgcaccagcaaaacgccggtagcaacccgattcacaaacgccgtgtcatgctccacaaacaaaagcgacggcgcagcttccagcagcagctcctcgatctgcatgcgggaaaagacgtcaatatagttcagcggttcatcccaaagatagagatgcgcctgttggcataaactggcagccagaagcacttttcgccgttccccggtgctgaagcatgatgcatctctttccagctgcgcccgggaaaatcccatcttgcgcaaaatcgccttgaagcggtgctcctccactccctgcgcacgggcatagtccgccaacgtacccacaggcacatccgtctcctggcccacataggacacccgcactcccgaagagagcacgactgtaccgctgtggggcacggcctgccccatcagcaggcgcagcaggctcgattttccacagccgtttactccctgcaaggcaatccgctcaccctgtttcagcacaaacgaaaccggctcgcaaatggttctgcccccgtaggatacggacacctcccgcagctctgccagacacgggctgtggtattcggcactccaaagcgaaagtccttctgtccgctccacattgctcagcagcccctccttttccgccagtgccgcgtcccggcggcgctggatggatttggcccgctgcatcattttagccgagcgatgccccacaaaaccgcggtctaccgccgccccgtcgcgcccgttggcgccgaacttgcccttttcggtgcgcccgctccatgcggcagcccgctgcgctgcagcacgcagccgggcggcatcttttttcagatgctcattgcgctccagctgcgcctgatcctgttgtaacttctcctgccaccaagcggaaaaattccctctctgaatcgtaatttgtgcccggtccagggccagcacatgatcaatgcagccgtccaaaaaggcccggtcatgggacaccatcagaaagccccgctttctgcgcagatagtccgccagtttttgccgtcccgcagcgtcgagatgattggtcggctcatcgatgagcaaaaaggcattgtcccgcagaaacaatgccgccaaaagtgctttcgtacgctctccaaaagagagactttcaaaggtctgccacaacagctcttcgggcagatccaacagggaacattcccgcgcgatctgccaatcctccgctcccggcgcagcagcgcgaatcacccccacggtaaaagcttccgcatcctccaccgcatagggaaaatattcaaattccacatccgcatgaatctggccgccgcagggcagcgcaccctgcagcaggcgcagcaatgtggtctttccgcggccgttacggcccacgaggcccagccgccaattcgtatccaactgaaaagatacgttttcgaacactgtttcggcgctgccctcgtaggaaaaagacaaattccgcacgtcgatcagtgacatagtgcatcctcctttcaacatccaaacacatgaaaacaccgcgggaagatatcttcccgcggcgtctgctccttttgaatgagcgctgcagaggtgctttcagcgcaacgcggcgcacccacaagccacaaaagggccgtggatatgccaaggaggcaatacagggcgaaaagcacaatcgatcttcccggcggcggcaaagaaaactgcagcgctccagatagctgggccgctcgtgttctcttctccgtccatcatccgtaagatcatttgcgcatgcttccatccctttcattctttgatgcagggattactataccacaccccgccgctgaatgcaagccttcgcccgcgccttacaaaagtttgctgtcctataatcccgacaaaacaaccggtgggaagggaaccttgatcccatgtgcagcgacatgacattccgctgcacatggcgaaacgacgtttccctaatcctggaattcatcatcttccctcaccgcttctgaacagccgccgggggaagcgctctccgatgaggagacgctgggaacccggagcttcggccagcacaaagccaaaacactgccggcactggtggacggccagaaaatcggatttgccctgtttttcacaatttttccaccgtctccggccgggcgggtctggatcttgagcccctgttcgtgctgcctgaataccgcggcagggactccgataccgcgccgttcaaaaaagccggcggccatcgctgtggaacgcaaacgggatagcctgaaatggcagtgtcttgactggaagcaacccggcatcgcttttgagcgcacacagcattcggacagatcattctccaaacgtgctccaaacacatagcgagggtgaaagcagcgttgctttcaccctcgtcttttgtctttcggcacttatatttcgctctggttttccacttccgcccgcagccgctccgtcagttccgcaagatactcgcccagcggcgcttcccgcacgcccaacacgcgcacaccgcaggccgaagtaggcaccagcagctttttggcccggctttcggccacagccgccgccatttccgccgaaatctcgcccagcataccaccggccaggcaaatgccctgagcacctacgatcacatcattccgctccgcccaagtacaattgtagaccacggcatgttctccggtggctccggcggaagcccccgccttcatcatggcagcagtggcgatggagttggaaccgagagccagaatggttaattccggcaaaacacggcgcagctgtgtcactactgcttttccaatgccgccgccctggccgtccacgacaatcacacgcatcgctcagccctcctcaaaaagcctggtggagaggtagcgctcgccggtatctgtcagcaccgccacaacggtttttccctcgttttccggccgccgggccagcgccgcagccgcccatagcgccgcgccggaagaaatgcccgccagcaagccctcacaccgggccaatgccttggccgtggaaaaggccgcctcgtccggcactgggagcacttcgtcataaatgctgcgatccagtgtgtcgggaataaaatttgccccaataccctgcagcgcatggggaccggcacggccctccgtcagcagcggggatgcagctggctccacgcccaccacgcgtacgtccgcgttttgctccttcaaataccgccccgcaccggaaagcgttcccccggttccaatgccagccaccagaatatccactgttccgttactatcccgccagatctccggaccggtggtgcggtaatgcgcttccgggtttgccgggttcacaaactggcccagcaccagcgcgcccgggatctcctgtgccaaggcagcagctttgtccaccgccccctgcattccctctctgcctggcgtcagcacgatttgcgcgccgtataccgccagcagcttgcgccgctccacgctcatcgtctccggcatgataaaaatcgccttatacccccgtgccgccgccacggcggccagcccgatgccggtgttgccagatgttggttcaatgatcgtggcgccgggctgcaggcgcccagtctgctcagcgtcctcaatcatacgcagggcaatgcggtctttggcgctgcccgccggattgaaggattccaactttgccaaaatgcgcgcgccaagctgctcctgttcccggtagcgacacaactccaccaacggcgttgcgccgatcagctccgtcatactgcggaagatcatccttcatcctcctgttccagattttttttcacatggcgcttgtgcaccagcaccaccactgtcacgataagcaatgccgccgcggtaaatcccgcaaccagggcgacagcaccggccagattctgcgtttttttccacagcagccccgccgccacaatgccaatcccgtttccgccgcacaaaatggcaacgatcgccatcacataggcaatacgggccttaggcaattccacgtctgcctgttcctgctccatcgtctccagcagttctttctctttttcgtccatatgcttctccttttctgtttgctttgcccaagttctcacgcttcccggcctccatgttcccgcgcccattccgcagcgcccaggcacaggctgcccaagatgccctgatccccgttcagagattcgggcacaatataagtatccagatcgttcagttcctccgccgccagataaccgcccatcatgcggcgcacttcgctgcggatcagcggaaaaagctgccgctgccgcatcacgccgccgcccagaatgatcttttccggcgcgagaatgcagatgtaatccaccagcgcctgagcaatgtaataagcttccatctcccagacctcccggcgctgcgccagcgcttccgcgcgcgccccccaccgctcttcgatggccggcccgcaggctaacccttccagacagttgggatgataaggacagcggcatgtccaatgctcctcaggatggagggaaagcagaacatgccccgcttccgggtgcacaattccatgatgcagcgccccattcagatacactcccagtccgatgccggtccccacggtcagataaagcaccgtggagaggcctctcccctgcccgaaacgcacctcgcccagcacggaggcattcacatcggtatcaaaccccacgctgacacccagcgcccagcgaaacgtccccaccatatcgcaccaggcccagccgggcttgggcgtggtcgtgatacatccataagttttcgagctgcggcgcagatccaccggcccaaagcagccgatgcccagcgcctcaatctccttatcctgaaaccactccaccagtgcgttcagggtttcctcaggcatggtggtagggattcgtgtacgttcaaaaatcattcccgtttcatcgcccacagcgcacaccattttggtgccgccggcctccagcgctccgatccgcataccgattccttcctttcatatcccatctgcaggcataaaggtcatctggcggaagtccgatgcctcgtgctcccaaacaacagccagcgctcccgtttccacaacgatttctcccgcttctgccgtgaacgcattacttgtgcccagaggatagtccggcaacagggaaatgcattctgcattgtatttcatcccgcggatagaaacgccctccgccgcgccgccgcaggcaaatagcgaaagcatcccggcacatcccggtgcaaaggacagccgtccccgggcaaacactgtgatgatgctcccgccgtccaccagcgcgccccaggcgccctgatccgccaaaaagcggagcacctgcaaattcgccagggtgtgcgacagccggccgcccaggccgccgtacagat

SEQ ID NO: 523 - DNA, 25174 bp, Unknown
  16S sequences of unknown bacteria
tttatgaaataaagctgctgaaattatacaaaacttgtaatataataaagaagcggtttataaccacacaaaaaagtacacatttttacgaaatcccgatcctttgaaaaaaatttctctttttacaattttttgtcgttttattttgactttccctatgtgatttgttattttgttgctataatttcagaaaatgctgacgtacctgtagaaacaggataaaataatgagaacagaccagttgctgtcaagtcgtgcacggattgatatgaagacagtagaaagttcctgttttatgatgaaaaaagaattcgtattttatttttgtatgaaacgggctgtataggaaaagtgggaggagagaatgttgctgaagtttgagccggtttgcagaaaaaatagaaaagacattgaagcgcttcaaatgttcccttcgcagtcgggatatatcgaaagcgtggtggaatgtcttgaagaagcggattggattagggagtggaggcctgtgggaatttacgatgaagaggtactggtcggatttgccatgtacggtttttttaaatcgccaacgaaaagagtctggctggatcgtcttatcatcgataaaaaatatcagggaaagggatatggaacagcgtcagttctcgctttgctggaaaaactccgccgagaatataatgaaagcgatgccatatatttaagcgtttatgaggacaatacagaagcgatagatctctatcagcggatcggattttcttttaatggtgaatgcgatgcaaagggtgaaaagattatggtctatgttttttaatatgagtttataaaatgaggaaaaaacaaaaaacgatgtatcggttaagaagaatgtttgaaaattttcttatttgaagacagaaaagaatatttaatttgaaaagaggcgtgaaagaaaaagcgctgaaatatactgtaagatttactgcttttagaggattaccgacgccaacattcaggcaagagtaaattgggagcctttctgtgaagattctctggtattgtcagaaaaaaggtgtccacttttttaggtgaaatcgggataaaacaggtcaattaaatagatgaaaaaatgccgttagccatttaaatttcaatggttaacggcattttctttcgtggtgctcgcgaagggactcgaacccccgacgcacggtttaggaaaccgacgctctatccactgagctacgcaagcaaattctgcgaccaatcaggcgtacaggagaatttcttctccgatacagtatcataacacaatcgccggcgggggacaaccttgaaactgcaaaaatccccatcttccgctgccggctgcgggagatggggcggattgcatttttctggagagaaagcgccgatgtcacggatgtcagacatcttgctgccccgtctgcgggatttcgctctccggaagctggataccgtcgatgacatcttctccgaaaaacagcagatcgcgggactgtacaaaatctactacgacagaagactgcagcgttttggtcagaggttcaaatgtgacacaggctgctgtaaggatgagcacggtcattaacagataaatgagaacgccgcctttgacgataccaaagagcatacccagtatactgtccgccgtacccacgaccttcgctctgtggaactttttgatcagattttcgataaagtgaaccacgaatttcaccgcgatgatcagaagaaaaaacgcggcgacgctgataatcgtctcagccagcctgtccgccaccggccttgccagctgctccagatgagcatttgcggaattggcgatagcgctggaaaggctggaaggcagatcggaggccgcggcgccggaggaagcggccgtttcgggaagcagcgttttgacgtgcttcatggcgaaatcgctcattagctgtttcgcgtgggtattttccgtgatgtattccgccagaaccggtgaatacagaaatgtgaaaaacagagaaaaaagccagccgaaggcgctggcaaaagattcgatgacgccttttttctctcctctgataatacagataattaaaataaatgctgctgcgaaatcaagatacatagattactcctgcccctttttgttcccgataaattcgatataacctattatatacttttctatcctgcgaagtatacgattaattatacaccctgcgcttgaaagactatagtaaagattgtaaaattattgtaagcaaacaaataatttgtgagagttactttaggaatctcaaaggacgatatataatataatgccgggattcatcgccccttttaaggcgggtattttatttccggactttgatgagaggccgcagattccgcagaaacggacagaacgaagctgtctgccgcgagactgaaattgtcggcataccctggtcaaacgaatttctcagagttttgctctgatttgagtaatattgtcaaaggatctgatatttatgaaaaggaggatttatgaaaacgcttacaatctgtgtgggaagcgcctgtcatatgaagggctcgcaccgcgtcatcgacaaatttgacgaattgatcgcaaaatacggtctggaggacgaggtggagctgaaagcgtcattttgtatggatcagtgcaccggaaatatcggagcgagagtagacgaacgtcagatttatgatctgaccagagagaacgcggaagaagtttttctccgtgagattctgggtaattaataagtcaggagtgcgggacggtttgcgcccgccggccgatatcgtttatcaaataaaaattaagggagaagcaggtacgcccggaaggtgttgagaatatgagcaatacggaaaaacaaaaaaataatctgattatgcgtcttaagggcgcgaattgcaagaactgctacaaatgcgtaagggcctgtccggtaaaggcgatttctattttggctgaaaaggcgacgatcgatgaaaaacgctgtatctactgcggaaagtgctatctcgtctgtccgcaggacgcccgggatctcttcagtgagatggaccgggtgaagctgatgatttcagcgggggaaaaagtgtacttttctatttcttctactttcagcgaatattttatgaattccaatttccgtcagctcggcgcggcgctgaaaaaaatgggggcggccagagttgaggagaccgctatcggcacgatgcgggtgatgcaggaatacgagcgtctggcggatgaagacaaaatgacaaatatctttaccagcgcctgtccgtcgtccaattttctgattcagaaatattatccggagctgatcaaatatctggctcccgtggatactcctatcgaagcgcatgcgaaaatgatgcggaaggcttacggcagcgatatccgcgtggtaaccgtaggaccgtgtatcgcctgccacaagctggcctacatatcgtataacggcgatctgatcgacgcatatatcaatttcgaagaactggacagctggatgaaagaggaaggggtggcgatcactcaggaggaagatccggagacttatatggtatccaattaccgggcgagatatttcgacgagtccggcggcgtgttccgtgcgctgaaaaatgacatcaaatataattacatgctctggaatatcgacggttcgacccgtattatgaatacgtttaaagacgtcaatgattccatcaaaggctatttcatggaactgaccggctgtcagaacagctgtctgggaggaccgatcatgcgaatgggaggccgtgatacttttacgggaaaggatcactggctgtatctgctgaaggacgggaaaggggaggaacatgttaatccttcggaatttgcagatgtggatatcagcaagcattatatccggatggatttctacgaaccgatgcctaccgaggaagagatcagagatctgctggcgctggtgggaaagacgcggcgcggtcatatgctggactgcagcggatgcggctatccgacctgcagagataaggccatcgccgtctaccgcggcatggcggatccgtttatgtgtattccttacgcccgggatagggcggaggcagagtcgaatcatctgtttgaattcatgccgaacggcattgtcctggcggataaagatctgaaaatcgcagatatcaatccgaaagcggcagagattctcggcggaagcaaagaggacttcaggggaacggatgtgagagatatcatgctgactcagtttatcgacaaggcgagaatgaaggagctggatgtgatcaacgatgtggttctctgcgataagctgaataaggttttggcggtgacatttttccgcattccacgtcacaacttgtacgtcctggtcatcaatgatatgacagaggaagctgcaagccaccgcaaagaacaccagcttcgtgaagacgccatcaatgtggcgcaggacgtcgtgcagaaacagatgagaatcgctcaggaaatcgccagcctgctgggagagacgaccgcggagactaagctggccgtcaataaactcaaatccatgctcgagacggatgaggacgggtggtatgatgaataactattatgtagaaacctacagcgagagcctgcggaaaaagggcgaggaactgtgcggagatatggtcaatgtcataagaaaaccggacgagacgattctcgtattggcagacggtatgggtagcggcgtaaaagccaatatcctggctactcttacgagtaaaatcatctctacgctcatgagcggcgacgccgatatcgatgaatgtgtggaaactatttccgagacgcttccggtctgcagcatcagaggaatcgcttattccacttttaccatcgtgagggtgaaacataacggagaaatttataccgctgaattcgacggtccggaattcgtcatgctgagagacggcgttctggaagagccggagaaagagatgagggtgatcagcgggaaggaaatctgggaatcgcattttacggcgaagcccggcgatatgatcatttctttttctgacggggtcattcatgccggcatcggccgtctgatcaatctgggctggaagcgcgtcaacgtcatggaatttattcagcgcaactaccggccgcatatctccgccagagtcatgacgaaagatctggtctctgtctgcgatcatctttatgaaggcgagcccggtgatgatacgacggtggccgcggtacatatcatgccgcgaacgacgacccgtgtgatggtgggaccggcatccagcccggacatggatgcgaaacaggtccgggatcttatcctcacttccgggaaaaaggtagtctgcggaggcactacgtcgaaaatcgtagccagagaattaggacagaggatcgatgtggaactcaaatattacgatgaagaggtcccgcctaccgctcatattgaagggatcgatctggtgacagaaggaattctgacgctgtccgccgcagaaaaaaggatgaaagaatatctggacgagtatgaagataatgtgagaaaaaaagaaatcctggacctggataaaaaggacggagcgacgaagctggtccgtctgctggtggaggaatgcacggatgtggtctttatgatggggcaggcgaataatcccgcgcatcagaatctggacgctccggtcagtctcaacatcaaggtgagaatcgtacagaatatcgccactatgctggaaaaactggggaaacacgctgaggtggaatactactgaaaccgcggaagtgcagaaggcgcagagctgcctcgagcgccgagggggattctgcggtgttcttggctgtttctcatgcaaaagatgccggagacggcatcttttttgcggagaggcctttttaagatggaaatagcatcttcggaatacgagattgctgcggtgagaattttatttcatctgcggaaaagaaaggcttgtccgcaggatattgaaaaaaattagcggattacatggttgtgcattgcattttttctgtcatatggtacaattgattgaaattgtgtcgctctgcgcctgtttttttatgctgttcgccatttcggcggctgttttttttcgccatttggtatttttcgttggaaaaacggtgaaacggaggtgcaggcagaaaattaggtccgaaggagaaagaagtataaatggacgttatcgatgtaaaaattttggaagtattacaggaaaattcgagagtttcgatttcagaactgagcagaaaggtaaacctctctctgtccgctgtgagcgaaagactgaaaaaactcgaaaattcaagcattatcagcaagtatacggtgattttggatccgaagcttctgggcaaggatctgtctgtgatgatcagcataggtctggaatccacctcgcagacacaggcttttctcgaatttgtggagatggagccggagatcctggaatgtcattatataacgggcgagtatgattatatgctgaaggttacgacgacgaatacgcatacgctggaaatgattatgaaccggatcaagggattccacggcattaagcgtacgcagacgaatgtaattctgtccacgacgaaacagcttcacagcgtttcgccggtactgtagcggaaaaatgaacggaaacgatgcggctcagtgtttcatgagggaggcgctgagtcttgctcatgaagcggcgcaggcgggagaggttcccgtaggcgctgtaatcgttcacgatggaagggtgatctccgcagcgagaaaccgcacggaggaacgtaaggatcctctggctcatgcggaaatgctggcgattcaggaggctctctgtgcggtcggaggctggaggctgaagaactgcgacatgtatgtgactctggagccctgtgcgatgtgtgcgggagctatcgttcacgccagaataagaaatctgtttatcggtacgccggatccgaaaaccggagcctgcggatcggtaatgaacataaccgcagacccacatctgaatcatcatccgcaggttgtgacagggattttgaaagaagagtgctccggtattttgaaggagtttttcagacagcttaggaggagaaaatgatgaaacgattcgcaggtatcgtaatgtccgcgatgctgctcgtagttatgtgcgccgcaccggtcagcgcggctgattttgaactcacggattccaacccgaaggatggatacgaaaaggtcgaagcgaagaatgtaatggtaaagctcttcttcagtgaagatgtttcaggagaggagacgcagaaagccaataaggacaagattgcgttaaaagacagcgacggtaaggctgtggactttgagattctctacgacagtaaagactcaaaaaaaatctgcctgctgccgcaaaaagatttggatacggaagaagaatatgtggtttccattgacggaggcctgatttccgacgatggaaatcagctgggaaaggatcaggaagtcacctttgcgacgaaaaagcctgacagcggcatgggttatatgggtctgatgcttctcatgattctcgtcatggtagtgatgactttccgcgatcagcgcaaggcgcaggagaagggcgatgcggatccgctggcggggatcaatacaaatccttacaaacttgcgaaagaaaagaatatcagcgttgaagaagcggttaaacttatcaatgccgagaaagaaaaagcacgcaagaaagcgcagaagcagcagaaggccgaaaaagaggagccggaagaggcggaggtcgtcgagccgaaagtatataaagtgaagacgaagcgcagagtaaagaaaaaatagtttctttactttacacggcgacagaaaaagtgaatcgcaaatagacgatagaaagcgataagatattatgcaggaggatcaaatggctgaatcaatcaagcccggggaagaaaaggcggcgcgggagagcgtcaactttatccacagtattatcgaaaaagatctggaggataatctctatgacagaccgataaagacgcgttttccgccggaaccgaacggttatcttcacatcgggcacgcgaaatccatctgtctcaatttttctacggcagagaaatataacggtctgtgcaatctgagatttgacgatacgaatccgctgaaggaagataccgaatatgtggaatctattatggaagatgtaaagtggctgggcttcgactgggacgaggtgagatttgcctccgactattttgaaacgatgtatgattgcgccgtaaaactgattaagaagggcaaggcgtttgtctgcggtctcaatgcggacgagatgcgggaataccgcggcactctgacggagccggggaaagaaagtcctttccggaacagaagcgccgaggaaaatctgcggctttttgaagagatgaaagacgggaaatatgcggatggagagatggtgcttcgggcaaagatcgatatggcttctccgaatatgaatctgagagacccggtgctttaccggatctctcatgcggagcatcacaataccgggacgaagtggtgtgtctatccgatgtacgattttgcacatccgatcgaagacgccgtcgaaggcgtgactcactcgatctgcacgatggagtttgaggatcacagacctctttatgactgggttcttcgggaaaccgaatgggaaaatccgccaaagcagatcgaatttgcccgtctcaatgtgacaaatacgctcatgagtaaacgtctgctgaagaagctggtagacgagggagctgtggaaagctgggacgaccctcgcatgcctacggtttccggcctcaggagaagaggctatacgccggaggcaatccgggacttctgcgacagaatcggcgttgcgaagtccaacagcaccgtggatgtgggacagctggaacactgcgtcagagaagatctgcagccgaaggtggagagcagaaatgtcatcttcgatccggtgaaagtgatccttaccaactatccggaaggtcagaccgaggaatgcgagatcgaaaataataaagatacggaaaaattcggtacgagaatggtccctttttcccgtgaactttatgtggagagagaagatttcatggaagttcctgtgaaaaagtatttccgtctgtttcctggcaacgaagtccggtttaagggtgcctatttcattacctgcaatgattttgcaaaagatgcaaacggcagaatcacagagctttactgcacttacgatccggagacgagaagcggttccggctttgagggcagaaaagtcaaggggacgattcactgggtagacgcgaagacggcggttcctatcacggtcagggatttcgattatcttctgaagccggatgagagcggaaaggaagtccctaacccggaaacgctgatcatccgccatgcggtagcggaacctgccattgcggattccgaaccgggcgacagatatcagttcttccgtcacggatattatatcgaagatacaaagctcagcagccctgatgcgaaggtatttaatcagatcgtaggtctgaagagttcctggaagccggcaaaataattattgtaaattgtttgaaagagcgccgggaaccggctgacaggtctcgtttttgtctgaaacggaatgcggagcagtgaaaatagaaaagatgtgtcttttccttttttaggaaagagcacatcttttttgcttttatttttattacgtgcggcagttcttcactgtttcggtttatttttggacagccagtccatttcatggtagaggagcaggccgatttgttccattgtccgttcgtcgatgtcatccagcgttttttctttcttttttatggattcgtaatcgaggaagagcttctcttcttctgcagaggttcttgccgcaccgattttataatccagatagcggcggaataaatccgctcccggttcttcgtcgccggaatcctcactttccggattttcgccgactgcaaaagaacctgtttctgtcatgctgtctaaagaaataaattccgctgcgggctttggtgaaacggaaggaacagcatttatttccggcgccggtgaagcggaaaccgcggacttttcttctgccggaggatttttgccgccggaaaaacttcctgtctggaaaatctcgctggagaggaagatgctgagaagagcagaacagccctcggtgacgtcttcgtacgcagtttcgaaatctccggtataccagggatctgcgatatcccggggatttcttgtgaaatccagcagacgatatattttcgctttcggatctccgcccatcatggcggcgatgtttttcacattggcgcgttccgcaccgatgatatagtcatagtaatcataatcggccggttcgatctgaacggccgtctttccggcgcaggaaattccttttgattccagaagtttctttaccggcggatacaccggattgccgatctcctcgcggctggtagcggcagaagcgatttcaaagagatcggagacgccgcgttttcggatcatatctttcatcacgaattctgccataggggaacggcagatattgccgtggcagacgaataatatttttgtcattttctgtagctcctttttatgttttgaaagatacactgaaattcttttgccagtacagcaggattattctccagacgtatctttcttcaacgggaaatgccgaaagtcgtgcgaagatgcggggcacagacgggttttggcctgagagtaaaatcgaaacaatattatttatcatatcacagttgaaagctcgtttctatcgataaaaatccggcatatctgtctcgctgctccggtatcacacctcatcaggcgggagggatcggaagattgttacagtttgatggaattaaaaatagcgcttgcattctattttttgattctgtatattagtaatatcttaaatacttaaatatttgctgaaggatggacagagtcagatgcaggtaaagagattatctgtacctgattctgtggaaaaggaggtttaactggtggctttaaaacgttatgctcaggtaggaaagtattgtgtttcctgcggaagttgtgtaaaggtctgtccgaaggaagcgctttccatctggaaaggtgtgatggcgaaagtagatcgtaaactttgtgtaggatgtggaaaatgtgcgtcggaatgtccggcgggcacgattgatatgagagaaagggaagcagcggaatgaatcggaaaaaacactggtatgattacttatggatcgtgactcccgtctatttagcgctgggattttttaacatacttttcgcgtggttggggatgatttttttctgtctgccattgctgatcgcgatttttggaggaaataagctgtactgtaatcgctattgtgacagagggcagttcctcagtctcttgggcggaaggctgaagctgtcgagaaataagccgacgcctcggtggatgtgttcaaaaatatttcgttacggttttctgatcttttttctgattatgtttcttcaaatgctgtggacgacgtgtctggtgggtgcaggggctggaaatctcaatgagtttgtgaaacttttctggacatttcaggtaccgtggcactgggcgtatcacggaacgattttaccggacgcggtggtgcagtatgcctttggattttacagtattatgctgacatctacactgatcggtctggttgtcatgatcttttttaaacctcgcagttggtgtgttttctgtccgatgggcagtatgacgcagctgatctgtcgtctgcgcgccggcggatctgcgccggagggcggtgaggaaaatgcgtgaaaaagcgagagagatcgcggaactaatggggctgatggcaaatgagaaccgtcttctgattctctgcgctctgttaaatggccccatgacagtgagtgagctgaggtgtgaggtgacggatatcagcctctcagcattatctcagcatttgcagaaactgaggacatcgaatctgatcgactcacagaaaagagggcagtatgtcacttattttctgaaagatcaccgccttcgcagcctgattgctctgctgaaacaggaatattgcggagagttttctgccgaaatcaatcctgcgtgatatttagaaaaagagttctgatttttagattgatttagattggttttaaatatgtttattagttttgttgaagtagagatctatatatgatatattgtttttgcaaaagttaaattatttttgaatttttcgaaatatattgcgaaaaatatcagatagaataaggtatttgaaaggagaatatttataatgaaaatcagtgcaagaaaccagttaaagggtgttgtcaaatctgttacagaaggtgcggtaaatggcatcgttacgattgaaattgcagcggaaaaacagatttccgctacgatttccatgtcttccatcaaggaactcggcctggctgaaggcaaggaagcttatgccattatcaagtctacggaagtgatgatcgcagacagcacacagaagatcagcgcgagaaatcagctgaacggcaaagtggtttctgtggaagaaggcgtggtaaacggtattgtaaaggtagaaatcgctccgggggtcacagtatcttctacaatctccatgagcgcgatcaaggaattgggcatctccgcaggcaaggaagtgacgtcggttgcaaaggcgacttccgttatgatcggtatcgcgtaggcggttgaaggcgggacggaaatgagactcagtgcgagaaatcagctgcttgcccgggtaacggacatcgatgctggaagagtaaacgggactgtcagactcgagctgacctgcggaggcgggatcagcgcaaatatttctatgaaagccatcgaatggatgcagctcgtgccggataagaccgtatatgctgtgatcaaagctaccgaggtaatgatcgccgcagagccggtaaagatcagcgccaggaaccggattgccggtacgattgccgatatcagtaatggcgctgtcaacggtatggtccttctggacatcgggaaggggcagcagatttcttccacgatttcgatggagtcgattcgcgagttggatctgcacgtcggaatggaagtttttgctgtctttaaggctacttctgttatgatcggactggagctggaccatatcagttttggactaatgtaaaattaaaatggtaaaatagattcggtataaaatccccggcctgaggcgcagccaaaaggcggggattttttcgtctgtctgctgcgcggcagccggaaactctcaggcgaagccggcgataaatccaaagcggtgtgtttccattttcctccgatatcttgaaaagaaaaataaaatatggcagaatcagggtattccgtttggtttttgggggttgaagggaaatgaggtggaaaagtgagattattgcttgcagaggatgaagctgcgatgtcagaagccttaaaggatatcctgacatatcataaatatcaggtagatacggtagataacggcgaagacgcgctggcttatgcgcaggtaggggaatacgacgggattattctcgatattatgatgccgaaaatggatgggcttcaggtgctgtcggtacttcggggcagaggcagcaggacgcctgttcttctgctgacagccagaggggaagtggaagagcggatccgcggactggatgcgggagccgacgattatctgactaagccgtttgctatgggagaactgctggcgagagtgcgggcaatgctgcgcaggagggtggaatatacgccggagattctccgatgcggggaagtttctctggatcccggaagctgtgagctcataggatgcggccgctctattcctctttcccggatggaatatctgctcatggaactcctgatgatgaatcagggaacatatctttccgcagaggtgattctggcaaaggtctggggatatgattccgacgcggagccgggaaatgtctgggtatatatctcatatctgagaaagaagctgacagaactgggctgcggcgtaggaataaaagtgaagcgcggtatcggatatactctggaggttctttcatgacgaaaacgctgcggatgaaatttatcgttacggctatgacggcggtgtcaattcttctgattcttctgatcggcggtatcaatatcgcaaatttttctgtcaatgaacggatgacccgggattttctgaaagtgctcgccgaaaacggcggctcgctttcagacagagaaccgccggatgagctgaaggagcggccggcggatctttttcggtttcaggagaatggacgtcagcccgccccgatggaatatttctgggcggaaacggacggcgccgggatggttgtctcctgtgatgtaagtcatatgtcttcattcactgtaaaggaggcggaggcttatatcggccggatcgccgttttgaatcagccgtggggaagagatgacgggatgcgctattttatcagcgagtcggaatcggggaaggggaatcttgtcgtcgttgcggatatctcgaatcaattgcgttcggaactccgcgttcttcttctttctctggcggcgggagctgccggctggttttttatgctgatccttatctctcttctgtccggccgggcagtccggcccatcgtggagaatatggaaaaacagaaacggtttatcacagacgcgggacatgagatcaagacgcctctggcgattatcatggccaatacggatgcgctggagcttcatcagggagagacgaaatggagccgtaatatccggggacagacagaacgtctcagcggtctgatgcagaatcttctcactctttcccgcatggatgagggaaccgccgaaactttgatgtcagagtgcagtctcagcgaaatgacgagagacgctgtcgctcaatttcgtgaaccggcagagaatagaggaatctctgtgctctgcgacatcgcggagaatgttaccgttacaggagataaggtgcggcttctgcagcttttgaccatccttttggacaatgcggtaaaatatgcggagggcgtgacgccggagatccgcgtatctgtatcccggcaggagaggacggccgttctgcggatttcaaacacatgttttctcggtcaggacgaagatccgggaaaatggtttgagcggttttaccgcggagacagtgccagaacgcagaaaagcggaggttatggcatcggactttccgcggcttccgctatcgttcgtctgcataaaggttctgtgaaagcggaatacgaggacggcagagtggttttcaccgtcgtactgcacctgtaataaaaagggggcgtatatcacagttttgctgcggatcggcggtagcgatttacagagatctcttctcacggcgtagtgtgccggagaagagattttttctttcacagtatcttcactctatcttctctttctgttccgattgctttaagttccgtctaaggctgagaatgtaaaattcccgtaaagcacaggccgcggtgcagaaagcggcccggtgcggattgccggaggcgtccgcagggacggccggtccggtaatcgatagcgaaatatcggaaaggaggatgataaaatgatttttcgtcatgaactgaaacatgagattaatttttccgatctgattgccgtcagacagagactgtgcgcggcggcgcagccggatcaatatgctgtcgggggaaagtaccgcgtgcgcagtatgtattttgacaatctgcgggataaagcgctcagagaaaaactggaagggctcaattaccgggaaaaattccggatcagatattataacggggatacctcttttctctgtctggaaaaaaagacgaagctcaacggtcttggaaataagcagaaagcgaggctgagtgaagaggagacagagagacttctctgcggggattaccgctggatgaaggagtcgggccggcccctggtgacggaactttacagtaagatgatgtcgcagggactgaggcccaaggcgatcgtggattacacgagagaaccgtttacctatcgtccgggcaatgtaagggtgacgctggactataatctgcggacgggaatcggctgcagagagtttctgaatccggactgtgtgacgattcccgcgggaaatcccgtgattatcatggaagtaaagtgggatgagtttcttccgtcggcgatacaagatgcagtacagctgaagagccgcagagcggcggctttttcaaaatatgccgcctgccgcatttacgggtagagagcagaaattaaggacgttttatctgtgatacggggcgccgggcggaggccgcgccctttggaaagaaggaaaaaatgagttttaacgatatttttaaatcgaattttctggagaatatgagcagcgtatctatctttgatacagttttagcgctgtttctggctttcggcatcggactatttatcttttttatatacaaaaagacattctccggcgtgatgtattcttccggattcggagtgacactgatcgctctgacgatgattaccacactggttattctggcggtgacatcgaatgtggtgctttctctgggcatggtcggcgcgctgtcgatcgtacgatttcgtacgccgatcaaagagcctctcgatatcgcctttttattctggtctatcgcggtaggcatcgtcctggcagcgggtatgattcctctggcggttatcggaagcgccgttatcggcgtggtgctgttcatctttgtcaatcggaagacacacgtcaatccctatatcgtcatcgtaaactgtgatacgcatcagagcggacaggaggcagagctcttcctgcggtcgaatactgaccgctgcgtagtaaagagcaaatccgctcagaacggcacggtggaactcaatatggaaatccggctgaaggaggataatacggattttatcgatattctatccgggctgccgggagtacgcagcgcggtactggtgagctataacggcgattatatgagctgaggaggtcgacatgtcaacacacagaaatatcgaccggatctgctgtgtcgtgctgatctttactctgttgattacggcgctttttctgtggagtgacaagctgggaatccagaatgtttccgccgcggaatacgaatcggctctgtttgatacttccagggttcacacgatcgatatcgaaatggacgactgggacggatttctggaaaactgtaccgatgaggagtatgaggaatgcgcggtgacggtggacggggaaaagtacgccggtgtgggaatccgggcaaagggaaatacgtcgctttcttcggttgcggcttacggaaacgaccggtacagttttaagattgaatttgatcattacgacagtggaatttcttattacggtctggataaactgagtctcaataatatcattcaggataatacgtatttaaaggattatctcgtatatcggatgatggatgagttcggcgtcgatgctccgctctgcagcttcgtctatattacggtcaacggagaggagtggggactgtatctcgctgtcgaggcggtggaggagagttttctcgagagaaattacggaagtgattacggagaactttacaaaccggacagcatgaatatgggcggaggccagggaaacggcagagaattcgatgaagagaacgtggaagaattttttggagcagacggtgaggatttctccggagggcggggtataaatccgccggaagaaggagcggacggtgaattcgaatcacagcggatagattcgccggaatcatctgcggcagagccgggatctgaaatatccggaaattctgagaatggagagacggaacgtccggcagccggtcagggcggcgcggaaaacgagccgccggcggctccgcaggatacatcgagcgccggcgattcctctcagcgggagggtcaaggaggcggccccgcaggtttcggcgggagtaatgacgacgtatcgctgatctacagtgatgacgaatacgacagctactctaatatcttcgataacgcgaagacggacatcagcgacggagataaggaccgcctgattcaatctctgaagctgctgaacgacggcgaggatatcgaagatgtcgtcgatgtggaagaggtcatccgttatttcgtagttcacaattttgtatgcaatttcgacagctataccggatcgatgattcacaattattatctttatgagaaggacggtcagctgtccatgattccatgggattacaatctggctttcggcggattcagcgcaggcggattcggaggcggcgctgaaatgccgcaagacgccggggaacatttcgggtcggaggaagtgtcaggggaggaaacgggcgacgaagagacggtgcagagcggcggacaggaaatatctgttcaagacacgtcgtcacaggcgacgagcttggtaaattatcctatcgatactccggtatccggaggtacggtggaatccaggccgatgctggcatggatctttgagagcgaggaatatacgcagctttatcacgaatacttttcccggtttatctcacagtatttcgacagcggttattttgagcagatgttcgattcggtcgtcgaactgatttctccttatgtggaaaaagaccctacggctttctgcacttatgaggaatttcagacgggtgtttccgttctgaaggaattttgtctgctgcgggcggagagtgtcagcggtcagctgaatgcgacgattccatctgacagcgaagagcagcagaaagactcttcttctctcgtcgacgcatcccatctgacgatttccgatatgggaagtatgggaatgggaggaaaagaaggtccgggaggtatgctaccgccggatttcggagactttgacggtgccaggatccgggaatccgggggcggggacggagcggatctgtcttccgcagaatcgttctctgaggcattctccgcggattccgggggcgggatctccggtacggaagaatcggaatgaggaggttctttcggcgcggaggacgccgggagcaatgatgcggcacaggcctctttgtccggcggctaagaggcgcatctactgcggttttacgcaagtttaacaatcttcctttcttactcttttcttttctctgttataatctgcgcggagaaggactcagaggagtacgcgtgaatttgtagtttttttacagaaatcaggaagattatggaaaacgaaatttttatgatgatcggttcaaaatacggggatctgagatcctcggaaaagaaggccgcggattatatcctcgcacatatggaagagataaggcgtatgccgctggaccggctggcaaaagagtgcggcgtaagccagcctacggtgatacggctggtaaaggcgctgagcttcagcggatatcgggaatttcaatatgccttagtagaaaatctggccagagaggaagaaaacgattcttcacagccgctgtacggttaccgcctgagcggtgaagaagctttagaggatattcccgggaaagtggtgcgaaccacggcgcaagtcgttcagaatacactgaagcatatttcgatgaagacgtatcagcaggtggtcgcagcgctgaaaaatgcggataaaatcgatatctacagcgtggaaaattcgggagttccggcggaggatctcatgacgaagctgctttatctgggatttcactgccgccactgcagcgactattatcagcagaaaatctgtgcgggaaatctcagcttccgggacgtggccgtggggatttcatattcgagttattctcaggatacagtggaaacaataagggaagcgaaaaagagcggcgcgaccacgattgtcctgacgaatttccgggattctctcatcagcagatatgcggatctgctgatctgtaccagccaggatcagttattttacggcgatgccattttttcacggacgacgcagctgatgattgtggatatgatctatatgggaatcatcgcgtcggattacgattattatgtaaaacagctgaaccggagcggcaaagcgatccgggacaaggcgtatccggcggagaagtaattccgccggagggattttatcgctggccgtctgagttgaatttaatgaaatggggaaaataaaattgtagaaaatctgtagattttctacaatttttttgtgtaaaatccgggtttgtttaacatttactttacttttttctgatttttatttgattgaacaaaaaaatctcagttgctataatggcggtgtttcaaaggtggaagtcaaacaagagaaaaaaggagtaaaggatgctgaaactcgaaaatgtaaagaaagtctatgacggcgttacgattctcgaaaatatcagtctggaaatcgaagaaggggaaatcgtctctatcctcggaccctccggctgcggtaagacgacgcttctcaatctgattctgggcattgcggatgcggacggcggaaggattttatataacggtgaagatatcacagaagttcccatggaaaaacggggatttaacatcgtatttcaggattacgcgctgtttccgaatctgaacgtatatgacaatatcacttacggtctgagaaaccggccggagatctcctcccgggaagaggtcggtgaactcatcgatcttctgggtctgaaagaacatctgaaaaagaggatcgaccagctctccggtgggcagaaacagagagtggctctggcccgcactatggtgatgaagccgaggattctccttctggacgaacctctcagcgctctggacggcgtgatcaaagaatctatcaaagatcgtatccgcaccattgcgcaggaatttcatctgaccacgatcatcgtcactcacgatccggaagaggcactgactctgtccaaccgggttctgatcctggagaagggcgggatcgcgcagtacggcggtccggatgagatcatccgccgccctgccaaccgttttgtgaaggatttcatcttaaatcagctggaaatcaagagaaataacatctatcagctgttttccggtgtggtgccggccgccgatatggctcaggcttccggtcagatcggatgaagaggtcggagagatgaaaaataaaaaagagatccggctgatcttttttctgacagccgccgtttttctggcttttctcgctgtgccggtggtgagcctgctggtcaaatcggttttaagcgatacgggatttaccaccgcgttttataaggaagtcttcggaacaaaaggttttctgcaaaccttgggacgaagttttctcgccgcgggcgccagcgctctgaccactacgctgctggcctttttactggcgtatacagtacactacaccaacgcacaccggatcgtgaaaaaaatcatcggagccgcggcggttcttcctatgctccttccgaccattaaatacggcttcgcgattatgtattccttcggaaaagaaggtcttctcacgcgtcttttcggcggtcagtttttctcgatttacggatttaacggcctgctgctgggttatgtgatttatacgctaccggtatgctacgttctgatttccaacgcgatggaatatatcgaccggaaatttatgacagtatcccagctgatgggtgacggtccgctggcgacgtttcgcatgacagttctccgcccgctgctggggactctgggcgcgtcttttgtgcagtccttctttctgagctttaccgatttcggtatcccggctgcggtaggcggagagtacgaagtgatttccagcgtactgtataagcagatgctgggaagtataccgaatttcaataacggggcggtagtcgccgccgtcatgctgattccttctgtcatcagcatcgcgcttcttcagtacctcgacagatataacgtgcgctacaacaaaatttctcaggtggaactgaagaaaaacaggatccgcgacgggggttcgacagcggtgtctcttctgatctgtctgagtgtcgtctcaatcttcgcggttatcttagtcattccttttgtggaagagtggccgtatcagatcgagttcacgtttaaaaatgtgctcaatgtatttcaggatacagagctttccaccgtttatttcaattccctgtacacggcggtatacaccgctgttttcggaactcttctggtgtacggcagcgctctggtcactgccagaagtcagctgagcggaaagctgaaaaaagtcatcgaggctgtcgctctgatcaccaatacgattccaggcatggttctgggtctggcgtttctcttctgcttctcgggaaccggtcttcaaaatacatttctcatcatcgtcctgtgcaatgtgattcactttttttccacgccgtacctgatgatgaaagaatctctggcaaagatgaacgcgtcctgggagacgacggcgatgctcatgggggacagctggatcaagaccgtattccgggtggtgacgccgaatgccatgtcgactatcatcagcgtgttcagctattactttatcaacgcgatggtgacgatcagcgctgtcattttcctggccggcgcccggacgatggtcatcacgacgcagatcaagcagctgcagtattacaataagtacaatgagatcttcgttctgtcgctgctgcttctgcttaccaatctggcggcgaagctgctgttcggctatctttcgcggagaaaagcgaaaaccgcggaaagtgaacagatgccggaaggtgcgccggtaccggtgcagaagagcagaagactgaaaactgcaaaacggatgatctgtactgtcttgacggcagtcgttctgatctccgcggtatctctgggaagcagcgggcgaaacagcgatctggtggtcatctattcgaatgcggacgacgaagcggtagaagctatgaagtctgcactggatgagaacggatatcagggaaaatatatcatgcagaccttcggaacgtcggaactgggcggaaaactgctggcggagggtacggatctggaggcggatctgatcaccatgagtactttttatgtggagagcgcacaggaaaaaaatgatatgttctgtgatctggaatttgatgtggacaccatcgacgacaccgcttcctactgcgctccgattaccgctcaggaaggggcgatcatcgtcaacacgaaggtccttgaggcggagggactgccggctcccgaatctgtaaaggatctcgcagatccacagtatgcggggatgctgtcggtaaccgatgtctcttcgtcttctaccgcatggctgcttctgcaggcgctgatcgccgaatacggtgaagaggaggcgcaggatatcctcggacaaatttacgataacgcgggtcctcacgtggaagattccggttccggcccgctgaaaaaggtgagagccggagaggtggcaataggattcggacttcgccaccaggcggtggcggataaggaaaaagggcttccggtggattatatcgatccggcagagggcaacttttctctgaccgaatcagcggccgtcgtaaagaaggacacagagcggcgggatcttgcgatgaaaatggcggaatgtatcgtcacaaacggccgcgggaaactgcaggaaatataccccaacgcgatttatgagaatgagacgactaattcaaaaaacgcttcttccaatccgaaaaaatttccggaacctctgacggtggctcttttagaacgccacgaggcgatttccgaggcgagcaaataaaagtgcagtatacatgagtttttaccgaaagacgatatatgagtaatcagccggctgtatccgatgcagttgataaagctgagtaacttatattatctctcaatgatattcggtatttatcgtcaatgaaaataaaaaggagaatagaaaatgcctgattacaaattactgaccccgggacctctgaccactaccgatacggtgaaaagagagatgttgttcgaccactgcacctgggatgacgattataaaaagatcacacaggagatacgcagagcgctcctggggctggcgaaagtctcggaaaaggaatatacggcggtgctcatgcagggcagcgggactttcggcgtggaatcggtgatcaccagcgcggtgggaccggaggaccgtcttctcgtcgcagccaacggcgcgtacggtgaaagaatggtggatatcgccgcccatgcgggtatcgatcacgtggtgtgccgggaaaattacgaccggattccggatgcgaaaagaatcgcggaatatctggacgaagatccttccatcacccacgtatctatggttcacagcgagacgacttccgggatcctcaacgacatagaagcggtgggcagagttgtgaaagagagaggaaggacgtttatcgtggatgcgatgagcagctttgccggtgtggaaatccctgtgggaaaatgggggatcgacttcctggtgagcagcgcgaataaatgcgttcagggggttccgggattttcctttatcatcgcccgcagagaagcgctcagagcctgcgaggggcaggcgagaagcctgtctctcgatctctacgatcaatggaagatgatggagagcgacggaaagtggcgttttacttcgccgacacatgcggttctcgcttttgccagagcgctgaaggagcttgagaaagaagggggaatcgaggcgagaaaccgccgatatacagaaaacaaccgcctgctgataaagagtatggcggaactgggcatacgcccctacatcggcggagaatatcaggggccgattatcaccacgttcttttacccggaaaactgcagcttccgattcgcggatatgtacgaatatatcaaagcgaggggatatgcgatctacccgggcaaagtcacggaggccgagaccttccgtatcggaaatatcggcgagatctatccggaggatattcagagggtatgcgggctgatccgtgaattcatcgaaaca

SEQ ID NO: 524 - DNA, 8859 bp, Unknown
  16S sequences of unknown bacteria
agcgaagctgactgaggggttgcgaaagaacttttgctgttttttcacagcccctttgcggggatgccaaaatggccgttgccttcctataaaggccacggccacccatcgttgaggtcggcaacgcccgatctgttttacagtacccagtagaagaacttcagcacatccatataatcgttcgattcaaaggccacgcgcgtgctatcgagctgcacgcagcccggatagtgcgagccattggtggcgtaggtatggttgcggaaggcgatctccacgcggaagtgatccggcatggggaacatcagcttcttggggtcgatggacagcgccttttccgctgcctcgcgaatgcgcttcacggccagatgcgggttgatggacaggctcgcgccgcccatgccctcgctcaccgccacggtggggatgttcgcgttcatcttgtgcagccattcgcacaggcccttatcgccggtgagcagatagatgggcttgccctcgtaagccgcggtgagcgcgttgatgaacagctcggggcagatgatgtcgttgatcttcacatagacatttttgccgttcatggtgtgcgaaagcggattggtgggcatggaagccgcggaatgatagcccgtgaacatcacgccgtcaaagctcgcgtccagcccggccatcatggaatagggatgcctggcccacgagcgcaggatgctcgcctgctcggggagcatatccggatagatgttgcaggcagaatcgtgcgcgtccttcaccacgatctccgtcgcgccgccggcgatggcgccttcgcaggccgccgccacttcgctggacatctgccgcgcaaagtggtcgtacaggcgcttgcccgtttccgtttcctcccaaagggtcacgcccgcggtgccttccatatccgcggataagaatagcttcatttctcttctcctcctatatacactctgggcgcgcggccattcagccgggatagcgcctcattgcggttcatatcggcccactgcgcgtattcgtccacgccgatggagccgcccagcagcgtcgcgacgtcgcccgcgcgcacgccgggaatgtccgtaacatccaccatcatctgatccatgcacaccagccccgcgaccggcgcacggcggccgtggatttccacctcgcccacgctgttgagccgcggatagccatccgcatagcccacggcgagcgtggcgatcgcgctatcgcggcgcagcggatgttcctcgtcgtaccccacgcattcgcccgcgcgcacccaatgcacctgcgccacccgcgcgcagaacacagccgggcagcgcgtgagttcccgccgctcaaaccgccgcgggcacacgccatacagccacgcgccgatgcgcgccgcgtccagctgccactggggatagcgcaccatgccgatgctatccaccaggtgcgtcatgggcgggtgcaaaagttccttcgcttccatcaggcgggcgtattgcgcctcgtcgcctgcgcggtcgcgcaaagcgaggtgcgaaaacagcccttccatggccaggccgggcagcgccgccgccgcgcgcagttcttccagcgaagaaaagcccagccggtgcaggccggtatccaccttgaagtgcacgcgcgctgggcgcgctttcgcgtgcgcgctgaccgcgcgcgcgtattccagcgaaaacaccgccaagatcacgccgcgcgcaatggcctcgtccaattcggcttcgcccaccaggcccatcaccagcacgtcgcagggcagggcgtttttgagttccatggcctcggcgtgcgtggccacggcgaacagcttcgcgccgcgcgccatcagcacgcgcgccacgcgcaccgcgcccatgccgtaggcgtccgccttcaaaacggggatgagttgcgagcggcacagcgcgcgcgcgttttcatagttctggacgatggtatccagatcgatccgcgtccagcagcgggaaaagcgcggatcattcgccaagctttccacggtattcctccagttccttctggttgcccagcacgaaatgccccggctcgatctccgtccacacgggcttatccaccgaataatcgtgcatgctcgggtcgtacaccgtaagcaccttgtgcttttcgctgatggggtcgggctgcggcacggcggagagcagcgcgcgcgtgtagggatgcagcggatggcggaagagtttttcggtttccgccagttccaccaaatggcccaggtgaatcacggcgatgcggtcgcagatgaagcgcatgaccgacaggtcgtgcgagatgaacagatacgtcagcgcgcgctttttctgcaattcgcccagcaggttgagcacctgcgcgcggatggacacgtccagcgcggaaatcggctcgtcggcaatgatgaattccggctgcatgatcagcgcgcgggcgatgccgatgcgctggcgctgcccgccggaaaactcgtgcgggaagcggctggcgaattcgggcaagaggcccacgtccatcagcgcctcttccaccatttcgcgccgcttttccctggaaatggggtcgctgtaaatgccttcggaaacgatgtagtccaccttggcgcgctcgttcaggctggccatgggatcctgaaagatcatctggatcttgcgcgtgatggccttatcgagcgccttatcgatgtggccgttgatcttctggccatcgtagaggatttcgccctcgtaggtgggatggatgcggatgatcgcgcggccaatggtggtcttgcccgagccgctctcgcccaccaggccgaaggtttcgccccggtggatgtcaaagctcacgcggttcaccgcggtgaacggatggaaccggttgccgaagcgcacggtcacgtccttgagttgcagcaaaacttcgctcatacgcgcacctcccggcgccggagcgcctgcacgctctccggcggatccagcctgggcgcgcggggatcgagcagccaggtgcgcgccttgtgggtttcgctcacatcaaaatagggcgggcgctcctcaaaatcgattttcagcgcgtgcgggttgcgcggcgcgaaagcgtcgccccggatctcctggaacaggttgggcggcgcgccctggatggtatacagcggttcgccccggcggcccagctgcggcagcgaggagagcagcgcccaggtgtacggatggcggggatcgtagaaaatctcctcgcaggagccgatttccacgatgtcgcccgcgtacatcacggcgatgcggtccgccacgttggccaccacgccgaaatcgtgcgtgatatacacgcaggtcaggtgcaatttctggcgcaggatcttgatcagttccagaatctgcgcctggatggtcacgtccagcgcggtggtgggctcgtcgcagatcaaaatcttgggcctacaggccaccgcgatggcgatgaccacgcgctggcgcatgccgccggaaaattcgtgcggatactggcggctgcggcgctccggctcggcgatgcccacggcggaaagcgcctcgatcatttggcggtgcgcttcctcatgggaaacgtgctggtgcagcaaaatggcctcgatgatctgcgcgccgatggtcttgagcgggttcaggctggtcatgggatcctgcatcaccatggcgatttcccgcccgcggatcgtgcgccactggggctcggttttgaactcggccaggttgtgcccgccatagaggatttccccgctgtccacccagccgttcgcgtccagcaggccgatgaaggtcttggtgagcacggttttgcccgagccgctctcgcccacgatggcgaggctttcgcccgggaaaaggtccagcgacacatcgcggatggcgtgcagcacgcggccgcgcaggcggaacttgacgttgagatttttcacggacaaaatgctttccacgttccgccctcctttacacatggttcttgggatccgcggcgtcggcaaaggcgttgccgatgatgtagaacgaaatggtcaccacggagagcacgatcgccgggaagatcagctgatagcgcagcgacggcgacgtgatgagctgccgcccctcgttcaccaggttgcccagcgagggaatggataccgggatgcccaggccgatgtaggtgaggaacacctcgttgccaatcgcgcccggaatggccagcgccatgcgcagcatgatcacgctcaccagatacggcagcaggttgcggaagatgatgcggaaggtgcccgtgcccaggcagcgggaggcgaggttgtaatcgcggtcgcggatgatcacaatctggttgcgcacgaaccgcgacatgcccagccagcccgtgaggcacatggcgaaaatcaaagtgggcaccgagggatgcaggatgtaggcgatcagaatcagcacgatggtggtggggatgttgtccagcacgttatagatctccgtcatcagccggtcgagcttgcgcacatagccccagatcacgcccataaagatgcccacgagcgcctcggtgagcgccacggcaaagccgatgaacaggctggtgcgcgtgccgctccacacgcgggaccacagatcctggccgatgttgttcgtgccaaaccagaaggcgtgaatggagggcaggatgcgcagatccgcctcgcccaccgtttccaccatgccttcctccccctctaccgcgcgcacgctatccgcgctgacgtagaggctgttgccgtcgttggtgacgtccaccggctccatgtacacatccaccttgtagttggacatggcctcatagggcacgttctgcgggtcttccggcaggcgcaggtattcggtgagcacccagcccgaaatctcctcgaactcgatgtggcagaattcctcgccgtattcggtgatggtcatgttctggcggcggtcgatgctgtccatcacgttcgtgacatagtaccaatcttcgtcgtaaggcgcgccgtacagcagcgtgccttccggcaccgtaaccttcaccgtggtgaggctgggcggcaggttggagagctggcggcccgtctccgggtggttgttgatgacgttcgcgtcgtactggccgggcaaatagggctgcacgaaggtgaacagcaaaagaagcgccagcacgatcaaaagggccaccgccgcccggttgtgcaaaaacaccgacagcgtggagcgccagtaggaatagttggaatagccgctcttttcggcggccgccgcgtcatactgcgcgaattggaacagggcctcgctctttttgtctcgcagcgtcattatcgggcaccttctttcttcgcaaagctgatgcgcggatccaatacgcccatcaggatatcgcccagcaacagcccgacgatgccgatgcacgaatagatgatcacgatggcctgcaccatggggttatcctgccggccgatcacgtccaccagcaggccgcccatgccgggaatggaatagagcgattccacataaatcgagccgccgatggtgtagaggatggaggacggtatgtactggatcatgggcacgaaggcgttgcggaacacgtgccgcatcatcatcttcttttccggcacgcccttggcgcgcgccaggcgcacataatccttgttcatctcatccaccatatagcgccgcagccacatggcgtaataggcgatgttgcccagcgccatggaaaagatgggcagcagccaggtgacgaaattgtgccggtcgaacagcatggggatgtggaaccattcggtggcgtacatttgaataaagatataatacacggccgacggcacagccgtaatcagcacgatgaacagggttccgaacttatcccagaatttggatttggaacgcgccatggccgcgcccagcggaatgcccagcaccagggccactgccatggagcttaagccaatttgcgcggaaatgggcgccttttccgcgatgatgcccgcgatcggcgcgccaatgcgatagcgcacgctggtgcccagatcgccgtgcagcagctgcacgaagaaattcttcagctgcacaaaaatcggatcccgcaggcccatcttctgcaaggtggcctcgatcaccgcttcatccagcttatcaaagttgtcaaaatacccttcaatgggcatttgccttacgaggatgaacaccacggaaatgatgatcaccagcgtgatcaggctcgcgcccaaccgcttcaggcaatacttcagcattccatcactaccttttaattcaacgggcgattttcgtttttcaccaattgtgctcgctcaagcgttgcgacagggcgcgcgccggaaatccggcgcgcgctcattgctatgcttctgccgagaaaacaggcgttactcttcctgcgcggccagcgcggcgcgctcggcttcccaagcgtccatggcctcgaagtaatcgtcggtgttcatgggcacttcatagaccttctggcccttatagcgctcgccggacaggccgaacggcgcgtactgcgattcgaacggattgaggcggttggcgtcgtacccgccgctgccaaagccgaaggggatcacaaacgcgtgctcgatgaggaaggcttccgcctcggcaaacgcctcgtagcgggcctgcaggtcatcggtgatggcgcgggccgcgtccaccagcgcatagtattcgctgtagccctcttcattgttgtagtagagcgccatttccggcttgttgtaggtgccatcgtagaacgggtcggtgtaggtgttggggtcggcgtagtccgggccccagttgcacttgtggatggcgaagttgccgttgcggcgcaccgcatccaggaagcccgtggtgggaccggcttcgatgatgatatcgatgtagtccgtgcccagcaggccttccatctgctgctcgacgacctggcactcctcgtcccagccggtgacggaggggttgtagggcatgtagatcttcaccgggaaggtcgcgcccgcttcggtcagctcggcgatggccagttccttgtactccagggccttggcctcgtcaaactgcgcggcggcggtgacttcgcccagcgcgcctatatcggtgtaatcctcgccgtgcagggaaacgaaggcgggcggggtgatggtatcgaacaggatggtttccggatagtccggctcgtagggcagcgcggcgctgatcttatccagcgcgtggaagatggacttgcggaagttctcgttgttcacggcgatcttccagttctccggctcgtactgctcatcgaagtgcggatcgaagttgaaggcgtagaagtaggagtagaagccgctctgacgcaccgggcggatcagatccgcggtttccggatcggccagccaatcggcggccagcgtggaatcgatggaagcggagtcgatctcgccgcggcggtacagctcgggggaaatcgtgctggcttccttgttataggtctgctcgatgcgctcgatgaacacattgtccgcatcccagttggattcgttcttggtgagcacgcgcttctcctgcggggcgaactcggaaaggatgtacgcgccgcaatagaggatggtgtcgttgcccgtggccacgccgaagttcgcgcccatctcgttgaggaacgtttcgttcacgggcatgaaggccacgtaagtggtcatggacaggaagtagggcaccgggttcttgagcgtgtactgcagggtgtaatcgtccacagccttcacgcccacggtttcccactccatcacgggcgccggctcctcgccctcggcgggggtggcggtgccatcgtaatattcttccgcgccggtgatcacgtcatagaggatcgaggcggagctggaggcgttctgcgcgttgaggatgtatttcgcggcggccacaaagtcgtgcgcggtcacgttggcgtagtactcgccgttgtgatccacccaggtggcgtcctttcgcaggttgaacgtccacaccaggccgtcatcgctcgtggaccagctctccgccagcgagggctgcacctcgcccaggcggtcatattccaccagcgtatcgatcacgttggcggagatggcgaagtcgttcgtcgtggtggtcaccaggtagttcagcgtggtgatctcgccagagtacagcgtgcggtacacatcgctggtggcagcttcttccgccgcggcgggcagcgccgtcaaaagcagcgtcgcaaccagaagccatacgagggttctcttcatagccttgacctcccaatgcataatcatgtggctcgtgcctcatactataccataccctcgcccattttgcaagaatccaatgttaaaaatgcacgcttctaaaaaataaatctgcgctatagcattaaattgattcttgcataaacgggaaattcatctgaccggcaaatccctcgaaaaagcccgaaaggagcgccgccttttccggatggggccgggaaaaaatcccaaaattgtggggctgcgcaaagaacgtttgccgttctcgcacaaccccggttggttgcttgccccaattttgcgccaatatccactgcctggcacttagttcatggccgccagatagcgcggccgctcggcggtggggatttccagcacgttcatcgcctgctccgcggacatgcccgcgttggcgatcaatcgcctgaggctatccagcgtggcactgaatgcgcccttttccatgccctgagcgatgcctctttctatgccctgagcgatgcctttttccacaatcccctgactcaaattgcacatctgcgccacctcctcttctactctctcgctcatttgaatcgcaaattcttcttccaggatctgctttttctctt

SEQ ID NO: 525 - DNA, 6936 bp, Unknown
  16S sequences of unknown bacteria
cgtagtcctcggcctttatgaacactctcgggtcgatccagtcggcatagtcgccctggttgtttccgtcggcattttcgactctgagcgccagctttttggcccctttcggaatttcggccgaaatttccgccttttcattcatggtgacggtgcgggtttcggcaatttctttgccgtcggcaagcaccgagtatttgaccgagcccagcaccgagcccgcaatgtttgcaaagtcgtcgatgccgacaaccgcatggaaatattccgcaccctcgaatttcgtcaaatcaaagaccgcgtcggcgggtgcggcgtcctgaccgttggcgggaactaccgaaaaaccgtttttggtctttacggtctgtcctcccaccgaaaggtcggggcaatattttgacacgcccgtttgtttaaagctttgtccggcgttcgaaagggtgaaattttccgccgcaaggtcataatagttttgcttgacgatttcaaccgttgccgacgcgtcttttccgtcggtcaaaacaatatcgttaagccccgaggaaagagcataggacgggattttcgcggtaaagccgccgtcggctgcggccgttgccgtaccgacctttttgccctctgccgtgacggtgagcgtcgctgcggctttggccgttcccgttatttctatgcccttgtttcccaccaccgttttgtcggattttgaaagcggaaaggcaatttgaatttccgaagtttccttcgcggcggcgccttgattgtcggccgacgcggcaacagaaaacattcccgcggtcataacggccgaaagcgccagcgaaagaagctttcgagacataccttttttcatacttaaatcctcctgattttatttttcgacgggaaagctttgaattttccccaccgatttttgaagaatgagaagcgcgtcggtaacgctgacttttccgtcgccgtcaacgtctgccgccgccgactgctcggcggtgagatttatctttgccaccgagccctgaagggtaagcagcgcgtcggtcaccgaaatttcgccgtcgccgtaaattacggcggccgagacgcgttttatataaataatatcggaatctccgacgctttggccgtgctcgttttcgtccagcgtcattgtaatgccgacgctcataagctcggcgccgacggcggttattttgtcctcgctgtcggcaaaggaaattttataaattccgttggggtcaagccccttgagacggatattttgactcttttcggcatactccccgccgcggttgaacacaaaggcaaagccttctttttcgtcgtttatatagctgtatgaattccattcgttttgcgaaacggtgtttttggtcagctcgtagatgtcgccgtagaaatatccgtttatgcccttccactcgtcaatgcagtctttaagcagctcgacggtttggctgtcaaaggtttcgagatgaacctgacaggctatggactggcgataggcggtgcgcatgatgtatttgtcggtaagagcctgcttgtttccgaggtcgaatatgtggctgtttgtggggccgggagcggtgtttttctctttgttatatccggcaagctactccttgctgacaccgtaggtttcaaagtcgttttcgttcatgcgaaaggcgttgcgctccggctcgaaccaaagaattattcgtccccgcatacccgctttttcgcaggcctcgccgacggccgaaagcttggtggggaaccgctcggtgtccaccgtccagttgcccacataagtccagtttcttgtgttgccgtccacataccagcccgcgtcgatccaccaataatctatgtcgacgccgagcttttcataaagctcgatattttcgatcatgctgtcctcagtttggtacatgacctctttcggaagccccgcaacaaaaggctcaagattggtcttgccgtcctttttatacatattgcagtcgatcatccaccgtctccaaaggttggttgcgcggtcggtgttgcggccgtcgtagagaatgaccgccgtcagaggagtgcgggcgatttctcccgccttaaggtaggaattgaaggtctgctgacgtcccgaaaaggaggtgacgccgtctgaatattcgaaatcggtttgccattgccccgcccagcttgtggctatcagggcgccgccgtttccgtattcgaaattataataaggaaatcccacctcggtggagcggccgtttgaggggcaaaagctgacgctgtttgtgtcctcgagagaatagctcctcgggataaagggggcggttgcctgggtgtcggcctcggtgtcgccgcagcttgtgagaatgacggggttttcgccctcgaatttaagctctgccgagcttatgtcggtcacgataggggagtttgaggaggttatgttttcaaagtataaaacccagtcaaaggcggcatagtcgggataaaaggccgttttaagggtgaattgcagaccgcttttgtggagcagcacaatttcggccgtctcgctttttgcaacttcgtcggttcccgctttttgcgaaagcttggaaaaatcgcggtcggaaaagccgacatattccttgttcccgattttcattttggagggaaatttttcaagatttgtgatatagctttgataggtttcacgggctctgtttatttcgtctttcgttgcgacgcttttttccgaagtcgcggcgggctcggcggtgacggggtcaaggggcgccgagattttacccgaaaagttgaccgtcatattcaaaagtcccgtttttgccttgccgtcggaaaagatatatcccttgtcgctttgagcggtttttatttcggttacgccgtcaaaaacgaagagatattctcccggcccgtaaaggccgtttaaggcaaaggtataattgccctgcccgtcgggggaaagctcggcctcgcaaagggcgccgttttgcatggagcgggcaaaggaatatgtgaatttgaaaagtctgccgaatacgcgatctcccgccttttccggctttaccgtcaccgaggaaaagtcccctttaaggttaagcctcgcggcggtctgcgccttggcggtcagggtgctttgctcggaaaaggagccgagctcggtctccgtaccgctgaaatcctcgcttctcaggaatattctcgggttgataaaatcgccgtagtcgccgcggttgctgccgtctacacttgaaacgcgaagggtcagctttttggtgacggcgggaatttcggcaaaaatctcgtcaacctcgtttatgtccatttctctcgaaacggcaacggtctttccgtcggcaagcacggaaaacacaaccgagctgcccaccgttccgcccacgtttgcaaagtcgtccacgccgattgtcgagcggaaataacgcacctgttttttgacgcccgaaatgtcgatgtcggccgaagccttgtcggcgtctctgccgtcctcgggacggagggaaaagccgtttaaggtctttatggtctgcccgcccaccgaaagctcgggacagaatttcgaaacgccggtttgccaatagctttcggcggcccctaaaatttcgtgggggaaatcggccacgtcatagtaatattgctttttcacccgaagggatgtcgatgccttgccgcttttgggcgaaagctcgatgtcgttaagacccgcgtctatggcaaaggaggttatttttgccgaaaagctgccgtcgggcagaacttcggcgctccccgcacttttcccgttcaccgtgacggcaagcgaggtctctcccgccgccgttccgacaacggttattccgtcgtttccgacaattgttttgtcgctttcaagcgtcggaaaggttaccgaaacggggctttgctcggtttgctcctcctttttttcaagggcggcggccgacgtcatgcaaagcaaaaccgccgccgaaacagccgagcaaatcagtcttttaaaacttgaattcatacgtttttctccttatcggaatattcgattcattatatcatttggatttttttaatacaacaagtcaacagtcacaaatatgtcgccttctttttgtgcaaaacgaataatgaagaaaaagggcttcggcacaaagcgtaccgaaaccctttaaaaattatttttgttcagttttccacggggaatttgtcgatttttcccaccgatttttgcagaatgagcagcgcgtcggtaacggtgatttttccgtcgccgtcaacgtcggccgcagcagcctgatcgtcggtaagtccgatctttccgaccgaaccctgaagtgcaagcagcgcgtcggtcaccgagatgtctccgctgccgtcggtgtcgccgtaaagcaccccgccgccgatctttttaaagtagattatgtccgaatcgaccttttgatccatttccttttcggtaagtgtcagcccaactccgacggacataagctcggcgccgcttgcggttaccgtgccgtcaaaatcggcaaaggtgacctcgtaaagagcgttttcctcaagccccttaaggcggatgttttggctttcgggggagaactcgccgccgtgattaaagacgagggcaaagccctgctgactttcgctgtttacatagctgtaggcataccattcgttgacgcttgcggtgttgtttgtcagctcatagacgtcgtcatagaaaaacttgctcaaatttctccattccttttcgctgtccgaaacgattttccgctcggcgtcggacagcttgtcgaggtgaacctgacaggctatggactggcggtaggccgaacgcatattgtatttgcttgttctttcggcatactctccaaatccggtgttggcgcccgcaaaggggaaccagcaggcaagtccgtaggtgccctggtgcttggcgggcatatcgttatagttgtaatcggtggggtgaagtgcgacggagcggcgcatggtctcaaggtcgagacggtgtccgcccgaggcgcaggtatctatcatgttgatgttttcgtttgcaagaatgttgtcccacagagcatagtgtccctgaacatagcggttttccacgattcccacgcggtcggccgtgtcggcggcccgccaaatgctcaaaatggcgccggtgttgaggtcctcgcgatagaaggaaattcccccctcgttcaaaaccttgtttatgcggtcgctcatccaggaaagagcctcggcgtttccgaggtcaaacatacggtatccgttggggccgagagccgtgttgcgctgtgcgtcatagcccaccatccattcttttttgactccgtatttttcaaattcccctcccgtgaaggaaaatgcgttgcgttcgggctcgaaccaaagaatcgttccgcccttcatgttaagctcgctgcaggcgtcggaaatggccttgagaccggttttataccttgttctgtcgacctcccagcttccgacatagccccaacccttggtttttgcgtcgggataccagcctgcgtccatccaccagtaatcaatgtttacgtcatatttgaaatagtccttgatattttcgatttgttcctcttcggaaaagtccatcatttccttgggaagtcccgcaataaagggctcgatgttggttttgccgtcctttttatacatattgcagtcgatcatccaccgtctccaaaggttggtggcgcggtcggtgtcacgtccgtcgtagagaatgacggcggtcagcggagtccttgccgtttcgcccggctttaaataggagctgaaggtttcctgcctgccggaaaatttcgtctcattggcatttttatcgtagctgaaatcgtttatccattgtcccgcccagctggtcaccacaaaggcacccttgccgccgtattcaagattgtaatagggaaatgcggcttcggtggagcggccgttggtgggcttgaaggaaaggctttccgactgctctaagtcaaaggagcggggggtgtagggagcgggagtccctgttatggcctcgttgtccgagcagtttgtaaggattatgggattgtcgccctcgaaggtcagctcggcggggctgaggtcggaaaccacgggggagtccttggcggtcatgttggagaaataaatgacccagtcaaaggcggcataatctggatagaaaaccgtcttaagggtgaattttataccgctttttgagtgaagaatttcggtgtcggtgttctcgctcttggttgtctcgtttgcctcggtcttttgagacatcataagaaaatctttgtcggaaaaaccgacatactccttgccgtcaatggtcattttggaggggaaatttgcaagatttttcagatagttatcataggtttctcttgctcttgtcttttcggcgtcggtggcctcggtctttctgaccgtcgagtcgggcgctgcagtaggcagagcaagaaggttcgcgtttttacccgaaagggtgaggctcatgttgagcagcccctttgcgggggaggagtcggcaaagacatatgccttcttgctgccgcttgcctttatgccggtcacgccgtcgaaaacaaagagatattctcccggcgtgtagaggttgtcgaaggcgaatttatagtttccctccgagtctgccgaggccttaacctcgcagagaattccgttttgcagcgaacggacgtaggaatagttgtatttataaagacggagagaaacggtttcgcttgccttttcgggcattaaggtgacggcggaaaatccgtttctgacgttgagaagcgcttccaccgaggcctttgccgaaagatttgcggcggccgagccgtcaaaaaggtttgcctcatcaaagccgtagtcctcggcctttatgaacactctcgggtcgatccagtcggcatagtcgcc

SEQ ID NO: 526 - DNA, 3057 bp, Unknown
  16S sequences of unknown bacteria
gacttgccgtcgttctgcgggttgatgccgaggtcggacgcctatcgccttctcgatgttcttgttggtcgaagcgtcccacggggtgatcatgatcgtgcgcgcgtcggtcaccttgacctcagccatctggttgatctttgtcggggagccgtaataatcgatctcgatcttgtcgagcagacccggatttgcgcgtccggcacggatatcggcgagctcattctcataagccgcgatggatttcttcatctttgcgtcaaattctttgctatcgatcttcatttttatcggtatcctttcttattttgatttaattttatttacgaatcttttacaactgtgccatcgatatcgccgatgatcgcgttgtagatgttctccgggtccttgagttcgaagacgaacgtcttgatgtggttctcgtttccgaaggaagcggcggtcgagtcgatcgccttgaggtcgttcgcgaggatttccttataggaaatttcgttataacgcttagcgtccgggtctttcttcgggtcggcgttgtatattccgtcaatattcttgcccatcagtatgacgtccgcgccgatctcagccgcgcgcacagccgccgccgtgtcggtcgaaatgaacggaattccgagtccgccgccgagaatgacgactctgcccttgttcagatgcgataccgccttgttgcggatgtacggctcggcgtactgcttcatctcgacagccgtcataacgcgtgtctcgacgccgttctgctcgaaagcgtcctggagagcgagggcgttgatcgtcgtcgcgagcattcccatgtggtccgcgcgggtgcggtccatgttcgagccctgtctgccgcgccagatattgccggcgccgacgattatgcagatctggcagccgatttcgctgcactttttcacgaccttcgcgatccggtcgagcatattgtagtcgaggatcgggtgctcgcccttctccgctgccgctcttctctcctcttcattcggcgcgagcgcctcaccggagagcttcagcaggacacgtttgtatttcggcttgacattttcgctcatacgatcaactccattcaaattattgtccgcttcagcgcggactgccttatatatattgtaactcatttcgcccgttttgtaaagtactttcaggaacattttacctttcagccgcactttatattcattcagacgacaagttcatcaaaaacctgtatttacacaaaaatcccgtcataaattttcttgcaatcctaagcttgccgtgaatatgaaaatttatgacaggatcatattcaaaaattactgaccggcggtcatcttcgcgacttcctcagcgagattgtcctcacgcttctggagtccctcgcccttctcgtagcggacgaagctgtcgatggtgatcttgccgccgagagtctttgcgatagaatcgatgtacttctgaacggtcatcgagtcgtccttgacatagagctgctcagcgaggcagtagttctcgtagaacttgccgagcttgccggcgaccatcttctcgatgatctgagcgggcttgttcttgttcttctcgtcgttcgcgatctgggtcatgagaacttccttctcctcatccagagcggactgcggaacgtcagccttgttagcgtaggtagcgttcatagcagcgcactgaagagcgacgttgtgagcgcactcagcgaactcagcgttagccgcgtcgatgccctcgacgttaaacttaacgataacgccgatgtttccgccgccgtgaacgtaagtggagacagcgccgtcaacgatgacgaaacgtctgatgctcagtttctcgccgatgacgaagatctgctccttgagagccgcgtcgacagtctcgtcgccgcccgcgatcttgtcagccagcagcgcgtcgacgtcagccggtctgttagcgaggatggtgtcgagaagagtgtcgacgaacgctctgaacttctcgttcttagcgacgaagtcagactcggagttgacctcgatcatagccgcggagccgtcagcttccttgattgcgacgacgccctcagcggcgattctctctgccttcttagcggcgacctgaagtcctctttcgcggaggacctttatagcctcctccatgttgccctcagcctcgacgagcgccttcttgcactccatcatgccgcagccggtcttggcgcggagagcggcaacgtcttttgcggaaatgtttgccatttgtaattctccttaaagatctgcgcacgccggtaagcccgccgacaggcgagccgcccggaaatgcgtctgcgtttattttatccgattaatcccgcgcgcgaaaaacgcgtgtttgcggggaaagagcaattattcgttgtcttccttctcctcgacggctgcctcttcggtagctgcctcctcggagaactgctcgccctggttgccctcgataacggcgtcggcgatgacggacgagatgagcttgattgcgcggatagcgtcgtcgttacccgggatgatataatcagcgtcgtccgggtcgcagttggtgtcgacgatagcgatgaccggaatgccgagcttcttcgcctcgagaacggcgatgtgctccttgcgcgggtcaacgatgaacacagcgtcaggcagtctgtccatggtcttgataccgccgtagttgcgctcgaggtcgttcatctccttgatgagggaagcgacttccttcttcgggagaagatcgaaggtgccgtcctcctgcatcttttcgagcgagaggagacgatttatagacttcttgatggtcttgaagttggtgagcataccgcccggccatctctcgttgacgtagtacattccgcagcgctcagcctcttccttgatagcgtcagctgcctgcttcttggtgccgacgaagagaacgctgcccttctcggccgcgagatcgcgaacgaacatataagcctcgtcgaacttcttgacggtcttctgaaggtcgatgatatagatgccgtttctttcggtgaagatgtactctgccatcttc

SEQ ID NO: 527 - DNA, 8860 bp, Unknown
  16S sequences of unknown bacteria
aagcccttccagaagctctcgcttctgttcttgacgcgacttttatattatatcacatcttaagccgtttgtcaagtggtttttcaaaaattcttgaaattcttttttcgatgctcttgcgaactctttactgcttcgctctcgctcacagctataatagtataccatacttgccgcgatttgtcaaggggtttttcgaattttttcgaaattatttttcctcatccgttttttaccatatcatatttccaattttccgccggtgttcacgcttcatacacattatccgtccgccgccgtctaataattaacatcattgaaattatgtcgcattgatttatcattcgccatatgatataatgtataatatccgccaccacgcggaaatctgttgaaaggagatatagatatatatgaaaggaaccattccatcaaccaaagatcttttcgacctgagccacacactcgccgccgacctcttccgcgattcggtctgcccgtgggatgtactcgaccggctgaaggaattcataatcagcctcggaagctcgctcgacccggcattattcgaaaactgtggaaacggcgtcttcatagcaaaggacgcgatcatcgcgccgaccgcctatatatgcggtccctgcataatcgattccggagccgaggtgcgccactgtgctttcatacggggttcggcgatcgtaggaaagggcgccgtcgtcggcaactcatgcgagctgaagaactgtgtcctctttgacggtgttcaggtgccgcatttcaattatgtaggcgactcggtcctcggatacaagtcgcacatgggcgcgggagccgtgacgtcaaacgtcaagagcgacaagacaccggtcgtcgtaaagtccggaaccgaacaatgcgagaccggaagaaagaagctcggcgcgatgctcggcgaccacgtcgaggtcggatgcaacagcgttctctgccccggctctgttgtcggaagaaacagcaccgtttaccctctctcgagagtccgcggcgtcatacctgaaaactcaatcttcaagggaccggacagcattgtcacgaaacactgaacgaaaggaagacataattacatgggaagattattcggaaccgacggagttcgcggaatcgcaaacgaagagctgacctgtgagcgcgcgatgcagatcggacgcgccgcggcggaggttctctcgagcggaaggcgctattatccgacggttcttgtcggcatggatacccgtatttcctcggaaatgctcgcgagcgcgctgaccgccggtctctgctcggtaggcgcggacgttattgatctcggggttgtcccgacacccgcggtcgcttatctcgtcggcaaatacaaggctcacgccggagtcatgatctccgcgtcgcacaacccgtacgagttcaacggaatcaagatattcaacgaggacggctacaagctcgaggatgagcttgaggaacgcatagagtcggtcgtgctcgacggaaagccggagccgaagatggcgacgcccgaaaacatcggccgcgtcacacgggcgcagaacgccgtcaaggactacattgatcatctgaagagcaccgctctctattcgctcgacggcatgaatatcgctctcgactgtgcgaacggttcggcgagccgcacggcgaagctgctgttcgagggtctcggcgcgacctgccatatgctgcacgacgagccgaacggcacgaatatcaataataactgcggttcgactcaccttgagagcctccgcgaatatgtcctcgcgaacaaactcgacgccggaatagcgttcgacggcgacgccgacagatgcctctgcatagacgacgagggcaaggatgtcgacggagacatgataatggcgatagctgctctcgacatgaaggcgcgcggcaagctcgggaagaacacagtcgtcggcacgataatgacaaacttcggcttcacgaaattctgcgctgacaacgacatccgtttcgtcgcgacaaaggtcggtgacagatacgtgctcgaggagatgctgcttgaggattactacctcggcggagagcagtccggacacatcatattccgcgatttctcgacgaccggcgacggacagctcacggcggtgcagatactctcgcagctgaagcgcaccggtgagaagctcagcgaggcagcgaaggtcatgacccgttacccgcagttcatcgtcaatattccctgcacatccgaaaagaaggtcgcgttctataccgactacgaggtcaaatcgatcatcgaggacgcgaagaaggagataggcgacagcggaaggctgatcgcgcgtccgtccggtacggagccgctgatccgcgtgatggcggagggcgacgattccgagaagatagagcgtatagcagaggaaacggcggaaaagctcgcgcgccagctcgacagctacaattaaaagagggagactgacatcaggagataagggaaagaaaaatcgaaaaagcacataagcgcccggacatttccataccggaaatgtcgacgaggagaaaaatcatcgaaatattcggcggatgtttttccggcgcggaagcgtcgtcagaccgtaagcaaagcccgcgggcgaccgcggaacaaagggacggtcgggaattccctgaacgcgaggcgttcttgtaaaatacggtttgcggttttacaccgcggctatatcggagctgacagctccgtctgacatgatacagctttccgtaaattattaatttacagaaggatggataacaatatgtgtggaataatcggatatatcggaaaagagaactcagtcgcgcacctcatgaagggtctcgaggcgcttgagtacaggggctacgactccgcgggggtcgcgttcttcgacagagacggcggtcttcactgcgtcaaggcggcgggacggctcagaaatgtcgaggaaaagctcgcgggcgtcccggaaaaggacgactcgcactgcggcatcggacatacgagatgggcgacgcacggcgctccgaccgatatcaactcgcatccgcacagcaccgcgtctctgatgctcgttcataacgggatcatcgagaaccacgcggagctgaaaagcgagctcgccgctctcggctacacgttcgtgagcgacaccgacacagaggtggcggcaaagctgctcgaccactactataaggaggaaatgcgtgaccccgcaaaggcgatagcgagactgatctcgcgcgtcaccggctcatacgccttcggcatcctgttcgccgacgacccggagcatatctgggcggtgcggaaggactcgccgctgataatcgggctcgggaagaccgggaatttcatcgcttcagacataacggcgatactcggctcgacaaaggattactatgagcttgacgagggagaaattgcccgcgtgggtgaaaaagacgtcgtcataacaaaagacggcgcggaagtgaaaaaagaaaagaaaaccgcgacatgggacgtcgaggcggcggagcgcggcggatacgcgcacttcatgctcaaagagatacacgaggagccggaggcgatgtcaaggactctgcgctcacggataaaggacggtctcccctgctttgatggtgacggcgtagatgacagcgttctgaggaatatctcccgtctccatatcgtcgcctgcggaaccgcaatgcacgcgggactcatcgcgaaggtactcatcgagagattcgcccgcataccgaccgttgtcgatatcgcctccgagttcagatacaacaacccgataatcggcgccgacgatctggtcgtgataatctcgcagtcgggagagaccgcggactcgctggcggcgctgaggctcgcgaaggcaaagggcgcgcacacgctcgccgtcgttaacgtgaccggatcgtcgatagcccgtgaggcggacagcgttctctatactctcgcgggaccggagatcgccgtcgcgagcacgaaggcttatacagttcagacgtccctgctctcgcttttcgccgtgaagctcgcgctgctgcgcggcaggatgtcggagtctgacgcgtccgcgttcgtcagagagctgtacgagcgcgccccgaaggctgtggatgagatgatcgcccgcgctgacgagatacgcgcggcggctgaaagaataaagacggcggaggacctgttcttcataggtcgcggcgcggacagctgtcttgccgtcgagggctcgctgaagctcaaggagatctcctatatccacagcgaggcgtacgccgccggtgagctgaagcacgggacgatatccctgatagtccccggcacgccggttgtggcgctctgcaccgtgccggagctccgcgggaagatgcggagcaacatccgtgaggtgaaggcgcgcggcgctatggtcatagcggtgtccgacgctccggtggaggaggctgacctgacgatcgttctgcctgagatcaggtccgagctggcgttccttccggcggtgtcggcgcttcagctgctcgcgtactatacgtcggtcgcgcgcggctgtgacgtcgataagccgagaaatctcgcgaaatcggtgacggtcgaataaatttccggtcataacggcaaaagcggattccggggctcccgtgtatcgggggctccggttttcatatggcagttttgcgctgaaacagctgtccgcgatttgtgcagagtgctgaatattcgtggtgagcggattttttgcggaaaaggtgtttacaaatcgggcgggatgtaatataatattactataacaggttataaggctgtgagcggaaggatgccgggacagcttcgcgacgccggagacggcgcagagatacgcgccccattttaatgggtggtgagagcgcggtgcggggtgagacggcggagtgcgtccgtgagccggtcggatgaaaggcgctgccctcagtccggcacgcgtgccctgcgttatcggggcggagcgtcatgggttccgtaatatcggcgtcggcgctcactgagaacaaattagagtgggaccgcggtatattcgcctttattgtcatacgtttggtgtggcgtaagggctttttgttttcgcggagcggacttgcagaaagggtgaaataaatggaattcaggctgaatatagacctcggagagatcggagagacacttaagaaggctaaagaggagatcgcgacggatatccatgtgatacgcgaccgtgacccggcggctaagagtgatcttgaggttatgctgctttattcggggtttcacgcggtgctggcgtacaggctgtcgcattcgctgtatgagaggaagaagttcttcgcggcgaggatgataagtcagggggcgcgttttctcaccgggatagagattcatccgggagcgaagatcgggcgcgggctgttcattgaccacgggagcggggtggtgatcggcgagacgactgagatcggcgataattgtacgctgtatcagggtgtgacgcttggcggtacaggaaagcatacggggaagcggcatccgacgcttggtaataatgtgatggtgggttcgggcgctaaggtgctgggacctatgaagataggcgacaattcgaagattgcggcgaatgcggtggtgttgtccgagataccggataattcgacggcggtgggcattccggcgcgagttgtgcgccgcaacaatcagaaggtggtcgagtgcgaccttgaccaggttcacattcccgaccctgtggcgcaggagctgtgcaagctgaacctgcgcatagaggcgctcgagaaggcgtcccgcgagaataatcagtaagtataaattccgcctctgtgctccgccttcatacatctgttgtataaagtttggtaaaaggaggggggcgggggagggaaaaaccttttcaaaggtttttccctcccccgcaaacaaacaaataaggagaacaaaaaatgaagctgtataacacacttacaagaacgaaggatgagtttgtcccgcttgacggcaagaccgtgaagatgtacgcgtgcgggccgacggtctataattattttcatataggaaacgcgcgctgcttcgtggtgttcgatatgctgcgcagatatcttgagtggcgcgggtatgacgtgaggttcgtgcagaattttacggatattgacgataagatgattaagcgcgcgaatgaggaggggacttctgtcaaggaggttgctgagcggtatattgcggagtatttcaaggacgcgcaggggcttgggatacgtccggctacggtgcatccgcgggctactgagaatattgatgagataatcagtattgtttcgacgctcattgagaagggacatgcttacccggtaaaggtaaatgatatggggagtgacgtatacttccgcacgctgagtttcaaagagtacggaaagctgtcgcatatgccgattgatgaccttgagaagggcgcgcgtattgacgtgtctgagaagaaggaggacgcgctggattttgcgctctggaaggcggcgaagccgggagagccgtattgggacagcccgtggggcaaggggcgtccgggatggcatattgagtgctcggctatggtgctgagataccttggggagtcgattgatatacattgcggcggacaggatctgatattcccgcatcatgagaatgagatcgcgcagtcggagtgctgcaccgggaagcctttcgctaagtattggctgcataatggttatatcaacgtgaataatacgaagatgtcgaagtcgctcggcaatttcttcactgtgcgcgacgtggcggagaagtacgggtatccggtgatacggttctttatcctgagcgcgcagtaccgcagcccgatcaatttctcggcggaaatcatcgagcagtcgaagagcgcgctggagcgtctctggaattgccttgagaatataggtttctaccttgagaaggcgccagatggacctcagacggctgaggcgaaggcgcagacggacgcgctgcgtgagaagttcgtgtccgagatggacgacgacctgaatacggcgggcggtgtcggagcgatattcgagcttgtgcgtcaggcgaatgagctgatcggcgcgggggcttcaagggctgacgttgaatatgtcggaaataccctgaccgagctttgcgagctcatgggtctgatgcccgaaaaaaattcagccggcgatgaatttattcatgagatcgaggacgcgatcgagagaagagccgccgcgaagaagtcgaaaaattacgccgaggcggacaaaatacgcgcggaattgcttgaaaaaggcgtaattttggaggatacgcctaagggcacaaaatatcgcatcgaaagataaggaattccgtgaattttggctattgcatttttatgcattttggtgtaatatatatgcatcaataatttatgtcttaaggagataaaaagcaatgaaaaaagttctttccctgattatcgcggctgcaatgcttgcggtttgtctcgcatcctgcggcggcaagtccgtcggcgttaaggtcatcgacattgacctcacggctgaggagtacgcttacggcgtcgataaggctcagcctgagcttctcgaaaaggtgaatgcgttcatcgacaagatcatgagcgacggcactttcgacaagatctgcaacaattacttcggcgacggcactccgaatcctgtgacttccgcaaccctcgacgagtcgaaggatcagctcgttgtggcgactaacgcgggctttgagcctttcgagtacacggacggagataagtatgtcggtatcgacatggagatcgcggacctgctcgcaaaggagctcggcgttgagctcgtcatcaacaacatggacttcgacgctgtctgcctctctgtcggtcagcataagtgcgacatcgctatggcgggtctgaccgtgaagccggaccgcgaggagtatgtcactttctcgaagtcctactacaacgcttcccagaagctgattgtcaaggctgacgacaccactttcgacgcatgcaagaccaaggaggatgtcgaggctatcctcgccgctatggattcctccaagaagatcggcgttcagaacggcactaccgctcagttctatgtccagggcgacgctgactggggcttcaccggcttccctgtcacctgcaccggctataagaacggttcgctcgctgttcaggatatcatcaacggcaacattgacttcgtgatcattgactccgcgcctgcggctgcaatcaccgcggcgttcaataagctcgcctgaccgatacacataaaatcgcgctatcccgcctgaaaagcgggatagcttgttaattaagggaatttataaatgtctcaattacttctcgcggtgataacgaatgagagtcttatgcagctttcgttcttccgcaagctcgacaggttccttgacgtcttcataaattcgaacggctatacgcaggtgctgaccggtcttaaaaatacggtcatcatcgcggtgctcggtcttgtcataggaatagtcatcggtacgctgatcgctacggtcagggtcgtgccgaaatataaaacgcttccgagggtgctgaacggcatctgctcagtgtatgtgagtttcttccgcggtacgcctatggtggcgcagctgctgcttttctactatgtcatgctcccgctgatgggggtgaatatgtccggcgtcaaggtgtcggtcatagtgttcggacttaattccggcgcgtatatctctgagataatgcgttccggcatacagtctgtcgacggcgggcagatggaggccgctcggagc

SEQ ID NO: 528 - DNA, 17335 bp, Unknown
  16S sequences of unknown bacteria
catccggcacattatcaaaacaaaacagatccaaaaaaatcccaaaatggcacttgcaatttttcaacggctccatccgaaataccgttccctttttgaccaggtgcgatgtcatcagcggaaaccgagggtcctccacggcattgagcacctcgtatttgtccgaaagctcctctttggccaacgccagaaagcgatcgtaatccttgcgcaaaaagccgatgtcgatgtcgtcatcccacgggatgaacccttggtggcgcaccgcgccgatggccgtgccgcctaccccgaaataatcgatctcatgccgatcgcaaagatcgataaaatcccttaaaatctctagctccgtttcctgtacccgtttgagcacctccggatcataggcttggtataacaatgccctgccccctcactgatttctattcgccctttgccgcgccgccggcctctttttgcacagcagcgtttttttccgcatgaaaataggccgcaccttgtcctaagatgcggttttttgcattataccatctgcctaaaaccgtgtcaaaacaacaaaaacagcctgttaggtatacaggctgtccagttttttcaaatcgctgtaattgtcgatttctatgatatcttcaaacgtacaggggcgcacctgcacctggtaatccttcagatgatattccagcgctacctggtcccagtaccgttcctttccgcccggcatttcatagacctgcttgatatgctcggccagcttggcgccgtcctcgtttgaccaataggacacgccgaacatatgataacagttttgccctccgatcccaagatgcgtgatacgcccttgctttacctcaaagcaccagtcgtccgtccgctccaccggcacgcccaggtaattggaggcatactggtatttggtaatcaggctctgattgtacagcaccagatcggcgtccatcacataggcgttttgcagcaggttacgcacgcataaagccgaagaaatattgttggtttcattatagagcggattttccacaaagcgtatgcccggatatttatacaaaagctgatcgaattgctcgccaaggtatccccgtaccaccacgacctcttcaatgccagcagcatacaccgcatccaacatggtatcgatcatacgcgtgccctttacgcgcaccagcggctttggcgtgttcagcgtcaccggcaccagcctggaaccaaaccctgctgccaaaaatacggcacggcgtacacgatacggttccaatgcctccaaacctttttccgtaatgcccgcctcatccacatatcccagcgcttccaagctcgtcaccgtcttattgatggtccccagcgaaacgccggtatgcttggccagttcgcgctgcgttttcgcgcaccgctctttttccaagcaggttaaaacatcaaattgtctttggttcaaagccattttcttcctccccatcgcgccttgcggccccgtgtcttttcaagccatggatgacgcctttcatcaacaaattcactaccaaaatcaaaagcgagacatacgccgagcattccaacagcatcatcccttcaaactgcgtaatcatcatggaaaccggcatatttttcaccgtactcaaaaacgaaaccgctgagatggtgatcatggagttgacaaagaaataggaaaacatctccagcatggtatcccgggtctgcgggataaacacatctttgatcagccgccaagacgggatgccaatggtctttgccaccgcctctagattcggattgagcttgtgcatcgcattgtaggccatcaaatatggcgaggcaaaaaagtgtatggtgttcaccaaaatcaggatggcgagcgtaccgtacaaaaacgatcccttaaaaaacatcacgtacgataaacccagcacaatgcccggcaccgccagcgtcgcaatagagcccaagtgcagcgagcgcgccaagatgcctttgcttctggcggcaaaataagcgttcagataagcgatcgccgtaccggccgtggccgtcagcacagcgatgatcagcgaattgaccaggtatttccccgtccccatatccatggcctgtgtaatgttgtgcaggctcagcgacatatcgatcggatacttttccacaaacgtcagcagcgcaaaggagacaatgggcaacagcaccagcacaatcgcaacgcccaccagcaccctgcacacaaaatcgcgcttgtggcttttttttatttcaaagcttctgactgtaaaggaagcgctgccgctgtccttgttgaacagatcaaacaaaaacgccaccaccgcgggtaccagcaaaaacagcgccaccaccgcgcccttgccaaaattcatcaagccgattacttcattgtacatatagacgggcagcgtcataaatttaccgcccaccatcagcggcaccccataatcggtaaaaatcaaggtaaaggtggcaaacatgaccgagatcatcggttttctcaggtatggcagtgtgatagacagaaactgcctgattttcgggatacccagtacctgggcggattcatacaccgtataatcctcgtattgaaacacatccagcagcatcaaaaacgccaccgggaacgaatacatcaccgagcctatgacaatgccccaaaagccgtagatgctggtgttgaggcccaaaaggttggtcaagaccccgttggcgccaaacagtacgatgagccccatcccgtgagaaatggagggaatcagcatcggcagcgacagcagctgagataaggccccctttttccccaagccggagcgcgcaatgcaccacgccagcacaagggccagcaccaaggaaaccgccgtggccgtcagcgtcaccagtacggaatttttcagcgattccaaaaattgcctggagcccacaatgctgcccacatctacgctgcctatggaaaacagcaagcatataagcggcgccagcaccgcaatgattaaaaataccaatagcgatgccttgaccaccgccctggccttccatgttcttcttttctgcatcctgcttactccacacagcgtttcagatccgccatcttctgctttaattgcgccaccacaaagctctctacaaaggcgtttttcgggtgatgaaagatctcttgcggcgtgccgatttgctcgatggttccctcgctcatcaccatgatacgatcggacatggtaaacgcctcttcctggtcatgggtgatgtaaatcaccgtcgcctgcgtctttttctgcacatcctttatgacccggcgcagcgccagccggttgctggcgtctaaggcggacaacggctcatcaaacagcagcacatcgggctgcagcgccagcgtgcgcgcaatggccacgcgctgctgctggccgccggacagcttatccggttttttcccgctgtgctcttccatccccacctgcgacaacacttccaacgccctttggcgggaggaagccttaaaatcggggtgcagctttagcgcatattccacattttgcagcgcagtcatattggggaacagcgcatagttttggaagacgatgcccatgccgcgcttggccggctcaaagctggaaatatccacgccatctttgaggatgcgcccgccgttttgctcggtaatcccgatcaggatacgcagcagcgtcgtctttccgcagccggaagatcccagtacagacaagaactcgccctcgtataccgaaaacccgatatgatccaaaatcgtctttttcccgtaggtcttatacaggccttctaccttgatcttttccgtttggtttaatactgccatagcgaaagcaattcttcctttttctgttgatcttcaatgcccgtcatgtctgcgtagggaatatcttgcgggaaattctcaatcacagtattttggtctttgtaaatcttttccggattgaatttctccttatcctcgctgatcagatcgtttatgataaactcaaacacctctttgacggcaggatcttccagccggccttccaccacgccgatgccgtaggtggtatacggggcgccctcttcaaaatagagaatctctaaatttacgcccttgttgatctcctgcacggcctggtatgtcattccaaggccaatggcggcctctccttgtaccacggcactgaccgggccagagccggaagaggtaaactgcaagatgttttccgatagcttatcaaagtacgccagcgcctgctcctgccccattacattgaccagattcagtaggaaggtataccccgtgccggaggattttgggctgggcatagagatcagccctttatactgaggatccagcagatcctgatagctcttaggtgtcggcagccctttatccgccaaaatttccgggttgattacaatggcgctgcttacgcgctcaaagactaaatatttatggtctttatctaccagctccggcatatagcgcgacgtatcgtatgcggacagatccgccaacatatccttcaaagattccagatagccgctttccagctccatgacaatgtccgcttccgtctgcgtgccttcgctctttagtttggacgcattattgcccgtcggtaaatactgcatcacaatatcatagttgggaaactgttcgttgagcctcttgacaaaatatgcattgctttcctcatcatcgctggtataaatgacgaccctgttgctggccgccgtatccccgccgccacagccaaccaggcccagcatcatacaggcgcaaagcatcatcgctacgattttcttcattgttttcctccccatcgttcattttgtttggttattatgtcctttttcaaacgtactgttttcccattgctttttatacgtaaattttggccaaattcagaaagtatactttttgtttttggcgcaatattagtataaatagcgaattttcttggtttttccgcagtttttctcaaattgatatcgtgttctatatgcttgtaaaagtatactatcttgaacatgtcttggcaatacataaacccatttttctttttgccctttggcaaaacgtcgggaaacggccgttgcagggcacaaaattgttggtcaaaatggcaatgagccgttctcgcggagaatcgatgatgcggcaccccacaatgccggctgcgttgcacccaaaccccatgcacatggtaagcgcctgtttgccgcaggcccggcatttttgaaaatgcttatccaggttgaacgccaccctgggcaaatagcccagatcctccagcagggtaaagagcggaaaaaagatggccatgggcggcagcattaccgataccacccacgccagcacccggtatacgcccagcaccagcgccccatgcagccaggccggcgcatgaaggtacacaaacagatccgtcaggcggtcctgtacccaaaacaaaccacggctcaacagctctgacggatagtttgcccctgtgatggtaatccaaaatacggcggccagcagggccagcatgatgggaattcccgtccatttactggtaagaatgcgatctatttttagctgtttttcgttgtatttcggctcctccaagcgtactacgtcgcggcagactgcctccgcttttttatacaagcaggatacgatggcatccctcagcggcccttccgccagcccttgctcggccagatgcgccctggcctgcaagaccgcgtttgccacctcctctgtctgcattagatcctgccccagcgcgttttgcagcgcctccatcagggacgcatcgtagtcgatgagccgcagcgccatccacctggccggaaaccgcccctttagatggagcgccagcaccggctccaccagggaaatggcctgctcgatggcatcgctgtacatcacctgggcaggggccgcggccgcggagcctggcctcgtgatgtcctctacgcgatccatcaatgcgcccaagccccgtccgctgcgcgcgctggttcctaccaccggtacgcccagatttttttccagcgcagtcaaatctacgtggatttttttcttttccgcctcatccaataggttgacgcaaactaccaccctaggtgtaatttctatggtttgcagcaccaaattgatattgcgttccaggcaggtagcatcgcaaacgacgaccacggcatccggcccgccaaagcataggaaatcgcgcgccacttcctcctctgccgaatgcgccatcagcgaataagtgcccggaatatccaccagcacataggaggcgccgttgtgctgcgtgcgtccctgggcattggttaccgttttgcccggccagttgccggtatgctggttcatccctgtcagctcgttaaagaccgtgcttttgcctacgttgggattgcccgccagcgccacaaccttttcctccgggctcagtttttcaatgaccaggccgctatccgctgcgctgcgcccggtcgaatcggatgtaagtcccatatatttctccttctttatttatgtcgttgcggccgtggttgcccttttcggcgtttccgccggctcttttagcgctgcaaacacacgtacccggtccgcatcccggcgcctgagcgccaccaccgtgccgcgcactaaaaaggccgtggggtctccggaagggctgctgtataaacagcgaatctccgtgccctcgatcaaccccatatccaggagcctgcgccggatgctgccgttggataaaagcctgtgcaccgttgccgtcatcccctgccgcacttgggacagggccatctcttttgtagtcatcttttccatactccttttcatccgtagggtgaggaacgacattgttccctatccatacactatgccgacgcccctgcggccgtgtgatacaaacgcataaaaaaaagaacctgttttaggctcttttcccagcaaagattctatgcttttgtcaactctatggcctgcttgcccgtcatatgctccactgtaaatgccaacatgcatagcggcgcgtactccctatctatgactgctttccgatgcgccggggtgtccataggatggtatttttgggacagctgctcgatggcacgcctcttttcttcctcgctttccaagatgcgcaccctgccaaaagcaatcgcgctgcgataataggttgtatacgcctccggtttaatttcatcgcgatccaccacgcaaaaggaagccttttcacaacggcggatactctccagcttgtggcccactttggcacagtgaaaataaagaatgccttgggtatatacatagctgagtggcacagcatagggatacccttctgcccccgccaacgccaacacgcccgaggtgccgcggcgcaaaatttcctccgtttcctgccaggacaacgcctgccggcttcgtctcatcacttgaaacatcgtttccacccctcatcattcgtcccaaagcacgatacggccctgcgccctagtccggttcaaatcgatcaggcgctggtttttagagccgcgaaagcgcagcgaaatatccttttgggcgatgataaaccggccgtccaccagcacatccagcaaagacagcatctcctccgtctctgcgcaatgcgcatagctgcccggcgttgtcagctcctccagcgtaaagccagaaaaggaccagatggtcttttgcggatactgcgcgcgtacccggcgcaaaaacggcagcagcgcacgctggttctccggctcaaacggctcgccgcccaacagcgtcagcccgtcaatataggaaggggccagcagcgaaagcagcgtttcctctgtttgccgggtaaatggcttcccgtatgtaaaatcccaggtttcgggctgaaagcactgttcgcagtggttggtgcaccccgaaacgaacagcgatacacgcacgcctacgccgttggcaatgtcgcagtttttaatctccccgtaatacatccgcgtctcctttccgcaaaaacagggcaccttgactagatgccctgtttcccctccgctttgtgcttacagatgcagcacgcgctctttgatctcctgtgtgcgcccctggttccagaactgcgtaccaatgtatccgcaggtccggcgcgccacattcatcttatcctggtcttcattgccgcaccgcggacagtgccaaaccagcttgccatccttttcaatgatctggatttcgccgtcccagccacagacttggcagtaatcgctcttggtattgagctcggcatacatgatattgtcatagataaaccgaatgacattcatcaccgccgccaggttttgctgcatattcggcacctcgatatagctgatggcgccgcccggcgatagcgcctggaacttggcctccagcgccaatttatcaaacgcgttgatgggctctgttacatgcacatgatagctgtttgtgatatatcccttatccgttacaccctttacgctgccaaaccgcttttgtaggcacttggcaaacttatacgtcgtgctttccagcggcgtgccatacaggctgtaatcgatgttttccgcctttttccatttggcggtgtattcgttgagcttgcgcataatttccagcccaaaggcctcgccatccggctctgtcagctttttgccagtcatgctgtatacgcattcccacaggcccgcatagcccagcgaaatggtggaatacccgccgtgcagcagcttgtcgatcttttcgccctttttcaaacgggccagcgcgccatactgccacaaaatcggcgccacatctgacaccgtgccggtcaggcgctcatgcctgcattgcagcgcacgatggcaaagctccatccgctcgtcaaagatctcccagaatttgtccatatccttgccggcggaaaggccgatgtccacgaggttgaccgtgacgaccccctggttaaagcggccgtagtatttcggcttgccgttttcatcgacatagggcgtcaaaaagctgcggcaccccatgcaggtatagcattgcccatcgccgttttggtctaccttgagctgcttcatgatcttttcggaaatataatccggcaccatgcgcttggccgtgcacctggccgccagctctgttagataatagtagggcgcttcgggagaaacattgtcctcttccaagacatacaccagcttggggaacgcgggggttacccagacacccttttcgtttttcacgccctggtagcgctgagacagtacctcttcgatgaccatcgccaaatcgcgcttttcctgctcgtttttggcctcgttcaaatacataaagaccgtcacgaacggcgcctggccgttggtggtcatcagcgtgaccacctggtattggatggtctgcacgccgcggcgcacctcttcgcgcagccgctgctctaccagcgcatggattttatccaccgacagctccacgccgatggtcttgctttcctgcaagacctgctggcgaattttttcacggcttacctgcacaaacggcgccaggtgcgccagcgagatagactgcccgccatactggttgctcgccacctgcgcgatgatctgcgtggcgatgttgcaggccgtggaaaagctgtgcgggcgctcgatgagcgtgccggtgatgacggtgccgttttgcagcatatcctccaagtctaccaaatcgcagttgtgcatgtgctgggcatagtagtccgcatcatggaaatggatgatgccctcgttgtgtgcctctacgatgtccttcggcaacaaaaggcggtttgtaatatcacgggaaacctcgcccgccatatagtcgcgctgggtggagtttaccaccgggtttttgttggcgttttcctgcttggcctcctcgttgttgcattcgatcaggctcaggatcttatcgtccgtcgtgttggactggcgtaccagcgtgcgggtataccgatatgtgatataggattttgcaacctcaaacgcgccgtgcgccatgatctgcttttccaccatatcctgtacctcttccacgctgggggatcttcccagcttttcacaggacaatacaacgctttctgcaatgcgctgtatctgcatgggggtcatgcgttcattttcgcccaccgtcttgttggctttgctgatggcaatgatgatcttatcaatatcaaaggccacttccgatccgttgcgtttgatgattttcatttcgctatcctttccgtcttcccaaggcccacgccccagttcaacctatatatagtatcctttgcacaagcataatagcatatctagtagtatgagtcaatgcactttgtcctcttttcctctcttattttatccagttttgcgatggtatctccgttttttatccctgcccaaacacccgtttttccaggaaacgcccaggggtttcgccatttttcggccccttagatacaaaaaagagggcgtaaaatacgtcctctttttcttttttataggatggcgccttaggcccgtttttgctttcggcaaacggcaaggcccaggccggaaatagccaacagcaggcagaagaagagtgaccggccgctgtccatcgtcttgggcgaaagcgcctgctcatcggcctgcgcatacgccaacgcatacaacccgctgtggtgtgcctcaaaggggactgcctttgcaggtgcacaatcggtacgcgccgtgccatcctgcccagcaaagagcaccgcatactgcgcatggccctgccaatcctgcggcagtacgacggtgactttcaacggctgccggaaagcgtctaccgttcggcgctggccgccgacctccgtctgcacctccatccgccaggccaccgccatcgtttcttcctgcgccaataggccctccagcgttttcaggtccgatgcctgttctgtggccgttagcttaatcaggatcgtgccatcctcgccgccggccacgcgctccgtttcttcctcggtcagcaccacctgcaaaatctcttcctctgccggccactgcatttcgggcagattttcatccttttgcaccgtgattgtgatccggccgggccgcacatacggcgcaagaggcccttcaaactggtatacattgtatccgcccgcctggtaccggctgtatgcgatgagcgcgcggaagccctgctctgtggcataggcattggcctccgcgttgctgtcatagccgaattgcaggtcttctgttacaaagcccagcaagttggaaagcacgctgttgccgtttttcacaaaccgcgcatccgaccccgcatcgatgcccagcgccgtcagcgcaatgacgacggtggccgcgtcgttgctgttttccacgccgtcatacccatagccgccgccggcggtttgcagggcggataggcactctatcccctcttgcacagctgcctccacggccgggtcgtcgcggtacggcgccagcgcgctcagcaccatcgccgtcatgcttgcctcggatacgtcgccgtagtatgcccagccgccgtccgcgttctggtgtgccagcaggtatgccacggcgacctgccgggtgttggccgcatcttgcggcagggaatactgcccagcatcgtatgccagcagtgcaaagatttgggcgtttacgctgtccatcttttcgctgggcagctgcgcaatggcgtctatcagctcggaagcgtctacgcccagcgccgtcatcatcagcgccacgcgctcatggtcagtggcattgccgggacggatgttttccatcgcctttgcgataaagcggtttttcgcacctgcggaggcaaaaacattgtccttgcccgcatacgccgccaggtcaaacgccacccaatcggactgcgaatcctcatacgcggggctggcatagtgatgttgcaggctttgcagcaattcctccaaggaaacttccgtctgtgcaccctggatattaaccttgaccgtcttgctgtatgcctgcccattttgcacaaacagcagcaccaccgattccgtgactttgccgagcttatcgttgcgctgcgccagcgtatagcggttgtccggcgcatcgctgacgatgtatgtgttttcctcccgttcacgatactgcacggcaatggcgctgtccgccgcttggcccggctttagctgcgccaccaggtctgtcacatccgtctgcgctgccacggtattgggaatggttatctcgtcctggtatttggccgcctccaaaatcagcgcctcggccgtggcctgctgctgggcaatagcatccagcatctccttgagctttacaaacgactctgtctgggatacgccgatagcagcggctgcctgatcgctgttttcatcccgtcccggcaggtaattgcccagcggtttgatggttgttcctaggctggtctcgcagttggcaaagcagtgtttcagcgtcacaaaatcctcgttgaaggaagcgagtgtgccttcaaaatagccggcaaacccgccgttatagctccagcccggcgtcagcgtgccagtgctgatacagttttccgccgtgccggtgatagaccccgcaaacccgccaaagtatgcgccgctgtgcgggctaacggcaataacgttgcccgtggcatagcagtttttcagcgtgctgccgattccgctgctgcccacaaagccgcctgcagtatacccggccgtcacagcccctatggcgtgcgaattatagatgctgccatagttgctgcctgcaaagccgccggtggtgttgccgccgtctacgctgccctctgccaggcagtttgtgatcatgcctttattccagcctacaaagccgccgacatggccggattccgcccggtcggccgagccggtattggcaatcaccgttacatgcgccgaagagccgtctatggcgctgtatatgctctgcccggtctggccatccgtatttccatcgttgatgcccaccagcccgcctgcatccgtctgtttgattaccgccgtgcccatggccgtcaccgtacccgtggcatggcagttggcgatgaggttggccttgccgccagccacatccgccagcgccgcacctaccagcgtgccgatgcggcttccgcccgtgatgcgcgcgttttccagcgtcaaatttacgatctccgcacccttaatacagccgaacaagccaaggttctggcttgctgcgccgcgctctatcgacaggttggaaagggtcttcccattgccttcaaaccgcccggtaaacggaatttcttcgctgccgatgggcgtaaaatccacgctgcttaagtctatatccgccatcaaacggtagtttttcgcccaatcctgggccgggttctggctgtttgccagcgccaagagctgctcttttgtatagatttcctcgtattccgctttctctggcgtcgtcatctccgcccaggagggggctaaaaagtggttcaaagcggttccctcataccaaaggatcttatctcccggcgttacctgggccgcctccatcccaacgctggagggtttgtcgttgatggtaaacatccagccgttgggcgattgcggcgcggtgccgttaatttccgtcacaaacgcgccggtcttgctctgttccgccttgtaggaaatcaatccctgcgcctgggcggcgtccagcacgtccttaaccgtgacagggtcgcccgcaacctgcacctgcatagcctggcctggctggaacgcatagccttcataatcatatggggcaatgagcaggccgacctctattgtttcctcgctgggggcggacggcgccggcgccgcctgtgttaggtaggggtatccattgttgatgatggcctgcccctgcaaggtatccaccgaccaagcgtcgcccaatagcgcagcaaacgcctgggttttcatctcgccggtggtcttgcccgttgcgccttcgagcgtcatgctttccgtctggggcgctgttttgtatagattgtagtaacagtttaccgccgtaccgtccccgtctttggcaacggtttggttgctgcccgccagcgggccgcccacctgcgcctttacgtcgttggcggcatatacagtttgtagcacgctggggttgctgctgtcataggtgatgaaaaagcctgtaaatccgccggctgcatcgccggtagccgtcacggtgcccagggcatagcagtttgagatggtgccgccctcctggccgccggcaaacccgccgacccatttggcgccggaaacagaagctgtggcaaagcactggtcgatgcgccccaggttgcggccgacaaacccgccgatcttggtgctgtatgcgcttttgcaagccacgctgccgccttccacgccacagtggctgatccagccttcattcagccccgccagcccaccggtgcaggcgttatattgcgagaccaccgcgctgttttgtacaaagcaatgatctataacgcccttgttgcgcgataccagcgccgcgggcgtttggctatcgctctttgtatattcaatggaggcgtcctccagcgtcaagttgcgcaccacgcccgtttcccccacataggagaacagcgcctcccctgataacgaaaggtgcttgatgctgtatccattgccgtcgaaaatgccggtaaagggcatagcgtcgctgccggtggtgtatttgccgatggccttgcccgccacgcccgtcatgtcgatatcgcctgccagcctataattttggctcaggtccgtgtccttttccgccagggccagcagctcctccggcgtttggatgaggatatagccctcctcatcgcggtttacaaaggtgtaaacggggctttgcgcggataccttgctatccgcagtttccgcgccgtcgcccatggcctgcaccgtcacatagtaatcgccgctctgcacgatgatctgcgtaaaatcatagcggggctccgttacgttttcatatgtccctaccagcgcaccgccgcccgtcatctgccggtacaggcgcacggtatagccggccgcctgcggcaccgccgtccaggatactgacgccttgtcccaggccaggccggatggcgtcgccagctgcactgggccggaaggcccgccgccgtttgccggcgcttttacgttttttaagtacgggtagccgttgttgcgggtttcgtctgccgtccacgcgctgcccaacaggggcgccgcctgccggagctcctccggcgattggccggtaaacttgctgctttgcgtcttttccgtgccattgcccgtcacagaggaggtcgtcaaataatagcagttgctcgcgcttgggaagccatccccataaaagcggccaaagtagttgttcgcgcctgttgacgttacatccccggtggcatagcatgcgctgatggtacaggacagctcgccggcaaagccgccgacgtatttgtcggccgtcaccgcgcccgtagcaaagcaattctccagcgttccgctataggcgcgccctgcaaagccgcccgctttttcgccggcagacacaacgtccgccgtgctgtaacaagcctgtattttgctggaggacgcggcgcttgcgcccacaaagcccccaatggccgctcctttgcccttggccccttcgtaagctgtcgtgccgccctccacatagcattgcgcaatgcttccgttgcgattgttgctgcctacaaagccgccagtatagcccatcgtagcggcgctggttttcagcgttacggcattgtgcgccgccgcgcaatccgcaatgctgccttcgttggttcctacaacgccgcctacggattgatagcgggccgttacggtgctgtttttcaccgtacaatgctggatctcgcccttgttgtagcctaccaagccgccgatgcccttggcatacgtctcgttggtgtccgtgatcgtgcatccatccagcgtcagatgctgcaccttgccgtttagctgcccaaacaagcctgtatacccgctgtcgctctggatggtcaggttggatacggtatggccagcgccgtcaaacgtgccggtatacggagcgctctgatcccccaagggctgagccgttcgccccgccatatccaccgacgtggtaagccgcagattctgatctgcatatgtggcaggatcggccagcacggcggcaaaatcgtccgcgctttggatgagcaccgtgcctgtctcgtccgtttgcagcgctgcctgtgcctgccgcggcgccagggccttaggcgtatcggccggcgcttggctcttctccggtgtttgtgttggctttacatcaacgcttgcccgcggcgtttcagccggctgcgtctgcgttgccgtcggctgtgcctcattttcgccctgcgccaacgccaagagcggcgtttgcagcgttgtcaacagcatgcacagcgccaaacaccaggatgcgcacctgtttcgtttgcgtttcatgtgtctcctccttttcccgctttccccataagaaaagcgccgtttggccccggctatatggagcaaacgacgcattttggcatacgaaaaagagcagaccacccttttgacgacacaaaaagcaccccgtccccccttgcccaggacccggcttacacgctatggcaggtctcctgactcatgctttgcccttaaaagcgccttctcgggcaagctctcttgcccaatggccgttgctttcttgtaagcatttacagtaatggctgttgtgcaggcttttcacctgcttcccttttcagaggtttccctccaccatagatgtttgtcgtgttcagtgtaatacgcacgcggcgtggcgtcaatgttttccataaaaaaaggccggttccccggccttcaagcgtcgatttatttttgcctgcccgccatattttttatcagctcaaaagcgccggtggccgccagcccgctggcaagcccgcccaacagaatctgcggcgtaaagacccagccgctgacccagatattgagcacaatgcccagcgcgcccatgatgagcggaatccatttgttatccagcggtagaaagtgcttgatgatatagcccaccgccaggcagattgtcatgacgatgaccacaacatattccgacaatgcttccatgctgttttcctcctgtaaagagtcttccactttaccttatgcaacgccgtccctttccgttcacacggctgcattgcacaaaagaaaaatcagcgctcaggtaggtaccgtcaaagctgacaggctggcaaaaatgcacggccggctcggcggcatagctgtaatccttcaccgttttcacgttttccgccatcgtttcgttg

SEQ ID NO: 529 - DNA, 32759 bp, Unknown
  16S sequences of unknown bacteria
tcttgctttccttgctctgtatcgttttcaaggttcgttgctctcaagcgagcttatctatactaccacagttccgaattcgtgtcaacaccttttttcaatttttttgattctttttcatcccggatcttttccccttttatccaatgggattccgccgatgaacgcggtgtaaattcactttttacgtgctgcttcccttcccgttttatggtatactgagtctgtatattcttttgcattcatatgccgaatcagggcgaacgatttttcgcccgctcgacaccattcccgcaaacctgtcatggcagcctgtcccatccgcgaggtatgataaggacaagcccgccgcgacagccgcatgccgccccgggcggcagaacaggagtatccccttggccaaggaaaaaacctgctatgtctgcgcttcctgcgggtatgagaccgcgcgttggctgggctgctgcccggactgcggcgagtggaatacctttgaggaacgcaaaacggtctccccgatctccgttgccagcaagaccgccgaaaaggcggcccggtatcagaccacccaaaaaaccgaacccattccactgagcaaggtacaggaacgttccatgccccggtcctccacaggcaatgaggagctggaccgtgtgctgggaggcggtctggtgccaggcagcgccattctcatcggcggcgatccgggcatcggcaaaagcacgctgcttttgcaggtggccggaagtctcagccagcagtgccgcgtgctctatgtcagcggcgaagaaagcgctcatcagatcaaaatgcgcgcgtcgcgcatcggcgtgccgcaggatacgctctacgtgctcacggaaaacgacgtggaaagcgtgctggagaaatgcggccgtctgcagcccgacgtgctcatcatcgactccatccagaccatggtctcccaggacagcgccagcgccccgggcagtgtgtcgcaggtgcggcaaagcgcgggcgcgattgtgcgctttgccaaggaaacgggcacctcggtattcatcgtgggccacgtgaccaaggaaggcagccttgcggggccgcgcgttctggagcacatggtggacgcggtgctctactttgaaggcgaccgccagcacgagtaccggcttctgcgtgccgtaaagaaccgcttcggttcggtcaacgaactgggcgtgtttgaaatgcgcgccgaggggatggtccccgtaaccaatcccagcgaaagcctgctcagccagcgcgcccgcggtatcagcggcagcgtggtgctgtgtacgcttcagggcagccgtcccatcctgtgcgacctgcaggctctggcgtcccggtcgttctacaccgttcccaagcgcacggtgggcggcatggattccggccgcgtggcgctgcttctggcggtcatggaaaagcgcgccggcaaaaagctgttcgatcaggacgtgtacatcaacgtggcgggcggactggccctgagtgatcccgcggccgatctggccgtgtgcgtggccgtggcctccagcctgatgggctttaccctttctcctacgctcagcgtcatgggcgaagtgggcctctgcggcgaggtccgtcccgtggcgcaggccgagcggcgcgtggccgaatgcgtgcgcctggggttcacggatatcctgttgccccggcagaatctcaagcgcctccgtcccatcgacggggtacgaatgacgggcgtggacacgctgatgcaggccctcgccgtagtaggctgatctttttctacattattagtgagaagcagaaggcaggttgtaaagcattatgaagaacaaaaccgtggagaagctgatgcgctttctcatcacgctccttggcgcgggcatcggagccgcgctggcagcgctgattttaccgctgttttcccgctggtatccgatcgaatccccctatgcgcctatcgcgctgtatgcggctctgtgcctggtcggcgccgccgtgtgctttgccttttccagtgccatcatcggccgcaccatgaagctgatcgcggccatcgagcggcgatgggacgcgatgcctacccagcagatcgtgctgacgtccatcgggatgatcatggggctggtggtagcggccctgatcacgcagctcatcctttcggcaggcgcgagcctgattaccatcagcttcagcgccctgacctatgtggtgcttggttatgtgggacttcggatcggctttcaccgctatcgcggcggcaaaaccccgcgcatgcgccgtcacctgcgccgcgccgccgaggccggtattctggatgatgcggacctgctcatgaccgaagagggggaagatgaggaagaaggcgaagcaattccagccgcccggccttcccgcaagtacctggacacatcggtcatcatcgacgggcgggtgctggatatcgtcaagaccggctttctggagggcgatatcgtggtgccgcagtttgtattggcggaactgcgccatatcgccgacagcggcgacagcctgcgccgcgcgcggggccgccggggtctggatgtgctggccaagctgcaaaaggagctgaaaacacccatcatcgtggacgagaccgactaccccgacctggaggaggtggacgtcaagctcctgcggctgtgtcgggacaatggcggcaccgtggtcaccaacgactacaacctcaataaggtcgcgggcgtgaccggcctgcgcgttttgaacatcaacgacctggccaacgccctcaagcccatgctcatggccggcgaggaactgaccgtgcagatcgtgcgcgaaggcaaggagccgggccagggggtcgcttacctggacgacggcaccatgatcgtggtggaaaacggccgccgttatgtgggcgaaaccgtaaccgccgtggtcaccaccgtgcttcagaccagcgccggacgcatgatcttcacccggctcaagccggcggatgaaaaagccggctgaatcccttcctgaacattcaaaaccgcccggaggcactgttgcctccgggcgatcgtcgttcattctcccataggggcgcagccgcccaaaagctcgggacggaagcgcaggctgtccttctccgtgatctgacggatcacgcggcagggcacgcccgccgccagcgagaagggcgggatgtcgcgcgtgaccacgctccccgcgccgatcacgcatccgtccccgatcgtcactccgccggtcaccaccacattggcgcccagccatacatcgttgccgatcaccacaggtctggcgtagcacagatgtgcagcctgcccgtccgggccgagcatccgcctgcgctcgtcaggcagcagcgggtgtacgggcgtgacgatggtcacgttggggccgcagtttacatcatccccgatggtcacgcgcgcgtcgtcctggatggtcaggttgaagtttccaaagaaccgcttgccgatggtcgtatgcgtgccgtaatggaactgcaccggcccctggatgaatccatcctcgcccatggcgcccacaatctgcgcaagcagcgccgctcgggtttccacctcatcctcaaaggtctgattgtagcgctggcacagattgtgcgtgcgcagcttgatctcccgcaattcctgcgctccgggccggaacagcagcccctgaaagatgcgctcctcttccgtcatcacaaaccgcctcctgtctgccgccattgtaacagaggtgagaccgggtttcaagaggcgggctgcaggcggatggcctcacgtgtgcagaccgtttccaggaagcgtgcgtcgtgttccaccaccaacaacgtgggcgcatagcgcaggatgagattttcaacctgccgtcggctcaaaacgtcaatataattaagtggctcatcccatagatagagatgtgcaggcgtacacaggcttctggccagcaatagtttctttttctgtccctggctcaattcgctcaggtcctgatcaaagtgttcccggctcatatccatattgcgcagaatcgctttgaacagtgtttcatccagcccatttcgctggataaaatcccgcatgccgccgcacagtccctccgcctcctgcggcacataggacacgaccagcccggacgcaaggctcaccttgccttccagcgccccgcccgcgccgcacagggctctgagtacgctgctcttgcccgcgccgttgggcccggtcagcgccacgcggtcccctcggcggatgtcaaagcgtagcccctcgcacacgacgcgtccatcatagcgtaccacgccctcctccacgcgcaccagtgtttctttgggatggcgcagcactgtcagccgcagttctcccacgcgctccacgttatgaagcaggccgcgcctttcctccacggcacgctcacggcggcgctgcgtattggcggatcgtttcatcagggcggcgctccgcgcgcccacatagcctcggtccaccgccgccgtttcgctgggtgcaacatggaactttcccttttcgcagcggtcactccatcgtgcagcacggcgtgcgcttgcctccagccgtacgatatcgcgcttaaggtcctcgttgcgcgcttcctcccaggcattctgttgatcgaagcgttcctgccaagcatcataatcaccctgcattacccaggcatcacttcgattcagcgccagcacatgatcgacacagctgttaaggaaggcgcggtcgtggctcaccagtaaaaagccatccttgcgcctgagatagcgtgccaccagctcacgtccatgtacatccaagtgattggtcggctcatcaatcaaaggataggcgtcctcccgcgcaaacagcgcactgagcagcgccttggtttgctcgcccttgctgagtgtcccaaagggacggtccagcgcttcttccgttacgcccagcagtttccattcccgcaggatgcgccattcctctgctcccggggccgcccgccgcagcacctccagagccggcaatgaggcatccgaaacctcatagggaaagtataccgcctccagcggcaggtcaatcgcgccttcaaagggcatgcaccccatcatcaggcgcagcagcgtggttttgccgcgcccgttgcggccgatcacccccagccgccagccggtatccagattcaggttcagatgttcaaacacgggctcgccgcccgggtaggcaaaggtgagatctcggatagacagctgcatgcacgtttctcctttccgacagggaaagggcaaaaaagcgcagcaaaaaaggagccttccggctgcgcccgtctgccatggcaaagctgtccccgcgcatgcgcaggaacccgcttgctccttccccgtcccatccacatgagcgaggttccggcagacttatttgcgcatcctttcagctcccttttcaatcagatactggcattataccatgccgcggcttaagtgtcaaaacgcattggtggtggtcagcaggtagtgcaggtaatacaccgacgaataggcatgccacaaaaacaggccgcccaccgcggcatagcccagtccgcggacgaagcgcagcgcgcccgaccgcgcatcctgcgtgaacgtgcgaaggaacacgcccgtcatcaccacccacaggaaaaacgagctgctgttggccgcccaggtgaaattgccgtgtccctcccgcatgcccgtctcgcggaaagccatggcctccagcacgctgaaggcggtcatcagcagcgccagcaccaccagccggtccttgaacatgcctttgcggtagcagacgatcacggccatgaggggacaggcggacatcatcagcgtattgcgcacggctacccaggccgtttccaccgtgatgccgacctccaccccgctggtgaattccaccaccacgcccgtataatacaggtagctcagcaggaaatagcccaccgacggcaaaaacgccagcacgatctgcccgaaatagcgccattccttcttgtggcggaacacctccaccaggtacatgacgaacgcagcgggcagcagcgcctgcatgaacgtgggcttacaggccacgctgcccatgcacaaaaccgccagcaccacgatcttccaccagggcagaagcacgcgctgctttccggcctccacctgccttgcaaactcgtaccagcagtgcgcaagccacggcatcaccagcatcatggcggcggtcacggtctgctgggtggggttgtgccacacattgggcgacccaacgccgcgatatactgcgtcggacacggacatgaccagcacgcccgtcacgatcatcagaaacgcgctcagccccagcactgccccgcggttggcccgctcgcccgccatggcgcccaccagccagtaggtcagcaggaaggtgaccgccttgcacagcgcgcacacgcccgcagcagcatggcccagcggcacgcccagttggtagagcgcgctgaccacgatgtgccatacgggataggacaggcggctggtgatggagtgcaggtcggtaaagtcaaaatcatgcgcgatcatcgcgtggatataaaggtccgcgttctgataggcaaattcccgcagaaacatgaaataggagcccgcaaacaccagcgccagcacaatcagcgccggcgcgttgaaggcgcgccccttccagatcgttttcccggatgccacggggtcatgcgtcattggcagaatctccttctctggggcccgtatgctcacgcttgcgtgtggcaaaggcggccttctcggtcgggttggtcatcccctggcggtatagcggcgctgcttgatgcggtccagccccttctggcccagcagccgccgcgcggcattgaacagcttctgctgcgagaagtacgcgtcgtccggcgtgggaggcgcctccagaatgcgctgccatgtggccggatcaatgtccagcttcttgaggatatagctctcatcctccttttgctgctcaaggggatagggcggcctggccagctctgcaagcgcctcctcgcgggtcatctcgccgttgaggatcagacagctcagatgcgcgcggcgcttgtcgtagccaaacttgcggggcagatatacgctttgaaagtacttggtaaaccggctttcaaagtgcttaccgccgtaatactcccaatcaaactcgcgcgacagggtttcgatggcttccttcttgctgtagggcacgtagttgagcaggttgattttcgtgacgcccggcaggcccatccacgcttcccacagcgacagggcaggatattttttcaggctcttgccccggccgtgcttgcggtagatgctcttgaggtgccaggcgtcgcgataggtatgctgcaggctgaagggtgcgtccgccccttcggtggcgatgttgcttccattcagaatgtatttgacccgatacttgcgtgccatctggtaaatggccgcgcagaacaggtggtcctgcggcacgtccaggttggccacgccgctgagcaggtaggcacgctgcagctccttcatcgtgggccagtccattacataggtatgcaggcgcacatccagcttctggcacatcttttcaatgttgctcacggccatttcgctgttccatccgctgtccacatgcacggccagcacgcgcagccccagcttgttcgccagatagagcatgtaggcgctgtccaccccgcccgagaggcccaggatgcaatcatattcccggtcgcggccgcgctccttcatcacccgcacggtgcgttccagctcccgctcgctctcgccggggcggtagccgccgtgcgcgcgcacctcctcatagcgcttgcagaaggagcagacgcccgactcgtcaaatgtgatcgccggatctgtcgaatccatcacacagcgcgtgcaaaccttgtcttcccgcggcatatccgcaccctcccggcaaattttcatcttatgtatcatatcattccgggcagggggtgtcaattccggttcggccagccgttcttttgtcggaatcttagcggccaaattatccgtccgcttcgcttgcctatttacacaagatatgatttatgctacaataacaaggcgagatatggtgcgtttgtgaataacccaatctcggaccatccgtcggcggtgcagccggcgatgagtaaaaatcaaacaaggaggaacccagtccatgaaaaagctcctggcgacccttttagccctcttgatgctgtgcggcatttccggcgcagtggcggaaaatgccgacattaccggcaaagttatcatctacacctccatgtatcaggacatctgcgacatgatgagcgaagcgctcaaggcccagttccccaacgccgaaatcgaattcttccagggcggcacgggcaccctgcagaccaaggtcgccggcgagatggaaagcggcaagctgggctgcgatatgctgatggtcgccgagcccgcctactcgctggagctcaaggaaggcggctggctgcatccctatgtgaccgaagcgcgcaacaaccttcgctttgactacgacgaggaaggctactggtaccccgtgcgcgtgtgcaccatgggctttgcctacaatcccgaaatgtactccaaggaggagatccccacctcctacgaggctttcgccaatgattctcagtaccagaacaccctgtccatgtccgacccgctgaccagcggcaccgccatggcgaccatcgcgggcctgctggacaagttcggcgaggactactttgtggctctgggcaatcagaacgtgatgatcgagagcggctcctccgcgcttgccaagctggaaaccggcgagtgctcggtggttatgatccttgaggagagcgtgctcaaaaagcgcgaggaggaaggctccaccctggagtggttcatccccgatgacggcaacgtgctcatcccctccaccgtcatgaccgttgcgcccgagaagagcgccaacaacaacatcgccgcctgcgaagccatcaccgactggctcctgtccgacgagggccagagctacatcgtcaagggctggatgcacagcgtaattaccgactatgccaccgaaccctacgacggcaagcccactcaggaactgatggataccaacatccccgtcgactgggagaagtgctacaaggagcgcgactccatccgtaccctgttccaggagaacgtgaccgtcgagtaatcaaacccttggacgggggcgggatatgcccgcccccgtaccccatccatccatgccttggggaggtccactatggcacaacaaaccgcgcccatccaatccgccttgccacaaaggcgcttttatttcgacgtcaaatggctgatcatcatcgccattgtggcgtttttgctggtgttccaggtattccctctggtctacatgctctataaggccttcttcccggaatctacgttttcactttcgacattcacgcgcctctatacctacgaaatgaactggggggcgctttgcaatacgctcatcgccgccgcggccaccatggtgctgggcacggtgctggccttcccgctggcgtggctggtgggccgcaccaacatgtacggcaaaaagtttttccgcagcctgttcgtgctcacctacatggtgccgccctacctgggcgccatggcctggacgcgtcttctcaaccccaacgcaggcaccatcaatgtgttcctccgtgagcttttgaacattgacgcgcgcagcgggccgctcaacatctacaccatcgccggcatgatctgggtgctgacaaccttctattatccctacgccttcatcaccatctcccgtgccatggaaaagatggacccctcactggaggaggcggcccgcatcagcggagcctcgccgctcaaaaccgtggccaccattacgctgcccatgatgacccccagcctcatcgcgggcgccttgctggtattcgtgtgcgcggccagctgctacggcattccctccatcgtgggcaagccgggcaaggtcaataccgtaaccacacgcattgtggagtatatgggcctgggccaggatggtatcaatgatgccacgggcctggctgtgttcctgatgattatggccattatcatcctctatatctccgatgttgtggtggcgcgcaagcagtacattacggtttccggcaagtctacgcgtcccaatattgttgatctgggcagatggcgtgggcttaccaccgtgctggtcagccttttctccatcatcgttatcatcatcccctttatcaccatcgctaccacctcggttaagaagaatcttggcaaggggctttttgaggccaacaactttaccaccatgcactggaccaagatctttggccgtgacgacattatcgaaagcctcatcaattccattacctttgcggcagcagccgcgaccatcggtatcgtgatttcctttaccatggcgtatctgctgcagcgcacgcgggtcaaggggcgcaagattcccgacttcctcattactctggggtccggcacgcccagcgtggtaatcgccctgggcctgatcatgaccatgaacggcaagttcggcatcaacctctataacaccgccgccatcatgatcatcgcctacctcatcaagtacctcatgatgggcatgcgcacggtggtatcggccatgagccagatccatgtgtccctggaggaaagctcccaggcgtccggcgcgggatggctgcgcacgatgttcaaggtcaccattccgctgatcttcccctccatcgcggcgggctggttcctgatcttcattccctgcttctatgagctgtccatgtccacgctgctctacagccgcgacacgcaggttatcggctacatgctgcattactactggacctataccagccagcagcaggcgtccgccatggcgttcggcattttgctggtggtagtggcgctcaacttcatcctcaacaagctcaccaagggcgagttctccatctgatgcgcccgcattttcgataaaggagttggaaccatgtccagcgtgaccattcaaaatgtgaccaaaagttttggcaataccgtggttttggaaaacttcgacgcggtttttcaaaatggagaattcatcaccctgctggggccttcgggctgtggcaaaaccacgatgcttcgcatcatcgccggctttgaaaaacccaccagcggctgcgtgaaatttgacgaccgcgtcgtttccagcgacaaggtgttcattccgcccgaaaagcgcgatatcggcatggtctttcaaagctatgccgtatggccgcacatgaccgtgtttgacaatgtggcctatcccctgcgcatcaaaaagatggataaggacgtcatccagaaaaaggtggatcgcgtgcttgccatggtgcacctgacccagtacgcgcagcgcatccccagccagctctccggcggccagcagcagcgcgtggcgctggcgcgcgcgctggttgcggagcccgccctgctgcttttggacgagcctctttccaaccttgacgccaagctgcgtgaaagcatgcgttttgagatcaaggagatccagcgcgaatccggcatcaccgtgctctacgtcacccatgaccagacggaggccatggccatgagcgaccgcatcgtagtcatcaaccgcggtgtcatccagcagatcggcgtgccgcgcgacatttactcccagcccgccaacccctttgtggccgacttcgtgggcaagatcgaatttttggagggagaggtcaaggccgactgcatcgagctggacggctgcggccagcgcctgccctatgagggagataagaagggccgcgtgatcgtcggcgtgcgtcccgaacatgttaagtacgcccccatcggtcagggttcgttgaacggcaccatcaagagccacttctacctgggcgatgtgaacgactgccgcgtggacctgggtggcggcaaggagcttcgcgtcatcgccgatccctacgacagcatggacgttgaggccggcaagaaggtatctctcaacgtgcgcgagttcctggtctatgacgagcagggtcccggcaatgacttccgcaaaattttgacctgatttccgctacaggacacggatctgcctgtgcggcacgcgcggaatttcacgcgcgtgccgtttttatgccaaaaggaggcggcctgcttcctttacgcaggagaaccgctcgtctccgccgaaatatcacattttgaaagcatttggatgaccattctcagaaaggccgtggaagcagatgatccgacgtaccgcctgcctgatcgccctcggaggcgaaccctatcgcaacctggccattgagaagcacctgatggacacgcttccggaggatacggccatcctctatctgtggcagaacgaccgctgcatttccatcggccggtgtcagaacccgctgtatgagtgccgagtcgacccctttttaagcgcaggcgggcatattgcccggcggctgagtggcggcggagcggtctatcaggaccggggcgccctcaatttcagctttatccttcccaaaacggcgtttgacatccaccatcagctcagcattctggggatggcggccggcgcgttcgggatccagtcgcgggccatgggccggggcgacctgtttgcagcgggccgccgcttcagcgtcaacgcatatttcaaggctggttcggcggcgctgcatcacggcacgctgtatgtggataccgctctggaccaaatggcacagtttctgtcagcaggaggcggagatcttgccgcccccaatcctccggacacggcggcacatacgatcaacctgcgcacgctgaaccccgccatcaccgtcgaagagctggagcaggctctctactgggcctttgcccgtgcctatggcgcgcaacccgcctggctggacgaacggattctggacggccgttccatcgccgcgctcacccttcggttctccgatccaaaatggatctatcccgaggcaatggcctccaccttcagcgtgtcggagcgctttccctgggggcaggtcacggtcaagctcaaggtggacggcggagtcatccgcgctgcccgtgtgtttacggatgccatggaggccccgctcttcggtttgatcgagcagtccctgaccggttcgccctatttgatcagcgccatttccggcagaatggaccagcgtctggaaatgctgagcgatccgcgtctgatacagctcgccggcgatgtcaccaatctcatctgcgggcgtattcgctcgttggaccggcagggctgatcgtcgctcactgggaagagttgtcgcacattcgcctccccgctcctgcacacaatagccgcgaggaggcgaacagcattgaaaaaaacctggacccttgtggtaatctccctgctcggcctggcgctgttctccgcttgcgccagcaatgccgataccctgcccagccctgctcccagcgcgagtgtaacaccctccgctatgccggaagccacaccggcgccctcagccagcgccatgccctccgcaaccgtgcagccggccggcgtgaataccgtggaggacgcgcgccgcctgagcgacgatgtgagcgaagaggtagaaaagctcagcgagctggacgacgcggaggccgtcgtagccggcaacatcgcgctggtgggtatctcgtatgatgcccagtatcagggcggcctaaccgaccggctggtggaaatggtcaaatcccgcgtggaggcaatggacaagaccattaccgccgtgcacgtaacggacgacgaagccatcatgaacaaaattgatcagctgcgcgagagtctcaacaacggccagatcacctttgaagaattgcagacgcaggtgctggatattggaagctccatcaccggcggcggcaacgcaatggtatcccagccgcagaccaataccggggcgtgaaagatgcggaaaaacaaagaccgccgggcggccgaggggctgcggggcggtctttggtcgttgtggggccattctttgagaggcttatcttgccggggcgcaatcgcattgggacaacgttctcccgccggctcaacccttcccggaaagcagccggggcgcggatgaaacccacgccccggctgctttcctcagtatccgaaaatctccgtcgcttgtgccatgttctctctcacaggcaccccgaagggacatcgcttttcacacgcaccgcatcgcacgcattcgctcgcatgatggctgagcgcccgatagtgctcccgaacagtttccggcgtctcaccctgcgcgcgcgccaggttgagaaacttggtcacctccgccacggaaatgccgctggggcatggcgcgcaatgaccgcagtacatacaatgcccctgccagctgatcttgggcaaagcggccagcgccgccgcataatccttctccccgggcgaggcagtctcataggccagggcgtctttcagctgatccagcgtgcgcgctccgcacaggactgccgccaccgccggacgcgtaagcgcgtagtgcaggcattcatacggcgtcaacgcctttccggcaggcgaaagtgcggcgctcagcaaatcgcctccgccgaaggccttcatcaccgtgatgcccacgccccgccgttggcatgcctcgtaaagcgcctcccgctccgggtccatattgaccagcggcccggcatagctctccgccgcccagagacgctccacatcctcgttggcaggcagcaagtcgtagcaggggttgacactgaacatcagcacatcgattttcccgctctccaccgccagccgcgccgccgcggggttgtggctggacagcccgaccgcccttgcccgcccctcgcgcctgagtgcctgtgcgtagtgcatcacctcgccgctctccacggcgttccagtcgcttaccgaatccacgtagtggatcatggcgatatccacccatgaagtgcccaggcgcgccagctgatcctcaaagctctgacgcacctcgccgatatcgcgggtgcgctcgtactgcccgtctttccagatcgtgcacaaatgcgcctggagcacaaagctgtcccgccggccggccatcgcctctcccagcgccgaacgcatttccggatcgggggaatacaggtcgatcagattggcgcccgagcgttccatcacgtccaggaattcgcgcacttcctgccgggttttgccgataaagccctcgcatcccatgccgatttcgcccacgcgaatgcccgtcgcgcccagcgctctgatgttcatttcgttgctcctcctcagtccgcccggaagatctggatgcacagggtaccctcaccggtgctttccgccagcacgtagatgggatattcgcaatcgtttcggaacaccagattcagcgagtcatttcccaccgccgcatcctgatgcatgggcagataccgcgcgcagcccggtccatgcggccggcgcatcagcaccgtgatgcccggcacctgccggatggcattgtacagcgtgctgctgctctgacaggtaccgccgccgtagccgatctgggttccgccgtcgatgagcacgggggccgggaagtacccattgttctttttataggggccgacctgcgcgttaaaatccaggctttcgccgggctgcatcaggcgggtcatggattcgcagctgcgcacgatgtttttgcagcggccatcgttcccctcagcgcccgtattgtactcaaagaagctgcaaaacgccgcgatgggggtttcatcgctcatgggctcgtcgccctgggccaccatcaccaggtcggtcagcacgcgcgcgtcgatgtacccatagctgcgccacaccagcaccttggcaaaaccgtccacgaagtccaaaatggcgattttgctgcctgcgccgggatggatatcgttgatctcagcgctgagcgacggttcggcgtagatgttggtcgtttcggtgagcgtagccacatatttggacgtcaccacgccgtacggaggggtattctccgggttcagcgtcgtcatattctcatccacccaggtgcgaatgatatagcctacatagccgttatactccgccagcacgtaggagggatacaccgcgtagaccgtgatcgtttcgcctgcgtcaatcacgcagaccacgtcgctttcgccgtcctgcagggcgcgcatgcgaatggccttgcccgaggctacaaagggcttgatcttggtggtgtacagcggcgtcagaccctcgatgctcgccggctgatcctccgcgtcggcaacggccgtttcatcctcatcctccgtcgcaataccctccacctcgataccggcggcttcggcctcctcggcagtcatgacggggtccgtttcctccgccagcgcggaaaaagctgctgccagcaggagcaggcatgtgcaaagagcgatcacgcgtcgatacaggctcatcggcaaaattcctttcagctgatattctgggaatcatctttcattatagcatacccgtgcgcccttgggcaggggaaatccggaaatttacacgtacagtcccagggagcctgctcccccgcgcggcaacaggcgcacgcacgtaaaaaagaaaaacattttacgttatgaatatgatacgatatttttgagtttgttttcgtcaatagaggtgcaaggaggtgagggaaccgcatgagccgcatcaagggccctgatcgggctcaagacccgaaccatgaattggagcgtctggtcctccagtaccagcaaccacttcttcgcacctgctttctctatctgcgcgacagaacactggcagaggatgcggtgcaggagacctttctcaaggcctacaggagtttggcatcgttccgaggagaatgcagcgaaaagacgtggctgatgaagatcgccatgaatacctgctgcgaccttcgccgcgcgcaccggctgcgcagcatcgacccgcgccgtatccccgaactgctgccgcaggcggcggaacccttcgcaccggcggaggaagagctcgtcacgcaggtgatacagcttccgcgcaaactgcgcgaggttatcctcctgtattactatcaggacatgaccgtaacggaaattgccgtttcgctgggcatttcccaatcatcggtatccgggaggctgaagcgcgccagggagaagctgcgcgcgctgctggaagggagggatctctgtgaatgaccaggaaatgaagcgccttctccaatccgcaatcgaccaccggctttccggccttgaggaaaatccttttctggcccggcgaatcatcgctgctgcgaaaggagaacgacccatgaaaaagaaactgtccgtttccctgatgctcgtgctggcgctcatgctcatgatgctgggcctggcctacgcgctggtgcagtcgaggattgcgggtgagctctacggcgacacggcagcgcccagcgatgtgatggaccggattcagacgccggatgagagtacggcctctgatctgggcgtgctcgttctggatgagcttctctacgacgggagcgccctgcacaccgccttcaccctttccaatccaaccggagaaacgctcctgtacacggtggacggtctgtatctcgacggctgttcgcttacgcgaagcacgctgttcaccgaaggcgccggcaccgccggatatctgctgggcggtacattggatggccttgcacttcccatgagcatttcggcctacaacgaggcggaggcgctctatgagtttgacggacagggcaggtatcttggcacggcgccgattccccagggggaagcatccctgagaatcgacatcgccgtgtggcgtcctatccattctccccgactggtcaattacggcgattacgagggcatgaacgtgtcggaagcctccgaccggcttgtaaccgataaaaccggctatgtttctctggagctgttccgccccgcggcgtacagcctgaacgccacggcagaccggcccagctcggagatctacgcccaggcctaccgggagctgggctgggccgagcttgccggacaaatcagccttgagctggatgtgacgttgggcccggaccagctcacccatgtacgtcccgtgcagaccgaatatgcgtttgacaacctgacgctgacgatcagccgcttcgatctgacacacacaggcggccggatggagggccggctttccggcgaaggcgccgaaacgttcctcaggcagggattcatcctcgccgaccctgacgggcagcgcgtgctcagcaatgtcctgacctgggatcaggaaggcgcgcaggacttttccttttgtctttcactcgttcctgtcgcgggcgagctgccacggcgtgcctatctggctccgtttttggcgcacgatcctcattgggatgaagcctccccatcctatgatcctgatgtggaaaagccggaaggcgtggttggcgcctatcagctggacttcgcccacgccctgtgcatagcgctgaaaaaaagcagctgacgccacttcggtgcagcagaaacgcaggccctttggagcctgcgtttctgcgtatttgattgtttttcacccaacggcatccagcgccatatgccgcgctgcctgcatcccggtttactccctggtagaataattggggctttccttggtaatggaaatatcgtgcggatggctctccttcaagcctgctccggtgatgcggataaactgcccctccctgcgcaggtgctcgatggtcggcgtgccgcagtaacccatgctggagcgcaggccgcccaccagctgatagaccgtatcggccagtggtcccttataaggcacgcgaccctccacgccttcaggcaccagcttcttgtcgggctcctggaaatagcggtcgctggagccgtgggcctgtgccatggcgcccaggctgcccatgccgcggtacaccttgaagctgcggccctgatagatttccatatctccagggctctcgtccacaccggcaaagaggctgccgatcatgacggcgctcgcgccgcccgcgatggccttgggaatgtcgccggaatacttgatgccgccatcggcgatcacggttacgccatacttgtccgcttcttttgcacagtcgctgatcgcggtgagctgcggtacaccgatacctgcgatcacccgcgtggtgcagatggagccgggtccaatgcccaccttgatacagctcgcgcccgcttcaatgagggcgtgggtggcctcggccgtggcgacgttgcccgcgatgatgcacaggtccgggaaggcggcgcgcagctcgcggaccttgttgatcacttcgatgttgtgggcgtgcgccgagtcgatggaaatcacatccaccttggcattgaccagcgcctccacgcgcagcatgctgtccttggtgatgcccaccgccgcgccgcacagcaggcggcccttctggtccttggcggagttgggatacttggtgctcttttcgatgtccttgatggtgatcaggccgcacagctcaaactgatcgttgacgatgggcagcttttcgatgcggtgcgcagccagaatctttttggcctcctccagcgtggtccccacgggcgcggtgatcaggttttcggaggtcatgacctcttcgatgcgccggctgtcgtcggtttcaaagcgcaggtcgcggttggtcagaatgcccacgagcttcttgccccgggtaatgggcacgccggaaatgcggtacttggccatcagggcctccgcatcgcgaatcaggtgatcgggcgagaggaagaacggatcggtgatcacgccatgctcgctgcgcttgaccttgtccacctgcgtagcctgctcatcaatggtcatgtttttgtgaatgatgcccagaccgccctcacgcgccatggcaatggccagccgcgcgtcggtcacggtatccatggccgcgctcaacagagggacgttgagcttgatggttggggtcagcatggtcgaggtatccacatcccgcggaagcacgctgcttgcacggggcaccaggagcacgtcgtcaaatgtaaggcctgtgcgaatgttctcctccagcatcgaacttacccaccctttcgttatcattaaggattgtggctattttaccagcgcatgccgggaatgtcaacgcttcgcgcggcctatgccgggtttgatgcgcgattgtgcggttttcattgaacttttccggcatgtgatgtataatgtcgttatagaacttgaatagaacaaaccttcggaggtgtttttatatggaccccatcatcactattggacgcgagtatggcagcggcgggcgtgaaattggcaagctggtagccgataaattgggtgttcccttctatgataaagaaatcctgacccgtgcggcggaagaaagcggtctttgtcacgagcttttggagcgtcacgacgaaaaaaacaccgtcagcggcatgctggcgggcagcgcgggcgcgggcctgcatgtgggtgcgggcggcatgggcctgcagatgccgctgaaccagcgggtgtttttggcccagtttgacgccatcaccaaaattgccgcggagggtccgggcgtaatcgtgggccggtgcgcggactatgtgctcaaggaccgtccgggagtgacgcatatttttatctatgcgtcggaagagcggcgcatcgcgcgcatcatgcgtgtggaaaaggtggaccgcgagcatgcccgagagctgatccgcaagacggaccggcagcgccgcagctattacaacttctttgccgacggcaactggggcatgcgcagcaattacgacctgatgctccgcacggacggccgccagccggaggatgtggcggatatcatcatcgcctttgccaaaatgcgcgccgatggataaagtccggcaaaaatcaggaagccggaagcgttttgctcagcgcagaacgctcccggcttttgccttatctgccatcatccggccaggcttccttcctcctcgttgacgccttcctcctccggcgccgtgccgtcgggcgtggcctgtggctccggcgttgcggccagggtgttttcaaaggtgagggtcgccacgttgtccgcacgcgtgcagttaagggtatagacccccacctgcgtggcataggttccctcgcccgcaagcaatccgtcattgaccgcggtgaccagcccatagcgcaccgcagggtcggccgcggtgtgcatggccatgagcagcgcgtagctgtgatagcccgacgtgacaaaatcattgtactcggatgtgccataggacatgcccgccggagccgtgagcacgatctcacacctttcaatgatctgattgctctggtccagccggatggtcacacgcagcacatcgcccagcagctcgtacatgcggtgccctccgtcggcgttggcctcgcccttggccagaaccagcggcagcaggtggcggccggtgttctggttgataaagtccagattgtcggcatagcacaattcaaagtcctcgtatctgcggccggagatggtcgccgccatcccggctggcaggcacgtgagaatcagaagcaggcagcagcagaaaatcagcagtttgcgcaattcggttcctccatgatttcgcgggcaagggcgcattggactcttaccagcggtttttgaccttttcagcaaaaccgcgcaggccacggatggtcagcgccgtcccatcatccagcacagccgtgccgtcgaagcgaccaaacacctgatgctgattgctttccagcaccaccgcgcccgtgtaagcagcgcggtccagaatgggcgtaaaggtcagatccaggcggcccaggttgtccgttacgtgccagggcgccagcaggtcgtctttgcccgcggcatctttgggaatgccgaaatccacctgatccagcttgtgggcaacgccgtcatacaggagcatgttttccgtggcggcgcgggtatcgccaaagccgtagcccaggttcatcccgaacggcacaccgtccacatagccactggcgctgccccagtaccaggtgttttgataggtccacacgccccggccccagtccagcaccgccgtagccgtctcggggtcaaaccggcgggtttccccgtcaaataccacctcgcccgctgcgcgcaggcagttgatcttctggttgtagtaaaaggcgcgcggatgtccggcaaagggcgtggcgatcaccatgctgtcccgcggcgcgccggtgagcgtcacacgcgcggtcaggggcttgtgctcccggaagtcatccacacgcacgatcagctcccggcgcatgccgtcgttgtcaaagcgcagggcatatccggagcgctccacggcgacacttccctgaccgctggcaggcggcaggcccgttcggcccagaggcatcaggcgcatgaagctgcgcgtgtgctgccagcgggtgcccaagtcaatcaggctgacgctttccagacccatgtagctattgtcggcaatggtcagcgccagcaccgtatcgccgccaatgatgcagtagtaatcccattccttgatgcgcagcccgcacgcgcggattgcggcgcgatcgtagcgcctgaccagcgaggtggcgtagcctgcctcaacgagcgcgccgcgtgcattcagcagcgggccgggggaaagaagcgtttgattgatcggggccatgggcgcctccctttaccgcacgccaaagcgatagatggtcagggtatcgtaggtatcctgcggcctgagcacgacgctggggaaatgcggatgatgaatggcatccggatagtgctgcgtttccaggcacacgccggcatatgggccgtaatgcacaccgtccttgccatcgttgtccagatggttgcctgtatagcactgcacgcccggctgatcggtgatcacgtccatgacgcggccggtcttgggggaatagagcgtggcaatcaccttggtttcacggtcgcggcccgcgcagaagttgaagtccacgccttttgccatggtcatgccggggcattcgggcattttgtccagcacatccccgatgcgggtgggagaggtaaagttgtagggcacctcgctgaccggcagcagccgcccggtagggatcaggccctcgcccacctcggtgaccagatcggcattgatttgcatctccaggtcgcgcacgctcccgctggcatggccgtccaggttgaaataggcgtgattggtcaggctgcacagggtggtcttgtcggtgctggcctgatagtggatgcccagctcgttgtggtcggtgaaggtataggtcacctttactttcagcgtaccggggaagccctggtcgccatcctggctggtcagcgtcagctccagcgcgtcgccgccctccgccaggaccggccttgcctgccacatgcgcaggccgaagaccataccgccgtgcagacagttgccgttgttgtttttgggcagcgtataggtccggccctccagctcgaaggatgcgccgcggatgcggttgcccacccggccgatgagcatgcccatgctgccgctgcggtcccgtgcatacacatcgatgtcgtcaaagctcaggtttacatcgtccagctttccgtcccggtccggaaccagaatgcgcgtgacgattccgccaaaatccagcatggatacgctggccccgtcccggttggtcatggtatattccgttaccttctcgccattgggcgtgacgccgaacgggtgctgtgaaatgctcatgaaaggagcctccttttgttgattcatctctgccgggtcccggatatcctcattgtagcccatctgccacagagggtcaaggacaagcgcaacaatttacgtcccgccatccataatttccatgcgcgcccggcgcgtcagcctggcgaataccaggtcgtaggacgcatcgcacaggcgcaggatgcgctctcgctccaccccgccgtccagacggatggaaatccaggtgcgcttgtccgtatagaaacccggcagaatgtccgggcaggcggcgcgcagcagctcggattccagcgggtcgcatttgagcgtaagcagcggatgccccgcatattccctcgcataaacaggaccgggaaggcagatggcggcgtaaagcctctgcgcgatcctatagcggtcccagccccactcgggcttgtaatcccagacggttccgggtttttggcgcaggtatccgtccagccaggcaaaatcgctcatgctttctccgcctcccttgctgccgccattatagccgcgggctggaaaaaagtcaaagtcccgcgcctgtccgtccgcgctcccaccccttcgtcaaccgtttttggtacgttatcatgagaacatccgcataggatacaaaggaggccgcacttatgcgtcttacgttggaatgttacatcctgctgttcttcacgggcgcctttctgggctgggtgatggaggtggtctgcaagctgattcagtttggccgcttcatcaaccgtggatttctgatcggcccctactgccccatctacggctttggggcggtgctggtcacggcgctgctctcgccgttttccgccagcccgccggccgtattcgtgctcgccatggccgtgtgcggcacgctggaatacctcaccagctatgccatggaaaaactgttccacgcccgttggtgggattacagccaccgccgcttcaacctcaacggccgcgtctgcgcgggcacgctgattcccttcggactgatgggtcttggcatggtatatgtggcccggccggtgctgttcggactctatctgcgcctgccgcaggcgtggatggacggcctgtgcctgggactgtgcgcgctgcttttgggagataccgtgctttcggctaccatcctgggcaaaatccgcaggaccgcggagcgctgcgagggcgacagcaccgaagccctcacccagagcgtgcgcgaggcgctcatccgacagggcatgctggcgcgccgcgcgcttcgcgccttcccctacgcacggctgtataaccgccgtctgctgacggatatcagggccaggcgggctcagctttcccgcgatctcaaagcccggcgtcaggcgtttcgcgatgatctggaccgccgggaagcccgcctgcgcgaggagcttgaaaccctgcgcaaccagcgccgccatggcgcataaccccggcaccgggcaatgggcctttcaggcgcatctatattttccacaaaagaaaattcgtttttcctcttgcaattcccgctgatttggtgtataacagacccaaccggtcaaaatatcgccaatagggcaaaaaatgtcccgcaagaccgaaagcccggcaaatcaaacagggaggatgctatcacatggaggaacgcgtatataatttttccgcaggtcccgcgatgatcgccgaaagcgtgctcaaaaaggctgctgatgaactggtttgttatcccggacgcggcatgagcgtgatggagatgagccaccgcagcggcatgtacatcgaaatcttcgaccgcaccaaagcgctcctcaaggagctgatgaatgtgccggacgattatgaaatcctgtttttgcagggcggcgcgacgcttcagttcagcgccgtaccgctgaacctgctctccaccggcaaggccgattatgtggacagcggcaactttgcccacctggccgccgaggaagccaagaaatacgcggacgtgcacattgccgcttcctcccgtgaggatacctacacctatgtgcccgataccttcggctggcggccggacgcggactacgcctacatcaccaccaacaataccatctacggcacccgctataccgctatccccgataccggcaatgtgccgctggtggccgacatgagctccaacatcctctccgagcccttcgacgtgacgaagttcggcgtgatcttcgccggcgcgcagaagaacatcggccccgcgggtctgtgcatcgtgatcgtgcgccgcgacctgatgggacatgaggaccccaaatgtcccaagctgatgagctgggcgctggaaagcaagaacgacagcatgctcaacacccccaacacgtatggcatctacatggcgggcctgggctttgagtggctcaaggacctgggcggcgtagcggccatttacgagcagaacaagtacaaggcggggcttctctacgactacctggatcagagcgctctgttcaaggcgcccgcccgcagggactgccgctcgctgatgaacgtgacctttgtcaccggcgatgccgacaaggatgcggcctttgtcaagtatgcctccaagaacggtctggttaacctcaagggccaccgcagcgtgggcggcatgcgcgccagcatctacaacgccatgccggtagagggcgtgaagaagctggtcgaagtgatgaaggcctttgagaaggagaatgcatgatgtataagattcagacgctcaacaatatttccgatgtcatccatcagagcctgaccgccgagcgctatctcattgccaaggaggagcccgtgccggacggcattctggttcgctccgcctccatgcatgacatggacctgcccgatagcctcctggccatcgcgcgcgcgggcgcgggcaccaacaacatccccatcgacgagtgcaccaggcgcggcatcgtggttttcaacacccccggcgccaatgccaacgccgtggccgagctggtcatctgcggcctgatgctgggcagccgtaacgtggccggcggcatcgactgggcgcgcactctggacggacagggcgcggaggtcgccaagctggtcgaaaagggcaaggcccagttcgccggtcccgaagtccgcggaaagacgctgggcgtgatcggtttgggcgccatcggcgccatcgtggccaacgccgccgcgcagggcctgggcatgaacgtcatcggttacgaccccttcatcagcgtggaaagcgcctggtcgctcagccgcgccatcaagcgttcctcctccgtggatgagatctaccgcaccgcggattacatcaccgtgcacgtacccctcaccgacgctacccgcggcatgctcggcgaaagcgccatcgcccagatgaaagacggcgtgcacctgctcaacttcagccgtgccgagctcgccgacgccgaatcgctggccgccgcgctggaaagcggcaaggttgccagctatgtgaccgacttccccacccaggacgtgctcaggatgaagaacgccgtcgccattccgcacctgggcgcctccacgcccgaaagcgaggtcaactgcgccgacatggccgcccgcgagctgcgcgactatctggaggacggccagatccgcaattccgtcaatttcccggagatcctcctgggccacagcgagggcgtgcgcgtgctcatcatccacgaaaacgagcccggcatggtgtccgccatctccgccgccatcggcgcgcgcaagatcaacatcaacaacatgctcaacaaaagccgccgcgacatggccgtgaccgtgctggaactggaccgcgagcccgacgacatgcttcagacccagcttaaagcccttcccggcgtcattcgcctgcggctgccggcacggggctgaagcacgcgccacttcccacaaaatcataaggaagaaaacccgtttcatctggttttcttccttttttgtggtctcctcacaaaagatgcgccgcggattctccaaaaaaatgcttttgaccccttgacaagcacctgcataatatgcataatacatgcataaacattcaaggaggcaattgctatggcacccaaggccaagaaggatattaaaaaagttgtgctcgcatattccggcgggctggacacctccatcatcatcccctggctcaaggagaactataacaactgcgaagtgatcgccgtctccggcgacgtaggccagggcacggagctggacggactggaggaaaaagccctcaagaccggcgccagcaagctctatgtggaggacctgaagaaagaatttatcaccgactacatctaccccaccatgcaggcgggcgcggtgtacgagggcgaatacctgcttggtaccagctttgcacggcccatcatcgccaagcgcatcgtggagatcgccaaaaaggaaggcgcggacgccatttgccacggctgcaccggcaaaggcaatgaccaggtccgcttcgagctgaccatcaaggcctttgcgcccgagctgaccatcatcgccccgtggcgtgagtgggacatcaagagccgtgaagaggaaatcgagtatgccgaaaagcataacgttcctctcaaaatcaaccgcgagaccaactactccaaggacaagaacctctggcacctgagccatgagggcctggacctggaggacccggccaacgagccgcagtacaacaagcccggcttcctggaaatgggcgtcagccctgagatggcccccgataagcccacctatgtgaccctttcgtttgaaaagggcatccccgtagcggttgacggaaagcagctcgatcccgtcgccatgatggaatacctcaacaagctgggcggcgaaaacggcgtaggcctgtgcgacctggtggaaaaccgcctcgtgggcatgaagagccgcggcgtgtacgaaacccccggtggcaccatcctctaccgcgcgcatcaggtgctggagaccatctgcctggaccgcgatacccagcactacaaggagctggtcgccaaccgctatgctgagctggtttacttcggccagtggttcaccccgctgcgtgaggcgctcgccgcctttgtgaccgaaacgcaaaagaccgtcaccggcgaagtcaaactcaagctctacaagggcaacatcatcaatgccggcgtcacttctccctattcgctctacagcgaggagatcgccaccttcggtgaggaccatgtctatgatcagaaggacgctgccggcttcatcaacctctttggcctgcccatcgccgcgcgggcaacgcttctgaagggaaagctgtaagccatgttcaccgtattcattgacggcgaccagggaaccacggggctgcgggtgcgggagcgcctcgccgggcggaaggacatcacgcttctctctctcccggaggaaaagcgcaaggacctcgacgcccgcgccgccatggcccgccaggccgacgccaccatcctctgcctgcccgacgccgccagccgcgagctggtggccgccctgggcgagtcggaaggcgtgattctggacgcctccaccgcccaccgcacggacccgcgttttacctacggctttccggagctgggcgcggcgcaggcgcaggccgtacgaagcgcgcggcgcatcgccgtgccgggctgccacgccagcggctgcatcgcgctggtgaagcctctggtggacgcagggttgctttcgccggacgcgccgctgtcgcttctgtcgctcacaggctattccgggggcggcaagcgcatgatcgccgattacgaggcgccggaccggcccgctgccctgcatgcgccccggccctacgccgtgggccaaagtcacaagcacctccccgaaatcatgcatgtgtgcggccttatgcggccgccggtgttccagcccgtggtgatggacgtgttcagcggcatgctggtcagcctcccgctcacggagggcatcctggcccgcaaggcctcccttgccgaggtcagcgatacctaccgtgcgtttttcaagggcgcggcgctggtgcgcgtgctggaggacaaccccgaagccgtcatcgacagcgtggccctcagcggcagcgaccgcatggagctgtttgtcaccggcaacgacgaccgcatgatcgcatacgtgcgctttgacaatttgggcaagggcgcctgcggggcggccatcgaatgtctcaacctggtcctgggcgcgcctccccttacggggctggcgctttgacgggcgggctttgtcccgtccgctttttaagcaatctggaagggggatcatcatgtcagaaatcaccttcatcgccggcggcgcgacagccgcgcagggcttctccgccacgggcgagcatatgggcatccggcgcaaccgcacccggcgcgacgtggccctgatcgtcagtgaaatacccgccaatgcagcctgcgtctatacgcagaatctggtcaagggcgcgcctattctcgttacgcagaaacacgtggaaaacggcatcgcgcaggccgtcatctgtaacagcggcaacgccaacacctgcaatgccaacggcgtcgaaatcgccgagggcatgtgcgcgctggtggaaaaatacatcggcgtgaaagccgaggacgtgatcgtggcctccacgggcgtgatcggccagcccatgacgctggagccgtttgaaaagaatttcggcaagctggccgactcgctggaggatacgcccgccggcggcacccgcgcggccgaggccatcatgaccaccgacaccgtctccaaggaggtcgccgtgcgcttccccttgggcggcaaaatgtgcaagctgggcggcatctccaagggcagcggcatgatcgcgcccaacatggccaccatgctgtgcttcctgaccaccgacgcggccatctcctccgtggcgctcaagcgcgcgctgaccaccgtgacggccgataccttcaacatgctcagcgtggacggcgacacctccaccaacgacatggtctccatcctggccaacggcatggcgggcaacgcccccatcgaggcctgcatgggcacggattacgaggccttcgtggctgcgctctacaaggtgtgcgaaaagctgtgcgccatcatggccaaggacggcgagggcgcaaccaagctgctggtgtgcgaggtgacgggcgccaagagcaccgccgctgccaagctggtcgccaaggcggtcatcaagagcaccctgctcaaggccgccatcttcggcgccgacgccaactggggccgcgtgctgtgcgccatcggctatgccggggcggacgtggatgtaagcaaggtagacgtgaacttccgctccaaccggggtctgattcccgtttgccgcggcggcgcgggcgtggctttcagcgaggaaaccgccaaggagatcctcatggacgacgagatcaccgtccaggtggctctcaacagcggcagcgccacggccaaagcctggggctgcgacctcacctatgactacgtcaagatcaacggcgactaccgcacctgatacagtaaggagaaaacccatgaccatcgaccagcgggcggaggtcctgattcaggccctcccctatatcaaagcctataaccagaaaatcgtcgtcatcaaatacggcggaaatgccatgatcaacgaggacctcaagcgcgccgtgatgggcgatctgctgctgctcacgcttgtgggcgtaaaggtggtgctggtgcatggcggcggcccggagatcaccgacctgctaaagcgcctgggcaaggagtccgagtttatcaacggcctgcgcgtgaccgaccgcgaagccgccgacatcgtacagatggtgctggccggcaaggtgggcaagggcctggtgggctatatccagtccatgggcggcaaggccatcggtctgtgcggcatggacggccacatgattgaggcccgcaagctcgacgatgtgcacggctatgtgggcgagatcgtaaacgtcaacacccagcccattctggacgtgctggaaaagggctatatccccgtcatctccaccgtgggctgcgacaacgagggcaacccctacaacatcaacgccgacactgccgccgcgcgcatcgccgccagcctgggcgcggagagtctgatctccatgaccgacatccgcggcatcctgcgcgacccggccgacgaaagcaccctcattcccgccattcaggtcagcgaggccccgcagctcatccgcgagggcattatctccggcggcatgatccccaagatcgaatgttgcatcgaagccatccgtcggggtgtgaaaaaggtgttcatcatcgacggccgcgttccgcacgccattttgatcgagtgcctgaccgacgagggcgtgggcaccatgttctactgatgcagcgcctgccaaaggaggctattgcgcatgaccgatattcagactctggacagccagtatgtagcccatacctatgcccgcgctcccgtcacctttgtgcgcggcgagggctgccatctgtatgacgaagccggcaaaccctacatcgacatgggcagcggcatcgccgtgagcgccctgggctacggggatgagggctgggtcgcggcggtgagcgcacaggccgggcagcttgcccacgccagcaacctgtaccataccgcgccgcaggcgctcctggcgcagcgcctgtgcgagcgcacgggcatgaaacgcgtgtttttcggcaactccggtgcggaggccaacgaatgcgccatcaaggccgcgcgtcgttacagcgccctcaagcacggcgaaaacgtgcgccccgtcatcctgacgctggaaaacagctttcatggccgcacgctggccacgctggcggccacggggcaggatgcgttccatcatgatttcggacccttcccggagggattccggcatgtgcccgccaacgacgcagacgcgct

SEQ ID NO: 530 - DNA, 1810 bp, Unknown
  16S sequences of unknown bacteria
ccgccacgagccgtcgatgagccgttagcgttccgcgattttgacgtctgcgtgctcgagcaggtactccgtcgcggcgtagcgctctgcagtctcgcgcaagatgaacccgcggcccgagcgctccagctgcttgcgcgtgtcctcgggctttgcctgcggattgatctgctgggccgccgcgaggtaatcgtcgtcggtcaccgcgaggccctcgtgggcgaacagcgcgtcgagcgcgtagccttccacgagcatctcgcggacctgcatcatcaccatcatggagaactgctgcttgccgccttgctgctcgacgtagtcgtcgtagctcatgtgctgggcctggagctgctggtcgaggctgcggaagaagttgtcgcgcatggcgtcgtaggcctcgtcgggaatgtgcccctggaacctgtgcgcgagctccgcgattgccagctggcgcaggtagtcgtcgtaggccttcttcgtttctgcctcgagctttgaggagatgtctgcccgcaggtccgcgaccgacttgaagacgggcaggtgccgcgccagccactcgtcggtgatgtccggaatcttctcctcctggatctcgaggacagttaccgtcgtgtcgacggtcatgctcgtctcgttgccctgggggtcgaggtcggggccatcaaagctgaaggatttctcctcacccggcttcatcccgatgatttccctgtcgaagctttcgggcatgaagcccttgccgcacacgtaggtctgcgatgctgcgctcaggccgggaattcgcgtgccgtcttcctggaagcttctcatgctgatgaggatgctgtctccagggcgcacctcgtgctgctcggcggcggtcatgtactcggcgttcttctcggcaatctgtgcgatctgcttgtcgacaagcgactcgtcgacgctgaagggctgcgcggtaatactcacgggctcatacgacgagagctcgtagcgttgcttcgggagcatctcgagcgtgaaggtgaccgccttgccccgttgcagctggtccgtgcttttcacgctgggtggataggcggggagtactccgcttttgtcgatggcgagcggcacgagcgcctcgagggcggtctgacgcacgacggagtcgaggtctttgatgccgagctgctcctgcgcgacctggttcacggtcttgcccttttcgggccgcaggttcatgcgggtcgcgaagtcgtagtaggcggatgcgaaggccccgtcgacttcctgcgcggttgcatgggcggtgatctcgaccgactcgccctcgggtttcttctcgatcttcattgcttctcctctcggacttttcacgctcggcgtatgggtgcatctcgcaggtgcgctggcgagtgcgccgcattcgttacctgaatagtaggcgtaggcttctggtcctgcatgacctagaagtgctgaaaggcatggtctgagccccgatcttcgtcatgtggtgggtatgaaatgacggtttcacccgctatgggtgatgctgcgtgcacggcgcgcccgtatagtgtagccagtcagatttgaccgtctggctggatcgggaaaatccttattcccgatccaaagtgtccgacagaatctcccttttcctcttctggtcggcagcttggcccgggtgcttcattcacgctcagcacccgggcattttttttgcccaaaactggcacgaggggccgtgggtatcgtgccagtttggtccgatacccacggggatgtgcggacaatttccgatacactctatcccgccgccgccgtcgaccgcctg

SEQ ID NO: 531 - DNA, 2873 bp, Unknown
  16S sequences of unknown bacteria
ggggcgatgacgagcggcgcgcgcgtggccagcgccgtcgtcgtgagcagatcgtcggcgatgccgttggcgatcttggcgatgacgtttgccgtggcaggcgcgatgcagaacacatcggcctcttttgcaagcgagatgtggtggatggggtcggacgcctcgtcgaacaggctcaccgccacctcgttgcccgtgagcgcacgaaacgtcgtcgggccaacgaacttggtcgcgtgctccgtcatgacgaccttcacgttgaggtctggagcggttttctggatgccgcggacgatctcacaggccttgtaggcggcgatgcagccggtcacgcccagcagtacggtcttcatgcaagcactctccaacaggtagacgggactattctgcgtcggcggagacgatcaggatgcggtggcagtgggggcactcgccaacggccggccccttcttgaccttggcgagctgtccggtgagcagcacctggctgcacgcggagcacttcgcgtcctcgagcacgccgaccgcgatgccgtgcttttcctcgcgcagccgctcgtagcgcgacgcgagggaggcatcgagctggcctttcagaccggcgcgccgttcttgcagctgctcgagctcctgcttgatcttgccgcccttctccttgaagtcggcggtgaggtgctcttccttgtggtcgaccttgccgagcatgtcggcgacctggtcggcgagcttgtcgatcttgatctggcgctcgagcagctcgttttgctcgtcggcgattgccgcctggcgcttgacctgcccctccatgtccttggtgaccgagcgcgtgacgcggtaatcggatgtggcgtcgagcttggcctgcagctcgttgatcttgaggatgacggcttcctcttctgcctggagcttgaggagctttttctcggtgtcgtcggaaagctcgatgacctggtcctgcttggccttgatctccttgcgcttcgtgcggcactgcacgatctgcgtaagctcgggcagcttctcgagctcgcgttgcaggcgcatgcacgccgtgtcgatcttttgcagggcaagcagcgtttcgacttcggtcatgttatctctccgttcctggagtccaccaattacggcccgagcaggcaagcttgacgacgcgctcggcgtcgacgcctccctcgattatcgcctgctcgatgacgtcgacgagcgcgagctccgagcggtcgtgccccagctcgacgatcgagaggtagggctgcgcatcgatgcacccatgataacgcgtctcgccgacgaccatgcagtcgatgccgtcgcgtacgcacacgtcgtagagctcgggctcgttccacgagccgttcaaaaacgcgatgcggttgaccgtgcgctccgggtcgccccagacgcgcggatcgcccccgaacgccttcaggcacacctgggcgacgaggcgcaggctcgggcgcgcctcccagtcgggcagcaggatggccccgaaccccgtgccaaactgctcacgacgcgcgtcgagcaagaactcgaagttgccgtcgcaggtgcagccgagctgacgcgcgaaggcgtcgcgcgtcgcgatggcgcggtcggcgttcgtgtgcatggcgatgaggttgacgccgcggcgcgccgcctcgtaaaccatgcgcccgggccccgtcgtctgcacctgcgccgcaggcccgaactcgacagggccgcccttgatgaacggcgggggatgcgtcacgagcacgttgcagcccgcctctgcggcctcgagcaccgcctcgacgttctggtcgagcgccacggccaccttggagacgcgcgcgccgcggtcccccacggaaagcccgggctggtcccatgcctccgcgtcctcacgcggaaacgccttgaacaagagctcctcgagctcgcctaccgttgctggttgcatgtccctcatccctccagacgaatgtgccttctgtcgccgtcgcgagtgggcaccgtgacgtagcggtagccggcggcgcgcatgagcgcgcaggcgtcctcgacgcccgccgcgatgtccgccggcgcatgggcatcgcttcccaccgtgcactcgacgcccgccgcgaaaaactgccgcagcaccgcgagcgaggggtacgcctcgcccacgtccttgcgctgccccgaggtgttcacctcgatcatgcagccacgctgcgccgtcacgtgcgccatctccgcaaagtactcgcgtgtatcgaagctcgggcacagcccgtacttcttgggcaggtcggggtgcgcgaacgcggaaaacggcgcggggcttttcgccatgtcgagccacttctcgaagtacctgcgccaggtctcgtccacgccgagttcgggccaggctccgacgtctttggcatagtcgacggcgagcccatcgacgaagtgcaccgaccccagcacatactcgtacggcgcgcaaagcgacgcgagctcttctgcgcgcccgtcgagccagtcggcctcgatgccgatgacgagctcgagcggcgcgtgctgctcctccagcatcgcgcgctgctcgtgcagctgggacaggtagagctcggtctggcccttggtcatcgagtcgccgtgcgcggggtcgagccactcgggaagccacaggtgctcggtgagcgcgagcgtggcaagtccgagctcgcgcgcgcgtccgaccacctcggcaaccgtgcccgacccgtggccggagaaggcggtgtgcgtgtggcagtcgacgagctccatctacctcagcacctcgggaagcttctcgatgaacaggtcgacgtcgtcttcggacgtgagcgccccgaacgacaggcgcaggctgccgaaggcgagctggcgcg

SEQ ID NO: 532 - DNA, 4241 bp, Unknown
  16S sequences of unknown bacteria
ataaagccgcgcatgacataatctcccggggcgaagccgaatatgtcgtagccgtagtgaatacccccgacgatatccgcgcagacgtctccctgtctcccgaggacaacgttcccgaagccgcggaaaaactgcttgatttattatggaaataacccgaaaggataagaatatgagaaaagaactccccaaaacctactctccgtcggagtttgaagaccgcatctataaggaatggtgcgataataagctcttcactcccactatcgaccacaaaaaacagcattattccatcgttatccccccgccgaacatcacgggacagctccatatgggtcacgccctcgacaacaccctccaggatatcctcatcagatataagagaatgcgcggcttctgcacactctgggttcccggaacggaccacgcctccattgcaaccgaagcgaaaatcgttgaagccatgcgcaaggaaggactcaccaaggaagacctcggcagagacaaattcctcgagagagcgtgggactggaaaaagcagtacggcggacgcattattgaacagctcaagaaaatgggctcgtcctgcgactggtcgagagaacgcttcacccttgacgagggctgctcgaaggctgtgcgcgaggtgttcaaccgcctttacgaaaagggacttatctaccgcggcgagagaataatcaactggtgtcctcactgcaaaacgtccatctccaacgcagaggttgactacagcgagcaggacagccacttctggcacatccgttatcctctcgtaggcggcggcggattcgttgaggttgccaccacacgtcccgaaacgcttctcggagatactgcggttgcggtaaacccgaacgacgaaagatacaagcacctcatcggcaaatacgtaactcttccgctcgttggcagacgcattccgatcgtaggcgacgagcacgctcagcttgacaagggtacaggctgcgttaaaatcactcccgcgcacgacccgaacgactttgaagtaggcagaagacagcacctccccatggaagtttgccttactcccgatgcgaagattacggacaactacccgaagtatgccggaatggacagatacgaagcgcgcaaggccattgtagaagacctcagagccggcggatacctctgcgagattgaagacctgaagcatgaagtaggcacgtgctaccgctgcggaactacaattgagcctatggtttccctccagtggttcgtcaagatggaacctctcgcaaagcccgccatagagtgcgttcgcgacggcagaataaagttcgttcccgaaagattcgacaaaaactacttccattggatggaaaatacgcaggactggtgcatctcccgtcagctttggtggggtcacagaattcccgcgttctactgcgacgactgcggacataccgtagtttcccgcgaggacgttgacgtttgcccgaagtgcggcggtcatatgacacaggaccccgatacgcttgacacatggttctcctccgcgctctggccgttctccacactcggctggccggagaataccgacgatttaaagtatttcttcccgacaaacacgctcgttacgggctacgatatcatcacgttctgggtttcgagaatgattttctcctcgctcgagtacatggacgaggttcctttcgataccgttctcatccacggacttgtgcgcgacgctcagggcagaaaaatgtcaaaatccctcggcaacggcatagatccgcttgaaatcatcgacaaatacggcgcggacgctctcagatttgccctcgctaccggaaacagccccggaaacgatatgcgcttctcggacgaaaagattgaagccgcccgcaacttcgcgaacaagctgtggaacgccgcaagattcgttctgatgaacctcactatagacaagattgaagagccggacaagtcaaagctcgcggttgaggacaagtggattctcacaaagctcgaggaatgcgtaaagagcgttaacacaaacctcgacaaatacgagctgggcgtcgcgctgtcgtcgatttacgacttcctctgggactactactgtgactggtacattgagcttaccaaaacgtccgtatcttccgaggataaagaaagaagcctgaccgcgcagaacacactcgcatacgtactccgcgaaacgctcaagctcctccacccgttcatgccgttcatcaccgaagagatttactcatccctccccggcgaagaaggctttatcatggtaaaggattaccccgaatacagagaggacttcacctttgccgccgccgaagaggacatgaaccgcataatcgacgcgataaaagcgatccgtgtacgccgcaacgagatgggagtagttccctcacgcaaggcaaagctgttcgtcgagacaaaataccccgaaaccttctccggcgcaaccgcgttctttgaaaaactcgcctccgccgcttcacttgaagtagttgaagattacgcagacgaaaacgcggttaaaataatcacagactccgcaacgattcacatcccgctcggcgacctcgtagactttgaagctgaacgcgcgagactgaagaaagagcttgacgcgatggaaagcgaaatcaagcgcgcggagggaaagctctcgaacgagggattcgtaagccgtgctcccgccgcggttgtcgaagcggaaaaggcaaagctcgagaagtacaaggaaaagcgcgactccattaaggaagcgatagctaagctcggctgatatgcagaattttgcaagaatattcataactaaaaagggtgagcttcacgcgaaaagcggtcatccgtgggtcttcgagggtgaagttttaaaaattctgccgccgacagattgcgaaaacactttcgattatactcccgaggacggaactcttgtcaacgtgttctcgcggacggaggaaaagccgtgctacatcggaacgggattttataattccgcgtcaaaaatccgtgtaagaataatctcgaccaacgcgaacgacagatttgacggcgaattctggaaaagacgtgtgaaatacgctctcgactacagaaaaaccgtcatgggagaggatttccactcgtgcaggctcatctacggcgagtcggatttattccccggacttgtggcggatttgttcgagaacgttctcgtggcgcaggttctctcccgcggagcagagcgcgtaaaggacgtaatatttgccgcactgcgtgagcttctgccggaatacggtataaatatacacgcgatatacgaacgcaacgacgtgaacatccgcgaaaaggaaggcatggcggagtacaaaagctggtactggcgcgacgatgaagcggacgagagcggacacgttctgataacggaaaacggcataaagtacgacgttgactacatcgaggggcagaaaaccggctatttcctcgaccaaaagtacaatcgtaaggccgccgcaaagctcgcgaagggaatggtggttctcgactgcttcacccacacgggagctttcgcgctgaactgtgccgccgccggagcagagaaggtgacagctgtcgatatttccgctcttgcaatcgagcaggtgaagaaaaacacggcgctgaacgggcttgaagacaggatggaatacctttgcgcggacgtattcgagctgctgacggagatggcgaagacgaaggagaagcgatacgactacatcatcctcgacccgcccgcgttcacgaaatcctccgccacggtgaaggacgcgtatcgcgggtacaaggacataaacttccgcgcgatgaagtgtctgccgaggggaggatatctcgcgacgtgctcctgctcccacttcatgcggaacgatctctttgtgaagatgctgcacgaagctgcttccgacgcgggggtaagtctccgacagatagaagcgcgcgcgcaggctcccgaccacccgatactgtggaacgtccccgagacggactacctgaagttctatttattccaagtggtataaaaaacaagactttttcatagaaagagcgcagctattttctttacctcagactactttatccctttgggaaagcagactgaggaagaaagagctgcgcttttttggcgttcactttggcttcaagtgaatgaggaagtagaaagagcttcgctctttcagattaattaaatctcactgcggtgagggggc

SEQ ID NO: 533 - DNA, 2517 bp, Unknown
  16S sequences of unknown bacteria
gtgctggtggaaaacggcggcagcggcgcatccgcggccggcagtgtcgcagccaaagtactgactgcagctgcagaagcaggctattaagcagaaacaatggctgctgtatatccttacaggcagccattgttccttttttactcttccctatccaaaactttttcgaaattctttggtttttcttaagtttttctttggttacagggtgacaaaccgtttattttatgtcataatattgtttttggtaaggcatatgccccaatttttcgcacgacacgaggagaagtaatatgacgggacactatatgtacggctgcgattacgatcactttcgccgcctgctggcggagcaccaggctgaccttgatccggcacagcgcggacgcattgaggaatgtttgcgctattcccgctttctcacccgctttgcaaaaatcgagcgttttttctgggataagcgcatccgcgccgtagaggtcgccaaaccacccctgtttatccttggtcactggcgcagtggaacgacatatctgttcaatctgctttcctgcgatccggaaacggcgtttatggattccatgaccactttcacctttcacaactttctcctgctgcgctatcacctgcccaagcactaccgcagcaagctgaccggcgaccgcttcggcgacgatatggagtttctgccccattcgccccaggaagagtgctatgccatcgccaactgtatcgacgagaccttcacccacctgattacctttccgcaaagctatcaggagtatatggatctggcttttgaagacggcatgaccgacgcccagaagcagcgctggtgcgccacccacgaatacctgctcaagaaaatcacctattttcgcaagggaaagcgcatcctgttcaaaagcccggacaacactgcaaaaatggggatgcttcacgatttgtaccccgatgcaaaatttgtacatatctaccgcgacccctataaggtgctcctgtccacgattcatatgtttgaggcaggcatccaggccatgacgtttgaaaaggttccgccccacgcgctgattgaggacatggccgtgcagttttataaacgcatctatctgcaatacctcaaagatatggcccgggtaccccgggagcagttggtggaaattgcctacagcgacctgacccgcgcgcccattgacacccttgcacagatttacactgctctggatctgcccgggtttgaagcggcccggccgcagatgctcgctcatatcgaaagccagcgcgcttaccgcaccaaccgctttgagctgccggacgccctgcgccgaaagatcaaccgcgaattgggcttcttcttcgaccattaccacattccgatgcagacggaaaaaggagactgaacgtcatggatcacaagcaaatggattatctcgacaagctggaggccaaaagcatttacatcctgcgggaagcgtatgcctctttcgacaaactgtgtatgctctggtccatcggcaaagactccacggtcttgctgtggctggcgcgcaaagcctttttcgaccacgtgcctttccccctggtccatgtggacacccactacaagatacccgaaatgatcgaataccgcgaccgtctggccaaggagtacgggctgtatatgatctacggcgaaaacagcgaggccctgaaaaacaagcagacctggcccgatggcaacgtcagccgcttggagtgctgcaaaaacttgaaaaccgaagccctgaagcacaccctgagcggcgagtggccccgttaccggctgaatctgcagaccgggaattacgaagtagacaccgaccgcaccgcctacactggcgtgatcgtgggcgcccgggccgatgaggaaggctcccgctccaaagaacgttacttctctccccgggacaaaaacaacgactggaacgtggacgatcagcctccggagttctggaaccagttcaaaaccgattttgcccccggcacccacctgcgcattcacccgctgctggactggacggagctgaacgtgtgggaatacattgagcgggagaacatccccaccgtgtcgctgtactacgaccagggcgacggtacacgctaccgctctcttggctgctggccctgcaccaaacccatccgctccacctccaaaaacgtccgggacatcatcgacgagctgcgctccggcgccctggcaggtattgctgagcgctccggccgcgcccaggacaaagaagacggcggcggcttggaaaccctgcgccgggacggttatatgtgagagggggtacgcactgtgctggaagatatcatgaacatcgttgtcgtgggccatgtggaccacggcaaaagcaccgtcatcgggcatttgctggcggatacagattcgctgcccaaaggcaagctggacgccattcgggaaagctgcaaacgcaactccaaaccttttgaatacgcttttttgttggacgcgctgaaaaacgagcagtcccaggg

SEQ ID NO: 534 - DNA, 12329 bp, Unknown
  16S sequences of unknown bacteria
gggagcttgctcccccgtccaccagcgtgtcaaaaagacttttttgacacgctgaaacgcgcaacgcacgcaaatcctgctcgtaaacctctttcaaacggggattgtacagcaccgaagccggatggtacaacggaaaaattcgcatatcctccgccgccagcagcttgccatgcgcttccccaatggtgtatcccttgcccgccagcgccttgagcgccacattgcccagcgtgaccaccaccggcgcttttactgccgccagttcgcgcttgagccagggcagaaacagggcgatctcttcccgcgtgggcgggcggttcacaattcgccctgcctcgcttacgcgcgtcggccggatttttacaacgttggtgatgtacaactggctgcgttccaggcccgttgcccgcaaaaattcgtccagatttctgcccgccttgcccacaaagggcttgcccttgagcgcttcctgttcgcccggcgcttcgcccacgagcgccaggcgggcgttctcgctgccttctcccagcacgagcggcttgctttcgccctcgtacaggtcggcgaaaaacgcgcgcatttcctggttcaacctggaaagcttcaaattttctccctccgcactcccagcgctattcttctggcgaaataatggcggtgttgatggcgtattccaccggcgcaagcgtgacgggaatatccgaccgcacccaagaaaccagcgccgtaatgagcatggtgcaaacgaggatcacagcgcaactgcccaccacgcccaaaaaatccatcgtgcccgccatcgccataaaccgcttgcggcgggaacgcatttcgcgctttgtgcgcaccttcgccatgttgctccctccttatttatgcgtggaacgccgccactttatccctgtctggcccattcccctattatttagacggaaaaaatcgaaattgggttcccgtctacacgtaatcgcgccattcgggcagagtatagtcgctttccccggcaaggccagggaaacccagctgccgcagcgcttcatacgccacaatggcgacggaattggaaaggttgaggctgcgcgcttcccgccgcatgggaatgcggatgcacgcttcctggtgctccgccagcagcgattccggcaagccgcgcgtttcccggccaaacaccagaaaatcgccctcgcaaaattccgcctgcgcatagctttttttggccttggtggtggcgaaaaacatgcgcgcctgcgggtatgcccggcaaaaatcctgccaactctcgtgcacatggatttccgccaaaaaccaatagtccagcccagcccgcttcatatacttatcgtccagcgaaaaacccagcggcttcaccaggtgcagcgcgcaccccgtggccgcgcaggtgcgggcgatgttgccggtattttgcgggatttccggctccaccaacacaatgttcagcatagcaaaagctcctctatggtgcgcgcaacgccgtcttccgcgttggaaggcgcgatgtatttggcgcgcgcgcgaatttccggaaccgcgttttccatggcgaaggattcgcccgcccattcgagcatttccgcgtcgttccaataatcgccaaaagccatcacctgttcgcgtgcaatgccgtaatgcgcggcaaggcgcgccaaccccgtgcccttgttgatgccgggctgaatgatttccaggttgtcccagccggaggaagcgatgtccaccggaaaatcctgcagcgcggcgcggatgcgtgccagcttgtccacatcccgcgacatggcgatcaacttatacgcgcagggcgcaccttccacatcggtgcgccgcggctgttccacgatgatttcgtggcgcatgccgtcttccagcacgagctccggcacattatgaaaatcaaaatgcgcgtccaggaattcgtcgtaaatatcatagcgcgtgaacaaatcgaaatgcaccttttccgcgcgcaggatgggcaggatcgcgcgcgtcaccgcttccggcaaaaacgaatcaaagatcagcgggcccatgcacgaagcgtccccccgcacgccgttcaccgatagcatggggctcttcaagcccaattgcttataatacgcgcgaatgttgaaaaaactgcgcccgctggccagaatcacctggattccgcgctcttcacagcccacaagcgcgcgcgccgcgcgcggcgatatcgtgccatctggcaaaagcaaggtgccgtccatatccatggccaccatgcgaattttcatcgtatccctcattccccgaaaaactttccctttggcgctgaatacgcttccacgccgccgcattttagccgcgcgcaccacagttgcggcacaaaaatgcccagcgtccggttggccgcacgatcgccatatttgtcgtcccccagcaaaggatggcccgcgtccgccagatgcgcgcgaatttggtgcgtacgccccgtcagcaattccacgctgagctgcgtaagccacactccctgttcccgcgattgacccagcgcgcgatacctcgtcaatacgcgccgcgccccgggaaccggcgcatggcgaatggcgacctgcgcgcgttgggcgtctttttccagatacccatccagcaaccgctcgccttccacgcgccccaccgccaccgcgcggtattccttttgtacgccgccgctggcaaacgcctccagcagcgcgttcaggcccgcgggcgttttccccgccaggagcacgcctcccgtgcccgcgtccagccggtgggcaatgcgcgcgccaggccgcaaccgttccaacctgcgcgctacagtgtcctcgccgaccccatccgcgtccacatccacgggcaagccgctgggcttttccaaggccaggatatcgccatcctcatacaaaatggatagcggctgcgcaaagaggctttcctccggcaaatacacgcgcacaacgtcgccaccccgcacgcactgcgcgtctttgcgcccattcacgcgcacatcgcgctttttcagcgcgtcacgcagcgcccagccagctagcatgggatatgcccgcgccaaatacgcccgaattggcatttcccgcacgcctttgggcacgcaatgttccaccatgcgcatccccctttttccgaatactaccacattttcgaaccaagcacaaggcaaatttgatgatttccgggaaaaattgatcacaaagcgaaggagccgcctcaaccggctccatatgagccaagagaatcagccccttttcgttcactggccgcaatccgcggcgaaaaaatcattgcgccggcttttctccctctgacgcctcaacacttgcctcgctttttgcgctgcctacctccgcatccccattcctgcccgcctcgggccaatggatcattccctcgtgcgtttccaacgccgccccacactgcacgcagaaacggttttcccggctctgcaccgcgccgcagcgcgggcaccgccgctcggcgcgcaacgcgtccagctcgcacaaaagcgattccatccgcgccttcatgccatcgatccggttgaccagttccgccgcgcgtaaggtgtccttcgcgtaatgcgcttcgcccagcgcgcgaaacgcctgcgccatttcattcctggcctcgcccagctcggcattgcgccgggcggcttccgccaaagcgcgggcgcgcgcgcctacgcctttcaacttatccatgcaacgccccctctctttgccaatgtattccagcgagaaggcgtttcatgcatggacaggccgcgcgctccttaccactcggttacacagccgtccgcgtcgcgccaaatgggattgtgccaatcgtgccctttcatcgccatttcgcgcacataatcttcgtccacttccacaccgaggcccggttcgcgcaggagatgcacatatccattctcgtagtggaaaacctctggattcttgatatacttgagcaaatcataccccacattgtaatggatgttcaagctttgctcctggataatcgcgttgggcgaacaaaaatccacctgcaagcacgaggccagcgcaatcggccccaacgggcagtgcggcgccaccgccacatcaaacgcttccgccatggcggcgattttgcgggtttcccaaatgccgcccgtatggctcacatccggctgcaaaatgtccacgccgccgcgcatcagcatgtttttaaagccccagcgcgtataattgcgctcgcctgtagcaatgggaatgtggcaagtgcgcgccaattccgcgaacacttcttcgttttcacacagcaccggctcttccacaaacatcaggcggaagggttccagttcgtgtatcaactgtttcgccatggttttgtgcacgcgcccatggaagtccacggccacgcgcaactggttgcccactgcttcgcgcacagccgccacgcgttccactgccgcgtccagcttatcataggaatcgatccacttcaattcgtcggtgccgttcatcttcaccgaatgatagccctgcgccagggcctcccgcgcctgcgcgcccacgtcccgcggatggtcgccgccaatccagcgatacacttccacgcggtcgcgaaccttgccgcccaaaaacgcgtacacgggcaaattgtgatatttgcccttgatgtcccacagcgcctgctcgatgcccgaaatcgcgctggtcaaaaccgggccgccgcggtaaaaactgccgcggtaaagcatttgaaacacgtcttcgatttcgcccgcatcgtgcccaatgagcgcgttgcccatttcctgcacgcacgtagccaccgtcgccgccttgccttccaccaccggttcgccccagcccacaatgccggactgcgtggtaatcttcacgaacagccagcgcggcggcaccaggaatccctctacactgcgaattttcatgcgcaagccctccttttgctatatcattgccttggtcactgctcctccgcgccaatggcaatgtttacgccatttactgccacgccttcatcggcgcgaatcaagagatatttcacgccgtcaatcacgcgggtttccaccaaatcgctccgttcaggatttacatgaaccaccacgtccggcgtgcgcacctcaaagcgcttggcgtccaccaaattctgcgcgctcagccccacgccgagcccaaattcctcgttgtacttttcctcaaacgcttttacactttcctcggaaatgccgcaagcttccagcacgtttttcacttccgcgcgcgaaatttccggcggctccgcttctttgtccgaagcggtttcttcaatgcggttcacgatttcttcgcgcacggcctgcgccacttccaggctcaattcgtcgcccagcgcgtcctccaaaacggactgaaacgtttccctttgttccatggcgggcatgggcgcgcccacctcgcccatcaccgcgctgatccattcgtcgtggcggttggccgcgtcgcgcgtgaaatacagcgcgccagaaatgttgggcgcgcggtcgtcaaaccgggggaacaaaaagcccagctccggcgaggaaacgacccaatccatatcgcggctatggaacgcattgtcctggtcaaaatagctcaaagccggcttggccagcttcaccgggcaaatggcgcacaaaatataggaaaacacctcgtcgcccgcgtcctcgtccatctcctcgccgcggtcgcgcacccgcatgggtacgtcatatgtatcgtgcaaaagcaagatcagataattgccttccatttccagcgaatcgatcactgcctggtagaacgcttccaccgtttcctcttcgcgcaacgcgccattgcgcagcgccatgagcagcgcatgttgcgcgccttccatcacctgatccgcggaaaaatccaattccaacaagttcctggttggcacgccagaaagcgtgcgcttgaatagagaaagatatttttccgtttcttccatgggcaaagtcagcagcgaatgggtaaaaacggacacaatctcgcgtttttcgttcacatagcacccgcgcacgcaggaaatggcattttgctccggattcagccggcggcgaatttccgcaatttcttttcgattcatgattttctcctcatttgcttctatggcgccgccaatggacgcccacgatacgattatagcacaagtcgctcattttttccagcaaacagtttgaaacgatcgcgtcaagctggctttgccgtattcaagaccgctttcgaaattggcgcgttcttccttgcccctattatactcgattgtacgcacaaaaacaatacgcaaaccagaatgcatagaatacaaaaaagcgccgccatcctgatgctatttgtataaaatcatagcgtttgcttggcaaatagcaccaattgtaatacaaataaacccctttcgccgttagggacactttgcgccaaggggcttcaaccgtagtctgccggttgaagccctctttaaaatcagctatacgcccagcaaataaaagccaaggtattgctcacccgcccgcaaccatctacacagaatttgatactctggcggctttttttctgcgagtcgttctatcatattgttggcttgatctcttgaatagaaattgatcccccaaagattcatcgggccgcaatctccattgttatagatgccacccgtaatgatatctccataatgctgataaaagcgctccatgtcatcgccgcagatgtataaagagtcatctttccagtggcttatcgcatcaaccgaaacgattttccggatggaagtcccttttgccaatctacagtattgaatttcaatgaaatccgccccaccaaactccctgcgttccacttgggaatggaatgaataaaacagcaacgatctcacctcaaagcattgcggggctgggcgtcaatgtcctgtccgccgtacataacgcgaagcactgtaacggttttcctgatggttcgagatgtagaaccctagggaattgtccaccgacatgacccggaaccgctccggcatctcatccagcttgaggatattcttctccaagcgattcaactgaccattggcgtttggctccgactgcggtcccgctgcgatgtaacggcaaatttcccgcaggtcgcgctttgcttccgaggccaacgtcaccccatagcgcatacgccaagttctttccgcagctcgtcaaacgcctgttttgccgggacggtttgtccggccttcatctgggcgtagcccttctccagttccgtatccagctgttctaccgtcatgcgattgacgtccagcggatactccggaagctttacttcaaagggcagtccccactggaggatgacctgcttatagaacatggtgatggcgttggacgccgggatgcccagggcgctgaggatcgcttccgcctgttccttgacctccggctcaatgcgcgcatacaggtttgctgactttgccatatccaagactcttttcagaattcgtgtattcttccttgtctccattatactctattgtacggacaaaagcaatacatatcctgattttgaaatgaaagaagcaccgcaatcctgatacccattgtatcaaaatcgcggtgcttacttggcaaatgaccctaattgtgatacaaatgaaccccctttgggcgtcagggggttcactttgcgccaagggggttcaccgattcctgaggccggtgttctccgagccgcgcacttcctcgtgataaaagtaatccacgatgaccggatgccccggctctgcccggccgtaggggagttcgttgtccacaaagggacaatcatattctctcgcaaggcgctctgcccgctcctccaactcccggaaatagcccctgtctcctctggtatagatggcgttgtacagcggcatgaggtcagggtatttctcctgaatataggccaggatgtcttttttgaagccgccccgcaaattcagattttccagccacaccaggtcgcactggcctttcacccggtggaagatggcctcgaaatccgtgataccgggaaaaaccggagcgataaagcacacggtgcggatgcctgcatcatagacctgcttcatggcgtccaaccgccgctggatgctgacggcattgtccatgtcatttttgaaaccctcatccagcgtgttaatcgaccaggaaacagtgacttttcccatctctttcagcaagtcgatgtcccgcaccaccaagtcggatttggtacagatcagaatctccgcgccgctgcctttcagctgctccaacagcctgcgggtattgccgaactgctcctcctgaggcaggtatccgtctgtcaccgagccgatgactacacgctgcccggcatacttccggggatttttaatggcaggccagtgtttcacatccagaaaggtgccccatggttcggtatgcccggtaaatcgcttcataaacgaggcgtagcagtacttacagccgtgggtgcagcctacataggggttcaccgaatagccgcccactggaagggtggatttggtcatgatgtttttcgtttccacatcccggatcaggacaccgctttccactatttccgccatgctttctgttcctccaatacccggcagaaggccgggggcagctcttgtgtcatgctttcctcgccaatgataggaagcaaatcttccttcatgaacacaggagtaccaagtgcgtgagcctgatgagtcaaattccacacccactccggtttggagacggccttgcccttcctgcgtccagtctcagtaccaatgacgatccattcgatgccagtgaggtctactgtaccgatgttgtcaaacatgggttcaaaggtcacatggtaatgcccgccgcggatgtgctcccgtaaagtctggatgcggcctttctccctgctggaagtcacagtcacgccgaaccaggcattgtctaatggggtggaaaagacgatgtcctccggccgcttggtcaagaacagatactggtgctgtggattttcagccattttggaaaatacctgatctcgccactctgtctgccagtgggcaaaatcgctcatgccggtgagcaggaaattttgaggacgcttcttctccatcagccgcagcttacctgggaagaactccggcttttcaaagtcgtcgatcatgtggaaccggcggacattgtttctggcgtagcagtagctgcagccaatgggacagccgatcaccagattcatattctgaatacagtccttgatgcagatggccaccgctgacgcctccttccggttttaagaatcagccctctaccgcaggtgcgacctttccaaagccgttccaagcatacaagcccttcttctcctcatcgcccaggaacttatctacctggcagatgtgcaggatgtggtcgcccacctccacggactgctgcaaggtagccaccatcgccagccgggtgtccgctggaatctgaatgtcgctgccgtctaccgacttcatttcgatgtgattttcggccaccttgtttaacttggcgccggtggaggtgccgcaggccatcactgcgccagccagactttcactggggaccgtgacgatgacttttccagtctcccgcacacgcttgccggtgtgggactgctttccggcggcgaatcccaccatcggcgggttgaaagagagataggagacaaagcagatggaggccaggttggtggtgccatcttcattcaaagaacagatcaaagtcagcggattgggggaagaatagacagtggcctccataatgttcagttctctcatcgtgtttcatcctttcagagtgatttggagattgacatatccagcttctgctggtacaattattatacttgattgtcataataaatcaagtacgcaaattgtttgtacctggtatcaaaaacaatacctgtctaaagtggggaatcaacaatgacttacgaggaattcaaagaaaaggtaagcaacgtcattcttacggagagtggcaattgccctgttatgccggtggtgcagatgctgcagggtaagtggaagctccagatcctctatgagctgtgcatcaagtctcccatgcggtttggcgaactcaaaaagctgctcaagcccatcaccaatacggcgctaaccaatgcgctcaaagaattggaaaaggatgaactggtgcagcgcattcaatataatgagatgccgctgcgggtggagtattccctcacagagaaagggcaggacttattgccagtgttttatgctatttcacagtgggggatgaaatacattccataatagtaaaggggacggaaaccttccgcccccttttttaataaaattgattcttattcaagcatctcatgccccgtctggaatttgaatgtcagctgtccgtcccggtggacggttacggtatcgatgaccgtgagccaaagccggtcatcaaactccgtgagggactctccgtactccgccagttcgaacataaagccgccaatgtcctcggccttggcttcccgctgggcctttgccgcctggagcttttccagcttggccttggcggactcatatcgctctgccagaccgttatagcgttccaggtaggtggcctggtcctgagcagtggtggagttctcctcaatgcaccgcttggtcagctcgaccaccacctccatttcggataacaaggccgcaatctcgctgtccagggagccggtatcggttagcgccgcctgcatggtgcggcactcgtccagcaaccgatctttgtccgcaaccagcgcgttaaacgcatccaggaaccgggctttgatctcctcctcggttaggtgtggagtctggcacgtttcctcgccggtgaacttgctgttgcaccgccagatggtgcgccggtatttgtcggtggaatgccaaaccttcgacccaaagtaaccgccgcagtctccgcagaccagccgggaggagaagatactgttgccgctgtaactgcgccctatggacttccggcgctccagttcccgctgcaccagcttccactcggcggggtcgatgatagctgggtggctgttctccacataatactgcggcacctcgccctcgtttttcttctgtttcttggtgagaaaatccaccgtgaacgccttttgcagaagggcgtcacccttatacttttcattttcaggatgctctccacagtgcttgccgcccactttttcttgccggcgggggtaggtattccttccctggtgagaaggcttgcaatggagcaagtggtcttgccgctgaggaacaggctgtaaatccagcggacggtttcggcttcctccggcacgatttccggcaagccattctctcctttccggtagcccagaaagtggctgtatactgctccatagctttttaccacaggcaggacttccgacagtttcgtcaaaatacggcgctgctcatcaagcggcggaattggtgtaagatacgctttgatggtcgatgttgcgagttctttctgcttcgtagtaccgtccgcctgatcttctataacgctttgtacggttggattggcaaaatagtagtacaagtattccggcagaacaaactgtttcaaaggacgtataatggtgacgtggctgtctgcaacagccagttcatacggatttgctacagttttataaatagccattcgccccaatgtgccaaggccagtagagttccacattaggtcattatcctgcaaaagacgctccgatccataggaggacagagaatctggctcaataaactgtgccttttcaattgaaaaaccgctccattgattgcacttctgggcgattacggggtactttttgattggagaatacttcggcgattttccacgctggatatactcgcagacatcaatgagccgaacccactcccacgaatcggggatgtcaaacggtacctcatctgccagcgaccgcacttcatcgtcgattttctcataaggcaaattatcggacgttaagtaaagataaacgatagcccacaaattaaacggtagccctaaaaacaaacgatagcccgctgtcatccgataccttcgaggagcggattgccggtgggctatcgatctactgggcatcagcaaaatcctcaaaagcccaaactcccttgaaatcagggcttttgggcaaaaagaaagcaccgcaaccttgatacccattgtatcaaaattgcggtgcttctttgcggaatgaccgcgaaaacaatacaattcggggctttcgttttttagtcgagct

SEQ ID NO: 535 - DNA, 24208 bp, Unknown
  16S sequences of unknown bacteria
gagatctataacaagcataaccgcagctactttgaagcacttgaagtaaaagctgcggaaatggctaagaagtatgattgtccctttgtggataatgaaatgccttatggcagagtcccgcagggacatccggtaatcgtggattatttctatcatgaggaaatcagagggacagaaaataccggaaaaagaaatctttaaacagaaattgaccgagttctttgaacgagggagactcctcgtccgaagagcaagaaggtgcagccgagaaaacttggagcaattccggtttgtcgaacaacaaacgaatcacttttattacaccaccagggagaaatccccggtggtatttttatgcccggaaggaggtggttttcatgatcccggtgctttatttgcccagcaacatcaaaagcatcctcacaaacgagaagaaaagttcgtcatcagcttcattatttttccgaatacgctttttggggacaaaatgattttaagtatgattatgatgagcgttaccccgatgagagcgatgttcggttgataatttatatgtcataaacttgaaactgtatttttaatattgcagaaaacgcctttttctgatataatatctataagagattattcacaaagatataggtgatttcatgggagatcaactttattaccattactatagtgctgctcaaaatgaaaagggcgataattattctttaaaaaacttaaaagctggtaaagtaagctttgctcatataagttgttttaatgatccgtgtgaaattgctcttttgccggatgaaattccttttgatacaaccaattcggatatgaaatacaagtacgagctgtacattcgtgttttctgtttttctaagacttttcagaacccacttatgtggggacattacggaaattcccacaaaggattttgcgttggttatgattataatgacatattaaatattcccgaatataaagggaatcttcgttttgaagaaattacatatacagatattatcccgtcactttcaaatgaagaaattaacagaggcgaggccctttattacaaaagctccgattgggaaaaggaaaatgaatttcgtgctaccatacgcttacctaataatgatgatgaacatatcagtgaagcagagtttaagctggcaagagaagaatggctcaaatcaaatcctttttttgaaaaagcggtagattcccatttaagattaccttttcctctgtcttcaaatgttaaagaaatacgaaggcgcatccaaacaattcgtaaagatattaaaagctttgaaagcaagaattatgcttactgtgcatttaccaacaaagcaatcggtggaacagtctacggaaaatttccgatgcgagttgattgttcattaaaagctaaagtaatatatattgggctaaatacttcagatgaagtaagaaaagaattaaaagaatatgcaaagtcaaatggcttagatatatatgaaatgggcattgaacgaggcaaatattcatttattccgaaaaaaattttactgctgtaataggttctgagctaaatattaatcccaatataattttctcaattcttatatgtctcccacagaaaaattactttttacgaagtgtgatttacaaaaaaacaaggtggcatcataatggttcgcaacagccattttaaagaaatcgcttttttagcggtttctttcttttttccagtgtttatgcaggtttacagcttgtcaatatgcgaaacaaatatatcgccatatgatattttattgcactttttgaaatataaattgccacgataatttgtccttggttgaatactctatcgagtccatcttgtctgttgccgccttgcgcatttccgttaagcacggccttaacgtctgtgtgatcagatcgtttaaatcctgatgcgtcggaagttcggatattaaatccgtgtttcttacaatgctgttcccaactgtcgaaaagtattccgctatcttgttgtactgttccaatgtcagcagcagatactgaggctgtatcggttcggtcaatgctgctaccgtttcctcggttatctgctctatcggattgttgttaccgcataatctatcgcatttgtcagcttcagctttttactgtcaccgcgcaaagcggtgcggtattctcgccgaatgatagatttctgtttaggcttctgatatggtgttaacacctctaacccaaaccgctgacagatagcatctgactgatgtttaattcggttatgtattcgtctgtaaggaggataaacaggcataaaaaaagaccgtaaaatctttatatgtaataaagaaactacggtctatatatatgactttagttcgagtccgggtggtgaggcagcaataaattctcatataaaaaatgaggtctgattttgagaaatatacgcttccccggttcaagtccttttagtcgaacattctattgggttttgtggcctaaaattatcttttgaacattgcccctaaaacagcgaaaaacccttgatttctcaagggttttcagcttttgtgctttatagtcgcacaggtctggagctgctaaccggaattgaaccggtgacctcgtccttaccaaggacgcgctctaccatctgagccatagcagcatatatgttcgcgactttgttattatacgataaagcgcgaacaatgtcaagtaaaaattctatatttttcaaaaataaagaaaactgttttaaatttatcaaatgcgtgttgacaatatttcttccttttcccgcttgaactcggcaaagcagccgttatcaagcgcgtttcttatatcctccataagatgattgtaaaaccacaaattatgcataactgtaagcctttgcgaaagcatttcctgacttttaagcaaatgcctgatatacgccttgctgtacctgctgcaaacagggcagccgcagttttcgtctatcggggacatatcgtactcatattttttattgttgaggtttataattccctttgaagtaaacaaatgcccgtggcgcgcgttgcggctcggcattacgcagtcaaacaaatcaaccccgcgttccacggcgttgagtatattcgcgggcgttcccacacccattaagtaacgtattttattttgcggcatatgcggcgttacgttatcaattatatcatacataacctcggtaggctcgcccacggcaagcccgcctattgcgtagccgtcaagctccagctcggctattcttttcatatgctcgacccgcaaatcggtataggtgcagccctggtttattccgaaaagcatttgctctgggtttaccgttccgggcattgcatttaactccgccattttctttttgcagcgcgcaagccagcgcgcggtgcgctcgcaggaggctttggagtatgaatactcggcggggttttcaacacattcatcaaacgccattgcgattgtagagcctaagtttgactgtattgtcatactttcctcaggacccataaaaatacgcctgccgtctacgtgcgaggcaaaggtaaccccctcttcggttatatggcgcaggcttgcaagcgaaaacacctgaaacccgcccgaatcggttaaaataggtccgtcccaggttgtaaacctatgaagaccgccgcagccgcgtatgacctcatcgcccgggcggacgtgcaaatggtaggtgtttgaaagcattatctggcagccgagagtttttaagtccccggcggaaaccgcgcctttaattgccgcggcggttgccacgttcataaacgcgggggtctgaacggtgcccctgttggttgtaaattcggcgcgccgcgcgctgccctcttgttttaaaagtttgtacataaatctattcccttattattttataaaatcagcattgcgtcgccgaagctgaaaaagcggtatctttcctttacggcggtattgtaggcgttcataacattatcgtatcccgcaaaggcggagaccagcattataagcgtgctttctggcaggtgaaaattggttataagcccgtccatacacttaaattcaaagccggggtaaatgaaaatatcggtatctcccgagcactcttttatctcgccgtatttctttgcgcagctttcaaccgtgcggcaggatgtagtgcctacgcatattaccctgccgccgtttttgcgggtctcgtttatggttttcgccgcttcctcgggtatgtaataatgctcggtgtgcattttgtgctgcgttacgtcctctaccttaacgggtctgaaagtgccgagccccacatgcagcgtaacataggctatatttacgcccatagccttaatgctttcaagcatttcctttgtaaagtgcagacccgcggtaggcgcggcggcagagcctgcatcctttgaatataccgtctggtagcgttccttatcctttagcttttcctttatatacggcggcaggggcatttgccccacctcatcaagcaccgcgaaaaaatcgccctcgcaggcaaattctatcatacggttgccgtcctccaaaacgtcggtcacgattgccgtcagcttatcggaaaacctgaatttataccccgttttagcctttttgccggggcctgcaaggcactcccaaagcttattgccgtgctgccgcaaaagcacaaattccactaccgcgccggtatcctcccgcgtaccgtaaagccgcgcgggtaaaacgcgggtattgttaagcacaaggcagtcgccgggctttaaaaactcgggcaggtcataaaaatgcttatgctctatttcaccgccgtttcgcggcagcaccataagccttgaagaatttctcggctcaacgggtgtttgcgctataagctcctcgggcaggtcataataaaaatcgcttgttttcataaaataatccacaacttctttgatatttcggcataaaataaattgacaaacattatctataatgttatatttaattatattgcataaggcaatataattcaagattgaattttaaaaaatgtcttcagaaggaatgtgtttttaaatgaaaaagtacaatgtcggcataatcggcgctacaggaatggtaggtcagcgctttgcgctgctgctgcatgatcacccgtggttcaatgtgaccgcgcttgccgcaagcgcaaattcagccgataaaaaatataccgacgcaataggcagccgctgggctatgaaagagcctattcccgagaatttgcgggatatgaccgtttttgacgccgagcgcgatattgataaaataaccgaacgggtagatttcgttttctgcgccgttaatatgaaaaaggacgaaataaaggcgcttgaagaaaaatatgcaaagcatgagtgccccgttgtttccaataacagcgcgcaccgtttcacgcccgacgtgcctatgataatacccgaaataaacgccgatcaccttgaaataatacccgcgcagagaaagcgcctcggcacaaagcgcggctttattgcggttaaatccaactgctcgctgcaaagctatgtgcccgccctatacccgctcgatgaaaaattcggcgttgaaagagtgcttgtttccacctatcaggcaatttcgggtgcgggcaaaacctttgagcgctggcccgaaatgatagataacgttatcccctttataggcggcgaggaagaaaagagcgaaaaagagccgcttaaaatttggggcaaaatagaaaacggcgaaatagtaccggcagaaagcccgaaattcaccgctcagtgtattcgcgtgccggtatcggacggtcacttagcctcggttttcgttgattttaaaaagaaacccaccaaagaagaaatacttgaaatatgggcgaactattcgggcgagccgcaagcgctctccctgccgcacgcgcccaagcaatttttacattattacaccgaggacgatatgccgcaaaccagactttgcagagattctgagggcggtatggcaatatccgtcgggcgcttgcgcgaggatacgcagtatgattacaagtttgtctgcgtatcgcacaataccctgcgcggcgctgcgggcggcgcggtgcttttagccgaattattatgcgcaaagggttatatggactgattttataagaaacggagtggtcttttatgaaaaaacgtatattcacgggagcagccacggcacttattacccctatgaaagcagacggcagcgtaaatttcgagcgccttgaaacgcttgttgacgagcaggtaaagggcggaattgacgcgcttgttatctgcgggactacgggtgaaaaatccacgcttaattatgatgagcacgttaaggttattgaaaccgccgcaagagtaaacgcgggcagagtgcccattatagcgggcacgggcagcaacgacacggtgtattcggtagggctttgcgaggacgcagaaaaggcgggcgccgacgcttttcttatggtaacgccgtattacaacaaaacctcgcagcgcgggcttgtggcgcactatacctacattgccgaccgcgttaataagccgataattctttataacgtgccctcgcgcacgggggttgcaattaagcccgaaacctacaaggagctttcaaagcacccgaatatagtagccaccaaggaggctaacggcgatttatcatcggttgcgaaaacacgctatctctgcggggatgaccttgatatttattccggcaatgacgaccaagccgtagctatgatgtcactcggcggaataggcgttatttcggtgctttcaaactttatgccgggggttatgcataaaatgtgcgccgaataccttgaggggcacacaaaagacgccgcagaaatgcaaataaagtatgtggggcttatgaacgcgcttttcagcgatgtcaaccccattcccgtaaaagaggctatgaatatgttagggcttgaagcgggtccctgccgcctgccgctttatcctatggaggagggcgcgcgcgccgttcttcgcgaaaagcttatagagtgcggctgccttaaataaaacattacaaattttatgcacccgatgggcctttacctatcgggtgcaattaaaaagcggaagtgaaatacatatgataaaaattattttatgcggggcttcgggcagaatgggcggctttgtggcaagcacggcggctgccgacagcgatatttcggtagttgcgggaattgacaaaatcaataacggcgaaaaattcccgattttctcctcattcggcgatataaacgttaaagccgatatgataattgatttttcccacccctctatgctggagcctatgcttgaatacgccgtaaaaaacaagctgcccgtagttattgccaccacgggctatgataacgcgcagactgaaaaaatacgcgcggcggctgaaaatattccgatatttttcacatttaatatgtcgctcggcataaatcttgtagcggcgcttgcaaaaaaagccgcaaaggtactcggcgacggctttgatattgaaataatagaaaaacaccacaaccaaaagctggacgcgccctcgggcacggcaataatgcttgcaaacggtattaactcggttttcggcgatacgctgaattatgagtatgaccgccactcggtaaggcgcaaacgcccgaaaaacgagataggcatacactcggtgcgcggcggcacgatagtcggcgagcacgaggttatttttgcggggcacgatgaagtaataaccctcacccacaccgcgcagtcgcgcgagatttttgccgtaggcgcggttaaggcggcaaagttcctttacggaaagcccgccgggctttatgatatgagcaacgttacaaatatcgaatgagtttaaaaaacgggctgttgtttttcacgacagtccgtttttaagttatattgcgcctttacagcgggtaacaggcgcctgattttctttatgctcgcctatgattttttccatccaaatcatattgtaccagtgcccgaacttatagccgcatttttgaaattcccccacctgcgtaaagccgatatggctgtgaaaatcggcgctgttttttgttaaatactcatcttcctcggcaggatacccgatacaggcatacatattaagaatacccatttctttaagctctttttccagtgctgtgtaaagcgttttgcctataccgcatttgcgggcgtttttatcaagataaatcgaagtctcgcacgaccaatcataagccgccctgccaacaaacgcgcccgcataggcatatcctgcaataaccccgtccttttccgctaccaaatacgggtacttctgcatgattttttccattctgccgcgaaattcttccaaagtgggcgttgtatattcaaaggttatcgccgtgtttttcacataataatcgtatatttccaatatccgctcggcgtctccgagcgttgcgctgcgaaccgtaatcataaaacattttcctttagttatgctcagcctttaactatactgttgtaaacctcgtcaaactgttccttgctgccgagcgccgcaaccgtgttgctgcttatttgttctctggcatcgttcaatgaagcaataagctcgtccacctcgtccacaaactcatcggttgttcttacaatattctttttaagctcatcaagcgaggcgtgcgcctcctctaaggtagataaattcttctgcacctgcgccgcggcaagccccgcgtttttctcggaatttgccattatagcccttgcgttcgcctgtgccacaagataaagcttgcctatgttttcggaaagcctgcctatctcttcgtatttttcgttaaattcttcaagcttttttgaaattgtttctttttcctcattaagcttgcggtaattatcgttagaaagctctagctcagccgatagcttttcaacctgctccgataagtccttttcgcgctccacaaagcttttctgcgatttttctatgtactccataacgtcctcgcaattaaaaccaaacaagctttttctgaatcctgccgacattaaaattcctcccaaaccgcctgaaacggtttttactattatactttattctatcgtaaattacaagtccttaaccgagctttccgccgtgtgacaaagatacgcctttacgttttccgcctcaagcgcttttaatgtcgcccgcgctttttcctcatcagaaaataccgcaaatcttgccggcccgctgcccgaaagtgcaaccgcgtccgcaccgtaattatacagcttttctgttatttccctgccgtcccacagcaccgaaaacgaattcccgagcgcctgcgtaagctccgcgtaactgccgttgcttattgcccgcatggttttttcaatatcgggttttgggtaattaaggcggtcaagccttgcaaacatttcgcccgttgagggcttttcgcccgcaagcactattaaaaaggtgcaatcgggcatatgcggcagcggggtcaatatttcccctattccccttgcgcgctgcgttccgccgtctattaaaaacggaacgtccgccccgagggaaactgccatttccctaagccttgattttgaaaagccggttccgaaaagcctatccagccccacaagcacgccggcggcgtcggcgctgccgccgccgagcccggcagatgcgggaattgctttttttattcttatttcggctgagggctctattcccgccgcgccgaaaaaacagtgcgctgccttaaatgcaatgttgttttcaccgccgaatttatcactttcaaataaaaaggtcgggcttttctttatgaaaatactatcgcttatatcaaccgtctgcattacggtgtctaaattatggtagccgtcaggtcttttccctataaccgcaagcgaaagatttattttagcgtttaccgcgaattttatactctccatattttacattcctttttattcccacacacccattgtaaagcgggttaagagtcggctcaccgccggtatgcgcagcaacacataaaaaagcattgcgcccgatacgtttaaaatcacgtcgtcaatatcgctcgctcccgtaagcagcagcagctgtaaaagctctataagcagcacggaaataagagtaaccgcaaaaagcgtgtaccatttattgatttttttaaacaggcaaaccgtaaaaaacggcagcggcataaatgccacgaaattgccgaaaacattttcaaaaacgctccagaacggcagcgttccgcttttaaaggcattcaaaaaaagctttagtgtttcaaaaggtattaaattggtgctctcatttatatatctgttaaattccgcggtgttccacttcaatacgccgaaaatatcacgtccgagcgcgtcgtcaataagggtgaaatctactataagaattatataaaacaaaaaaagcgcgcaaatgcggtttttcattattttgtatttaacgccgggttcctctgttttaagcgcggaaaaccaagcggaaaaatatcccgtaacaaatgcgactgttcccgccgctattttaattccgtgcgcaaaggtaataagccccgcagcattgcaaatcataataaaaagcgcggcaaagcatataaaataaagcaccgacgttataatattcaaaaagcgccggttcacattatcactccgaaataattactgtatattattttacagttatatgctctctgtgtcaagtctaattattcagatttctgtgatgataaccgtatgtatcaggtttcagcggttcaattgagtagcccatacgcatcataccctcaataatttcgggcagcgcctgtacggtggttgccttatcatttgaatcgtgcattaaaatacacgccgaatttttatcggcggcgcttgccagcactttatttcttatataggtatagctcggcggcgggcactccgcatcacccgagcttatgttccagtcaaaatacgagtagcccctgccgcccaccgtttttacaagccgcgtcataaccccgcggcagtaatttttacttacggtattgctgctgccgcccgggaaacgcaaaagtgtgggcctcacccctataagctcataaattttatctgagaggcgggttatatccttataaaacatatcctcgcccgaatatattaccgaataatcgtgcgtggcggtgtgcaagcctattgtatgcccagccgcgtaaatttttttcacatactctatattttcgctttcaatcacgaaaaaggttgccttaatgcggtatttatccagtatatcaagaatttcaagcgttttgtccgatggtccgtcgtcaaatgtcaggtaacacacccgcctgccgtcgggctgccgtgcctgcggcgttgtcccgccggaaggctcctcccatacatccacggaagcgtcggctctgcgtttttcctcctcatatcgggtaagtatattgctcgccgcgcttttttgtgtttcaagctcctgccgcgcttcattaagagcggcgccgattttttcggccgctttttcctgatttttaagtgacaaaaccaaaaccgaaaaaaacaaaaaaatgaaaaccgcaataaccgctttaaaccacgcttcagccctcaaaagaaaaaccgccctttcctttaaaatataataagaaagagcgaaaattattactttatgatttatgtatatgctcagtcagtatgtttttaagcgctaccgccgagcttgagtgtgagcgcgcaacagtagtttttttacccttaatatcattcaacgcgcacttgaccattttgtgcgataccgttcccgtaaaaagaataagcagatcggggctgcctatttttttcatgcacccgctcattttcgggtatacctttgccttgcaggaatatgtgtcgcaaatatccatatactgccttaccatacattcatttccgcctaatattacaacgctcattttctgtcatctcctgttttttagttagcacacgctaaccttttgttttattttttgggctgtggaaatacaatttcggtgaacatggagccgaatgattgcccctgcaaacctcaatttgtattttacagcccgttttttatttttttaagaatgagaaaaagccttttttctcatacggctcgttcttgaccgaaataagggtatagcccgtagcgcctattgcctcggcaagccttgcttcgtcaagcggaacatcggttataattaccgtttcgccctttgtgtgcgaggatgaaacctttttcaccttaaaagccgcgcgaaccgcctcgtttatatgcgcttcgcacataccgcacatcataccgtcaattttaagagtatattttatcattattccgtcccctttaaggcttctaccatatcgattttgcggtttttccgagccaccgcccggcttactgtaagcgatatgccgaaggtaataaccaagcctgttatatacgtcagcgggcctatagtcaatttaagctcatattccgacgccattgttacaagcaggtagtcaagcagtgctattccgagcggtattccgagcaccgcgccgataagagttacccacatattctgccctataagcagccgaccgatttttttatccctaaagcccactacctttaacgtagccatttcgcggtaacgctcggtgtagctcattacgcctaggttgtaaagcacaactataccaagcaccgccgcagctattatcagtatgcttatcatcatatacattatttccataaatgtatcaaacgagtctataatagcctgcttcgactgtacggcggatatacactcttccgatttaatatcggctttcttagtatcggtatataccgaatctgttttgaaaggaatatccagcgtttttgcgtaatcggttgatataacaatattttccgaaaccgagcggataactcccgcaattttaagattgtaggttttatccgagccgtaggggcttattttaagcgtatcgcctgccgctaaatcaaatttgtccgctatgcgcatacaaatatacgcgccgtcctttgcgggggttacatatccatccttttcagcggggaaaagcaccttgccgcgggttatatcgtatatatcgagcgccactgctttatcgtctatctgcacacttaccgtagcgctgctgtcgcccttataggtgtctataattttctgggtgtcttcttccgttgcggtctcgcttaaataaatacgggatgaatatttcatagagtcatcgtaataggtgcttaaaaatgcgttcatagtatcccgcatacccattgtgcccactactattaccatacagcccgcaatacccacaaggctcataagcgttcttgatttgtggcgcattatatcgcgcatattccagcgtgttccgaaagaaaagcgattccaaagcgtggttttttcaagcagcagctttttcatctttttgggcgcgtaggggcgcaatgagtctgccgcggtgcctttaagcatttccttaaccgataaaaagccgatcaaggtaagcgccaaaataagtaccgctagtatcacaatacagaaggtcggcagtcttagctcccaatagggcatatcgaaatatgtgcccatcgtgccgtcgcggcccattatcattcttgccacaagatagcctaaaccgatgcctgcgacagagcctataatgcctatcataaacgcatatgacgtgtagtggcgcaaaatgcgtttatcacggaaacccagggctttaagcgtgcctatctgcaccttttcctttgccgttaagcggtgcattgtggttaccattgttaaaaccgctataagcaggaacagcacgggcagcaccgaacccattgttttgccctcttccatttcgccgtctgcggcggaatacgaggagttttcgtcctttgataaaacaagcgtggttttgccgagtgcgtcgtctgtcttatcggtaatttcctcctttgaaaggtcggaaataatatttaactgcgggtaataatctctgccgagcgcctttttatacgccgcgggtgaaatatagccgaagccgtatgtattgtaatcgggcataagttgggtttcatcgcgcacgcaaaccaaatgctcgcctgatttcaccgtacccttaaccacggtgtttatagtaatgcctttatatacaagagtcagcttatcgcctatcgaaatatcgttagcggcggcgtatttatcggatatccaaagcccgtcctcgctctttttatcgtaatcggcgccgtcaacctttaaaaatgaggaaacgtcaaaattctcggttacggtaagcgccaaagagtcgccgtccttttcctttacgtcagccggcaccgagatatagcgcgataccttatcaacgccctttatgttttccacattttccgcgtctttttcggaaaagcctagctcggaaacaacgcggtaatcggcaaaatgtgactctttgaaaaatcttttcgtgttaatatcaatgcttacccattccatattaaagccgacgaatattcccacgcctatggttatcataagaatcatagaaataaactgtgctttatactgccacattgtacggaataattttttccaaagcatagcttaccactccacttcgtcggcgctcataggctctgcctgctcagtcaccgatttaatttttccgtttttaacccgtattaccacatccgccattttcgcaatattctggttgtgggtaacaattactatcgttttgccgtaattcttcgccattgaaagcagaacctttaaaaccataacgcctgtttcggagtcaagcgcgcccgtaggctcgtcgcaaagcagaattttcgggtttttggcaagcgcacgggctattgaaacacgctgctgctcgccgcccgaaagctccgaagggaaattatttaggtgatcggaaagccctacctcttcaagcattttttccgacaggaaagcgttaggcgctatctcgtttaccagcattacgttttcctttaccgtaagtgtgggtacaaggttgtaaaactgaaaaacaaaccccacggtagatgcacggtagtccgccagttcatcattcgagagggtggaaatatccttgcccgaaacataaatttttccatcagttgggctgtcaagcccgccgagcaggtttaaaagcgtgcttttgcccgcgccgctcggtcctaaaataactacaaattttccttcatcaaggctgaagctcaccttgtcaagtgccttttgttcgtggtcgccgcttacatatacgcggcttacatccttaaattcaactatcggcattgtcaatcctcttctcttaaaatcaagttagcgtccgctaacaataaggcttaagcataggttagcccttgctaacccatgcttattataataccgcttaaatttaatgtcaacagtttttttggaatttattgcccaaattgctttttcgggtgaaataccgataattaaattgtaatcagaatacggaattacagcgcccctgccgtcatcttatttgataacagcgggggcgtgttttctccctggtattcttccttcgagtaatcaccgcacaagcgtatttatcgccgctacaaggcccttattgcgcgtggcggaaatattatttaaaaacagcaggtctttcgctttaacgtccgtgcagaactgtgctattccgcggctgtcaacgcttgcaaaatagcggtagtctataatataaacggtttggtaattgggaactaagaacggcgcaaacgcggcttggtcgcttgacagactgataaacgcgtggcagataataaaataagctatcctattaaatacccaactcttcatccgaaacaatgtcttctttcggaatacctgcggtaattacttcatcctcccacttcatcgcacggcgcaacataacaatcgggaatgagtgtatttttgcgttatatttcgacgccgcctcgctgtaggtcatgcgggctttgagctttgcgttttccgtctgctcaatttgattcaaaagcttttgggtgtgctcgtttgatttaagctcggggtatgcctccataaccgctttgaagtcatttccgctgcgtatgcgcttgccgctgcgggcttcggcaaattccgaatacacatcggtttcggattttctgtatttatcggcaacgcgctccgccttgtctataagggcggcgccggtttcggttaccgccgctatatccgattttgattttgcaatggtgcttttaagccttgctatcgcgttgaaatctattaccatattaaccgcaaaagccagcagtattgcaataataaccataggcagatcgtatttttcgggtatttcatcgcccgatacggcagccgcgaatataaaaactataagcagttgcgaaactatatacgcgccgaaaagcttcagcagctggagtaaaagactgtttttcgcgttgtaattcataaaaaatcccccttaacatatcaatattatactacctatcgccttgtttatcaagacggtttttgaaagattgtaaaaatcgcggagcgttatacgcatacgcggtttatagccctgatcggacccgacggcaacgtttaaacggcaaccgtcgggttcggttttgcgtattactgccccaatcgccttttctcacgccatttttcgggcgaaataccgtttttacgcacaaagagcttataaaaataagagtaattattaaacccacttgccgccgctatgctttcaagcgaatctgaggtcatttccataagatattcgcattgccgcaatctttggttttgaagatacgctatcggggtcataccgtaagctcttttgaaaatatttattatatggtttttactgaaatgaaattccctgcaaagcacaggcaaggtaatttctctgctgcagtttttcgcaatatatgctgaaatatcatcagcaggtgacgggacataccttttcgcgccgagtgcggttaaaatattataaagcttgcccgcctttgcaatatacggcgcaccgctgtgcgacagtcggttcatttcctccatatccgctttaagggcggaatattcaaatttaccgcgtttcggaagaatattgccctccgccgcccagttttcagctaaaaaatgtatgtaaagatatttcggattatcgctcgctgtttcgccgccctggtgcataccgtgccgctgaatgtaatattctcccgccgaaatttccttctgctccccgttttcggaaaaacgcagaacgccgctgtaaaccagcagtaaaacgtcatcctcacaaaagcgctcaacgtggtgttcgccctccttgaaaaagcgcaatgacgcgtttatataacgtatcggcttatccaaattaactccctgcattttcatcaccggaattattatataatacatagtgtgatattgtcaatctatcatgtgaaataggctatgttttaataaaaaacagtgtgataaaataaatcacgaaaggagacgaaaatatgcagaaatataatttttatacaacaaatgaaataaagccctcagggtggctcaagcgtcagcttgaaattcaggcggcggggcttagcggaaatcttgataaaatatggcccgatattgcaaacagcgcctggataggcggcacgcgcgaggggtgggagcgtgtaccctactggcttgacggatttattccgcttgcctatcttttggataatgaggatatgaagcgccgcgcaaaaaggtatatggacgcgattattgccgcgcaaaaacccgacggctggatatgcccctgccccgacgataaacgaaaagaatacgatgcctgggcggtacagcttattacaaaggtattggttgtttattacgattgctctaaggatgaacgcatacccgctgttgtatataaggtgcttaaaaactattacgaattactgaaaagcggcacaattaagctttttgattggggtaaattcaggtggtttgaagcatttacagccattaaatttacttatgagcgtttccgcgaagattggctcttaaagcttgcggaaatattaaaggaacaaggtgcagattacaacgaatttaccgagctttggaaaaccccgcttaaccgctggagatttgatactcatattgtaaacattgcaatggcgcttaaagccgaagcaataacagctgatattttaaaagcggaatataccgataattcgacccgtctttatgacattttggaaaaatacaacggcacgcccgtaggaacattcacgggtgacgaatgtctttcgggattaagcccgatacagggcacggagctttgctcggttacggagcttatgtattcttacgaatggctctacgcatacacgggtaatgaaaggtgggctgaacggctggagcttgccgcctttaacgctctgcccgccgcaataagcgaggatatgtggacgcaccagtacgaccagcagagcaaccagattgcctgcatacaatttcccggaaaacccattttcagaaccaacggcagcgatgcgcatttattcggcttagagcctaatttcggctgctgcacggcaaacttcaatcagggctggccgaaattcgcgctttcggcgtttatgtacggcgaaaacactgtaataaacgtattgcccgtgccgtcaaatcttaaaacagacggctttaatataaatcttgaaaccgaatacccgtttaaaaacagctttaaatacaccgtaaattccgatattgagtttgaatttaaaatccgtattccgtcctttgcggaaaatgtcaccgtaaacggtgaaaaagccgatataggtgtgctcagctttaaaataacgccttgcaaaaacagggctattgaaatttcctataaaacaagacccgtgcttataagccgcccttacgggcttaataccgcgcgctgcggttcgcttgtgttttcattacccataaaatacgaaaagcgtatgcatgaatacactcacgacggcgttgaaagaaaatttccctactgtgattatgagcttataccgcaaagcgactggaattatgctttttgcggcgacaggcttgaagcggtgcgccgcacggtcggtaattccccgttttctgaaagcgaaccgcccgtggtgcttaaagcaagcgtctgcaaaattgattggggctatgccgacggctatgaagctgtatgtgataaaattccgcattcaacaaatcccctctcaaaccccgaagcggcagagctttacccatatggctgcgcaaagctgagaatgactgaaataccaaggattaaaaaataattcggaaaacagaattacagcgcccctgccgtcatcttatttgataacagcgggggcgtattttctccctgatattcttccttcgagtaatcaccgcacaagcgtatttatcgccgctacaaggcccttattgcgcgtggcggaaatattatttaaaaacagcaggtctttcgctttaacgtccgtgcagaactgtgctattccgcggctgtcaacgcttgcaaaatagcggtagtctataatataaacggtttggtaattgggaactaagaacggcgcaaacgcatttccgaacgattcctttacaagcacgcacacagagccgtctgtcttggcggggttgtgaataatgctgtaagggcggtcgccctttataaaggtaagatatttagagttgacatttgacatatcggaaataattgcctcatttttaaccgaggtttttgaataatgcacttctatcgtattggtttccgtcggctcgtatgcaaaaaccgtatcggggttagccgccagctgcggcagctttttacttgaattatagaaagagcccaaataattcgggaactgatgcaccttaaagctatcaagtgccgcgggcgcgccgcctgccgcctttgtgaaatcacagtaggcataataagctcccagcgccgtccagtggtggtcggtgcggaaataaatatactcgttgcggcgggctttgagcgtatcgtaaattgaaacggtttttacaccgtttttcgcaatacccgaatacatataatctatcgcttttttctgatccgacgtgtttatagtcgccaccacattatcgggcgcggtaatgcccatgcttgtgggcacaatcatatcgtatacctttgttttacctgcaagcagcgttcccgcgcggcttattgcacttacatacaggtcagccgtgctacgcacgaaattgtaatattcatatgccgtatcgccgtttataagcagtgcaccgagtgtctgtgtcgcctgagtctgggcgggtgtttgctgcttcggcggctctgatgataccgccgaggaggacgagctctcaggctttgatggctcgcttgactccgcagatgacacatcggatgatacttctgaggtgtctcccgggtggctttcaggtatatcgtcgccttttttaacgtcgccctgtatctgaacgtcggtcttgccgtaaaatgcggagaaaaacgcgttaatatccgtcagcttttctcttaaaggaaaggtatcggaataccagctgtttattccgtcaaaataatcgcccgagacaagggctgtaagcgtaaatttcgggaattttgtaagctcgcgcttttcgctttccgaatatttcgggcgaagcggtattataagcgataaaacaaaaaacgaaaaaagcaaaacgaagaaaaaccgaacgaaccatatgctcattattctgaatttccgcatattaacggggggaaggcgcacttcttccgcgtcggtaatagtgttgttctgttccgccataaagaagcctccttttaaaatctgaaatacaggaacggattgtagctgttgcccacaagcgctgcggcagagagtaaaagcagcaccgcgggaattacaaattgcagcaccgaataagccgcaagagcaccgttatttctgagcgcgcagtatttgaacgcggctgacaggcgctttgttacgggcgtagacgcgaaaatcgcaattaaaagtattataatatggcttttcacggtagtccatgtttcaaaatccgaaaatttattgccgtttgcgccgaacattcctttaagcacgcaccatatatcgttaagattttcaaatttaaacaaaatccacccgaaaaagactatgagcagcaaatatatatgggctataatcggctgcttttcaagatattttgaaaggaagagcttttccagcgcaataaacacgaagaaataaagcccccacagcacaaaattccacgaagcgccatgccaaagccccgtaagtgcccatacaacaaacaggtttaaaaccgttcttacctttccacagcggctgccgcccaacgggatgtaaagataatccctgaaaaagctgccgagggtgatatgccagcgccgccaaaactcacttaccgacgtggatatatatgggtaatcaaaattttcggtgtagtgaataccaatcattttgcccatacctatcgccatatcggaatacgccgagaaatcaatataaatctgtaaagtaaaggcaagcacgcccacccaaagcgaaagcacactttttgacgccaacaacgaaaaatcaccgccgtcgggcacaagcagcgtatcagcaagcgctgcgcaggtgtttgcaattatcgccttttttgcaagacctacggtaaagcggtttataccctcggcaatatcaaactgcgaggctctgcgttcttcaagctcggcgcatatatccttatagcgcacaataggacccgctatgcactggtggaaaaggctgacgtaaagcagcagcgttttaaagctgcgctgcggccgagcgtcgcccctgtatacgtcaacgcagtaggtaataagctgaaaggtataaaatgatatgcctataggcagcattatagagggcacctttgcggggaatccggtgaaaaacttaatatttgaaagaataaagctgccgtatttaaatatgccgagcaacacaagatccacactgatcgtaagccccaaaaagagcttagcttttatggagccgttctcatatttggacataatgagggttagataccagtccgtaagggtcataccaacgagcagcagaatataaaccggctcgccccaggcataaaaaataagcgaaaaaacaagcattacggtgtttttttgctttatatccttggcaaaaaaataagccagcaaattaagcggcagaaaaagaaaaataaaaggcaggcttgaaaaaaccatctgaacacatccaactaaaagtactgattatattatatacgttttctctaaaaagtacagtaacattacggttacaaattataacagcgtgttacaacttttgtgccgaacggtcttattgtaacagccctcttattttgataataatttcaaaaatcttttatcgttcatctgctcgtttgttaaatactcaccgttataaaacaaagcatatgtggtaatgggggtaggagcgttctgagcgtcctctctgctctgcaaatgaacagcgcggaacggaacgttatttccctttgccactgcctctgctaccggaacatatttcgcattaaacgggcattgattggtataatataaaacatatcccttttcttcaatgcgagggtgctttgcacattccttaaattcaggcttattaacgttttctctaaacggcaaatgccatagctgaataccgttatctgcctcatcgcaaacagtaaagcctttataccgcaaaaatttagggtcggctaaaaacggctttttcttttttgaagataaaatacacaagcctgtttttcccttgcttttgctatcctttatgcaggcgttaagcaggtcagctccgtagccgtgccccttgagcgagcccgccacccacaggcagtcaatatacatatagccgtctgccgtaataggattccatgcattttcggcaggaatgtactcaataaagcacttcccgcgctcactgcttttcaaaaagaccaatccgtcatcaaatctttcattaagccacgctttttttgaagacacctgaacatcgttattatttgaaattgcacagcatatatgctctttttctatattctcgcctgttactctaataaattccataattaaccccataaaataaaagatttctgattgtcttttattatacacaattcggcgccgcattgcaacttacgaaaatttttaatatgaagcaaaaacaatcgaaaaaattaaaggctctataatcattttacggaagaattgctcggattgcaaggagtaaaaataacaaaaaaaggcgctgccgctgcccgcattgcgataaaaggttttatgaagaaaacacctttctgccgggataccgccgtatgacaaacaggttggtaaaatttgtattaaatcgtctgtccgacgaacgctcttttacaagtgtcgcaagagaagtaaatttatccgtatcaacaataatcaggatatttgaccttgtaagctaagttttgcaacctgcaagacctcccgggataaaccaatactctttcctcgtctacctgcttgatttacgcaacagggttacggttaccttttggacttcgttgcttttggtcaactcatccgcctgctgcgccttagtatcaagtttctgttcgtcaggctacgatttcactattgcttcttctctcccacgcttcacagcgtgaaacttgcaatttgctttcgagttcgtcggtaactacgcctcagcggacttccaccgcagagcattgataagcccgtcataccaaggaacaagcagctgcctattagcaactgcttgcattcaatttcccatttaaactctttaccccaactattgacaaagagcctatttcttcatctctttatcctgaaaatataatatcacacataaagccaaaaagcaataaagcattctctaattcaaaacgccaaaaaacaaaaaagcgaccgaaaaacgatcgcttaaaatttgtgctttgctcgcacccaaaaaaccgaacaaaggaagagcaaggtgaggaacgaaaagtaat

SEQ ID NO: 536 - DNA, 4366 bp, Unknown
  16S sequences of unknown bacteria
catactccaccggaagccggtactcgcagaggggtggcgtttgaacccctctgtgttccccctgaaaagggcgccccacgcgaagtggaataatgaaatcgaaaagacgcaagtcttttcttctatcttcttcacttaaatcataagtgaaacttacatcaagggaagtctcttagaaggcgcaagtcgtctaaggaaaaaaaacggctcggagtgaggttttatctctctcctgagccgctttttcgttaaataatatacatctcccgtccgcttatggtttccgctttcggcgcatatccgagtcggaattttttctctacgtcccagtcggtttcatcgctgtcggggacgtacactcttatcatgctgccgtcttgggtctgtttttctccggcgggggtcacttccgttaccgcggtttcgtgtaactcgcttaaagcaaataccgacaccgacagctccgccgtgagattcagtccgtctccttcttcccttgccgttacgtcgcacactctcaccgcgcatctcttcatgtccgcgccgcttccgtcagccattccgccgtcacactcgtatttcagggggaatgttccctcgcaaaggctgtattcgccgtccttttctactatggcgcacagctttacttctccctccgcgccgagctttccgtcttttgacgttaccttcgtcacttctccgcttccccatgacattacgtggcgcgctccctcgtccgtttttatctttccgccgaaggtcagtctgccgcttgccgcaccgacagcacacaccgctccgatatcgcaggtctttttttcctcggctgtcacgtcgggcaggtacgcgtcgtccgttatctcgctctcactctcgcgcatcacgtcggcgtctattgtgtactccatgctccacgctgtcccgccctctcccgacttcacctcggtcatggtaacggaggcaaacaccgcgcacgacgttctctccccgtcctttttatcggcgaaggagtcgggcagtctcacctcgtcgtcgatgggggcgcgcgaacgggaggtaaagtaaactccgtcctctccacgcataagcacggtaaggtacgcctctcccttgacttttaccgcacccgaggaaattctcgcgtcggagacacatatctcgccgagagccgtcacaggagttgacccttccctctcgcgtatctcgcccgacacgtctccctcatgcctaatctcgcagacgcgtgcggttttcactgctttcttcttctgccgagccgtgctttttaaatcgaattcgtctccacggcatgacagcgcacgcagctttactcttgacgagagcgttatcctccgcggagacgttacacggcagtttatcccctcagccgcgcaagagagcactatatcccccggagtaaatcggtcgccttcctcggttttgagcggaatatgccccgtgtacgccgaggtccggctgctctggcatatctctccctccccgcccatgtagacgactgtataggtcacgtctccgtccgcttcaagctcttctcccgagaggtattttcccccaactgacgctctcgctgttactccaagcacgcgtctcacctcggggcagtagtcgggcaggacaaaatcctcgctcacgtcgaccgtattttcggtatcgcaccttttttgatatatcataagctcatcctttcggcggcgtgacaattctctttttcgccgcatattctgttattgtctgtctgtagcagtgtatgtgcgctcgggcggatatagaaccgaaaaaaggggataagaaaatggaaaagcggctgtcttccctctcggcgggtgaggtcggacgaataaaggaaatacatgacgggaacataactccacggctgtacgacataggcttctcccccggagacgaggtggaatgcgtgatgaagatgccgaggggtggtatgggcgcgtatctcataaaaaaaagcgtagtcgctctgcgggcagctgacgcttatcttatacttgtcggggaggttgagccttgatgaaaaatgagagcatatccgtgaccttcgcggggaatccgaacgtaggcaaaagcacgctgttcaacgctctcaccggactgaagcagcacacggggaactggtgcggcaagaccgtaggctgtgcggagggggaatacacggacggagagcgaaagataacgctgaccgacctgccggggatatattctctctcgtcacgctcagccgaggaagaagcagcgcgggattatctcatgtcgcaccgtggggacactgtcgtttatgtcataggcgcgtcctcactcgagcgtgggcttatgctgttcctcggaattcggcggatatgcaaaagcattatactctgcgtgaatctgatagacgaggcggcggagatgggcattgaagtagacaggaaaaagctgtcggagagactaaactgtcccgtagtcatgacatcggcacgaaacggcgaggggattgacgctctccgatgtgccatagcggaatacggcgaaaaatgcggtacggatacatctgcggaaacagcggaagataaccccgcagccgcatcaaacgaaacgcgcatagaggattccgaggtctgccgaagcattgcgcgggaatgtcttgtcgtctccggcggcggatattctgcgtctaaggagcggagaattgaccgtatcgtctgcggaaagtacactgcatatcccgtaatggtctgtctcgcgctcgtcgtgctgtggctgaccgtatatctcagcacatatctctcggatgggcttgaatacctctgcggcaaggtcacggaagcactgtactttctcggagaccgagtaaaaatgcccgccctcatgcagtcttttgtgataagcggagttatagggacggtattcaaggtgatttccgtcatgctcccgccgatggtgatattctttccgctgttcaccctgctcgaggacataggatatctcccgcgtgcggcgtttgtgcttgacaggacctttgaaaaatgcggagtatgcggaaagcagtcgctcacaatgctgatgggactcggatgcaactccgtgggcgtggtggggtgcaggataatcgactcaccgcgcgagagacggatagcaatgataacgaactcgctcacgccatgcaacggacggcttccgataatcatagcctgcgtggggataatgtattcttcctcggtcagtgcgggactgtgcattttagcggtgcttctcatcggagtggcggcgtcgctgattctctcgaaggtgctgtcacttaccctgttccgcggagaggcatcgtcatacacgcttgagcttcctccgtacaggataccgaaggtatgggaagtgatagtgcgctccgtgcttgacagagtgataaaggtaatgggtcgtgctgttactgcggctgctccgtgcggtgcgctcatctggctgacgaacaacatagaaatcggtgggggtacattattttcgctcatagcggggtatcttgacggagcggggcggtttctcggtatggacggcgtgatactgctctcgttcattttagcgttccccgcggcggagttaatgcttccggtaatgctctcgtcgggtgacatatttgcgcgagaggcaatgacagcggcggaatatttcacgaattcaggcataggcaaggcggggatatggtgcgttatgctcttcacgctgatgcactttccctgtgcgacgacgctgatgacgatacgtcgcgaaagcggaagatggggggatgttgcactggcggcagtgcttcccgttttgcttggggtggtggtatgcactgtcgtggggacgttagtttaggttttctttaaaatcctaaagaaataaagaagaaagagcttgggaagctctttcagaattttatttaatcgactgcggtcgagggtcgctcctacgcggagggcgcacagagatgctcaaacgccgcacctctgtgagttccggctcgcggtggagttcggcttatatgatttacttttggtgtcgcccacttgaacaaaccagtcgcgcggttttgcataagccttagtagtggcattagcatgttcgcgcgggagaggtagacgcggggagtgaatctaaatcactgctttttctgtcgcgcgaagggttgaatacctaatcaaagtgaaatggattaggctaaccgcggatgggcgatagtttgtgcgttgaaatgtagataacgtccgatttagtattcttccgtagaaagactaacgaacgatttataaatttcagccaaataaacagacgcggtcattctaactacactactaaggcttatgcttcatcgcgc

SEQ ID NO: 537 - DNA, 32759 bp, Unknown
  16S sequences of unknown bacteria
tcagcgggcgactccgcttcgctctcgttttctgttcagccatttattgtgttgtagcggcgtgtgcttggctgcggcgagcgaagcgagccgcacttgtcatagacaagcacacgccatggtgccaaattgcaaagtaaatacactaaaagttatcacataaatactctttaactcacaccatctcacccgcaaaaaatgtatggatatatttttgcatataaatcaacaatttccgattctgcttccttaccaataagagcatacaaatatggatttctgcttttgattactccatatagaaaagacggatccccccacaatggtctttcgacgtcgatcgctttgataagggaattcccgctgaaaacaaaattcgccatattgcaatcggtaaaaacaaacgacggttccttgacttcgggtaaagtttcaatattacggcaacaggacttgcgctcatcttccggcatattctcagccacgctgtataagcactctttccacgatgaaaattttgcccgcccatccttatccatcattccgaatttcttccccttgatacttgttgcattctgcatcaggtgcagcgcccgtgtcaagaatttgttttcgcaatcttttttataataaatcttgccatccactttctcttcttccaaaacaacaaagtcttccaaaaaatcccctttggaatagacgttataaattttcacaactggaaaatgatgaaataaaagaagttcatgtgctgctttttcaatataatatgattcatctgttgcggcattgttatagatgtttttagaaaccttgatgacgcgcttccctttctcaaaaatataatgcttctcgctgtaattaaagaattgatatccggattgcgtcaaataatcataatatggttcgcttctaggatcgtttttcatttcatattcccttgatatatatcatttttacgaataatactctcaagtagtgtacaatccatatcattgtccttcgcttgcgcaacaatagatgctatgtctttcggcagacaactcccgccataccctcttttatccacatatacaaaagtatgacttgtgccaatgcgtgggtctgccgtccaaatttcgcgcacttgattatagtcggctcccagagactttgctatgtcatacatctcattgcaaaaagtcactttcattgccaggaaagcattttccatatactttgccatctctacatcttttgcatcgctttgataaatgcgaacattggaattgataacactttgataagcatggattgccaaatcaattcctctttttgttccgccgaatgccaaccactttctgtcattcagttcggcaaaaggatgcgccacggtctccccgtaatactcgggttgaaatacgatttctttcatgtatttcttgcacatctcatctgtaaatccaacgtaaactgttgagcggagcacaatcactttgctctccacccatctgattacctcttctaccgcacttgtatcacaatgcccgtcctgcatctgtggagtgggaacacaaacaaataccgcatcacacaaattgatttctgtttgagagcctaaccccaaaaatttatcatagacaacagcctctttaaataatttatgcattgccttccccacatgtccatatccgacaattcctattttcattttattcctcccagaattgcttgattttttgatagtcgtaatcaaattctttctgccaattttgttgcgtaaaatattcaccctcttttgaaacagtatggctgtcgctccccaaagtcacttttaagccccgcttttctgcctcagagagcaaaaactccggcaatcctgcttcctgaatgacattcggatggaatacttctattccgtccaatccatccccgcatagcacatcacaaaattgacctatctgatctatatttacttttttatggttttccgcgctgttcggatgcgcccacaccacaatgccgcctgcttgatgcactacgtcgataaacgtttttgcctccgttttatgtagcggaaattttgattgcatctcctttgagttcaaaaatctcttcgcatccttttcatcttgaaaatattcttgaccgcaaagctgcctgcgcaattccttcttatcgctgcaaacggaaattctatatccgctttgcattaaaaactcactcattgcccgtatcctgtcccgatgcttttgtttctcgattatgagaaaatcggcaagccgtttatcatccattctgaaaccatatcccaaaagatgaagcactaaatcatctgcacctgtaacatctttaagagaaacagacatctcgataccggaaaccaagcgcatcccctttttatcacaaatttcttttatttggttcaatccagaaaccgtgttgtggttgcaaaaagcaactgtttcaacccctgcccgccgtgcacaatcgatcgcctcctccgccgtctgcaaagcacacagtgtatgtgaaaatcaaaatccatcatgcgttccccctgtattttattccgtaatgacgtcgcgtatagaggttgatcttttcgtttagaaaagccatacattcctgcacagaggagacggcaaagatcttgtcatccgaatccgcatacctttcccgcacatccaaccgtcttcccgcaagttcggcactccatccatccacattatcgtaagcaataatgagtcgaaataaagaccatgccatcgccatttccgaaagcgtacccgcaccgccgccgattgcaatcacggcatcggcatttgctacaatcgtgttgcgcatgacatcgagccccgtcggaattacgatgtccgcataagcgttcgccgtagtagtatcaaacgacggaataattgcgatcgtatcgccttcgcgatagttttttgcagcgtgcgcaccggcaaacgccgcctccatcactccaccgagtcctcccgattgaacacggtaaccacattcaacaagtgctttgcccgtttcaaacgctagttcatattttaagccttctttttcaattttaccgtctccgatcaccgcgatgatttttttcattgcccctcctttttgccttttccaaaagttttcttttgacatcttccttgtacgcattgctgtattttcccgttcgctcactgttttgcaaactgggttcaaaataatataaaacttcttcaataaattctcttcgctccgctttctgaaccatcggcaacataaatgcaaaatccgtatttacatccacatatttcccgtcaattttcaggtcgttttctatatcgatgcaatcaaacaaataccgtctgaaacatttcggatgcaaccaaatattatctccgcttctctcccagactcgatcaaacgaatacacgcgataatgttttaacggtttatcccaacggatacaattcccgcaggtgatctccgccccttcggaaaattttttgacgatgatctccaaagcccgttcattgaccaaataatcatcgttatcgacattgatgacgatcgcatcctgattgaccaccatgttttgcatagcaaagacaaaattttccaactcacctacatttgtatcgttccagcaagccgccactcttcctgcgaagtacggatccttacgcaagatcaaccgtgcataatcggcgctctcgttttcagacgcatcgtctacgtagacgatagaaaagtcctgaaacgtctgtctcttcaagctgtcaaacagccgtttaagtttttcgcacggcgtattgtacccacggatatacagaacaacatccgcatctgtcttctccgcccattctgcacgcattccctgcaaattgacctgcccttcctgtttactgcaataaaatccgttttcaatccgttctctgacaactgttaaaaagttcgtttccgcctttttttgattttcagggtgaacaaaccacgcctcgcaatcggcaaaacggacactctcattttcgaaaagcaccttatctaaacttcgatgccaaggaagttgcacctgcccctgtatgacttggttgggaagcggcaaacgcatcttcaatttttcaagatcgagaaaacacgtccgcacctcggtccgtgcgccgtagcctatcgtcccggaagcggatcttgcaatcccgaacgatgcggtcattgcgccccttttcaatgtgtcgattgcctttcgcacagcatccgaatggatggaatagaggatatcgctgtccgtctgaaatacatattttgtctgtattttttcaaacgcaaacagcgtcgcatacgttccttgtccgtttgctgaatgaccgttttttgactttaaaccgaagtatttctcgtatattttttccgtctcgtcgcgacctccctctgcgaaaagaatttcatcgatcaagccgttttcttttgccagcaacaactcttccttgagcatatcctcatcgtcaaaatcatatcttcttgcccgttcttctgccgcactcagatcgattaccacaattcttctttcaaaacgcccgaacttctccagcgaattcacaatgtggcagatattattgtaaatcgaacgccattccatcggattagttttaatcaacaatgtacaatcccggtattccttgacgtccatcgtctttttgcatgcaaaaatgaggtgttctgaaatcggcataagcgtatctgcatccacgccgtctccttccgcaacccgctcaatttgaaacccatatcttgaaaaaagattttggtaatactcgatggggcgatgatactcctcccgcacaggcctcccgaccgtcgttatcttttcaaatagttcagaccgcttgtattcccccttcagaccgcttttgcgaagctccgtatgctgcaccgagttaaacagcgggttgcagatactgatcacggctttcccgtcgtgtttcaacaccgcattgatatcgcacataatttcctgcgccgtaggatttgacacgcaacataaaacgagattgcaagtgaccagatcatatttctctgtctgcaatttcgcgcgatgagaaaggatttttattccggaagcggcgcgcgccgtaaccgtcgccatatcgatgtcgtaaacgctgacatcgcagtcttccgcgaggatattggcgatcctgcacttgcccgctccgtagtcaagcatcttacatggcttctccgccctgatcagctccaaaactttctgatcgtgcagatcttctttataccgcctctcaaccaaccgtcggaactgttcatttccgtcatctatgtacttcgttaaaccgttataagaacgttgaataagctgtttaaattcctcctcacctaaaaaaggatagcgcaacatctcatagacacggacgatcgacttgtttttggactgattcgtcacgggcagaaaagattttccataatcgatgagttttacatgcccgtccacaacaacaaaattgctttgtttatagttatcgaaagaaaatccgttttcctcggcaaaccgaagcaactgcacaaaatctccgacacagccgcctctgtacggaactgacggttcgtaccgataacgtatgaccgtcgtttcctgtaattcataaaaatccaacggatacaattgattgcatctttcaaattttttcgaaatttgtttcagaaatgataaattttggagcggcttaaaaaaatatttgaatacatggacaccgtccgcaaaaacgacaccttctcctccgttcccaaggaaacgcaaagaagtttccgcaagagaaaaactttcttccaactttttttgaatcgtttctttatcctgcatatgacgctgcatgtgcaactttctgcaaatatcgtcataggcacatattactttttcccgctcaagatacggctgtatctctttcagataaaactgcaactcggattctgtaaaatatgcggaatacttcttttcctgcaatatggacaacagcccctgaattctgtaaaaacctgcaacaaattttgtgagacgtgttaaaaagaactgcgtataaacattataaaaatcttctttttcagcattgatcccgacctttccgacagcctttgtaaatgaagcccctatcaaatcgagcagaagcttatttttttcttttgcgaaatcgaattctgccgtcgatctgtcatgcatagtcgcaaaaggtgcgtttacaatactgtacccgttgtgttttgcaagccatacccaaaaataatcgcttcgacgcccgattttatctccgatctgaatagaccagttcggaatttccaataaatcccggttaaaaatcaaagtattcccgccccgactgtccgcttctctgatctcgtcatcctgcatgaataacgggcgcgactgagccttcccgccgaacacatcatccggcgtacaaattttcccccatgttactggagtttctaaatgccttgtcgttgtatctgacaaatcataataataatcccgatacgaatccaaagtacttacaccatgaaggcctgctttcacgtacacatagtccaaaagcgaagtgcgaagcgtggacaatgtcggaagcggcgcatccagtgtataatttcccacaacggcatcatattctccgaaatactttccgatcacggcatcgatatctaaaggccgttctttaagtttttcaccatcatataccacttcttcgagacgcatatcatcgtccaagacccaaatcacatcaccttcgcttgtgcactgatgaagatatttttgtaaaacggtacgagttaccgcaatgtctttgatgaccggttcagaaactttttcctctgttacaaattggtcaaatccgtctttgcgaattttgccgagaacacgatctctatcaatgagctcatacgaatatccgctatcctctaaaatcttgagataggcatccctgctctgtgtgaaattgataaaaataatgatttttgtgttttccctctccagagcagccaactctttgagtaatctgagtccaagctcatattccgtcgcaataaaaccgatggtcaagttcccccgatacctttccttcgcatactgcacacttgtcctattaagtttgttcggaatgcggcaaatactttccttgtctattccgaagagatttttcgcgcgttcaaaaaacgcctccttaacatcctcggacatatagcacgcatacttataaaaaaatttgcgaagcccctccgctttttttatcttgccgtttgtgatcctttcacgggaattaaaagcgtcaactttaacaaggtacttgtccacgaccgcataggttgcgcctaaaagcatcatacgcgtaaagatatccctgtccgtcgtcgaactcatattctcgtcaaacagacccgctttcaaaagagtggacatctttacaaaagtattggagccctgcaaatgcggattcccgcgcaagaaactttccacgctcaattcatgggggatactcaaaggtcgttccccttgttcgttgcaatagagaagtccgctgacaacaaaatcttcatcgttcagcgcattttcacaagaaagaatatactcctcgtcccaaagatcgtcatcgtccaaaaaagctaaatatgtacgctcgtaatcggcagattcgaacaggtttttttcaagtatataatggatcgcagtgtttaaggaaccggcataattatgcgtgtacttatcctccaaaaatattgccgaagcgttttctgcaatgcttctttcgttttctttcatctcgtcttccgaatcgctgaccacaataattttatccggccttcttctttgtgttattaccgattgaagagctctctcaaaatattcaattctgtttttagtcgtaataacgccgataattttcatgtcaactgttctcccgcaggaatttcttttgcaaactccgtatctccgtcgcaataaaaacacgccttactgtgtgcacccctgtataaacgcagcatttctgctctaaaatcttttttatcggaagcaatatctattccatcataaaaatgacatccttgctcttccatcattgctgctcgggagcaaatataaattttacctctgtataaagaagtgcatcgcgaaatcgaacaactttcaaaacgatttgttgcgcgtttttttatttctcccatattctgccatttctgtccctgcaagaaaacatattttacaccgtgcgcttcgaacgtctttatcgtttgttctgctttcctggaaaaaataggatagtcgctgatctgtacaaccactttgctttttgccaaggttttcaaaactttttcggaaggaagaatcgtcccgttcgtagcaatgcggatggatttgattttttttaaaccatcggcatatacgattatatcgcagagttcggggtgtaaaaacacctcaccgccgtgaatcttcaatctgtaaagccgatcgatttgagcaaggaaagtatccaaatctcgcttgaaatcgacaaacggcatatgctttcgcttttcgatatacggaatcaaattggaacaatgcttacattttaagttgcatttggtcgttataaaacattcgatatacggcacatcgaatctcctgcatattttttgcctaaataacatagagatccgttgaaagcgactatctttgcctttgattttatgctgataatgtaaacattccttataaacatccacaattgttctccccttgtaaaaataccctttggcaatacttatcgccaaagggtacatcatgcaaaatctgacgataaaagtacataagcgatacaatcaccatatgccggaacattgatgtaatgcacatctttgacccacttaatatttatctatattgattataagctaatgctaattatttgtcaacagacagatatatcattattgaatttaattactgtccataaaattgtgttacagtatccacataatatcccttgcaccaaaattcgcggttacggtatgtaaacttcatgtttccccatttctgaaatatcatcaaactactcttccctttcaaataccccatgaatcccgtaacgctcattttgggtgggatacttaccagcatatggatatgatccgggcatatctctccctcgatcacctccactcctttccactggcacagctttcgcagtatctctcgtatctctatccgcttcccttcataaaatacttttcgcctgtacttcggtgcaaacactatgtggtacttgcaattccatttcgtatgtgctaaactattcgtgatgttattttgctctcgcattttaatgtcctccgattgtgtattttttcattgactggcaggtcagttcttattctacacaatcggagccttttttttcaagactcatcggtaaacctcttttcaaccacgcgactatcgcgtggttttctttatacaaaaagagactgctgcaaaatgagcaacagtctcttcattttgtattaagttatatatacaccaccattgtcaaaggttgatagcgggtgggaaagaatcaatattattcttgataagatcattattcatttgtttttctcctcgcgcatgaaatcaatttgtatcaaaatattttccttgtcttagcggcattggcggtctacgattatttacctgaatatatctgttccgactattatctaaggccttatccaacgcatctttaagtctatcttgtaatgaagcatactgctctataactatataatcctcattatcttctaatctgttggggaaagtagcgtagtcaatattatttttactatctccacgtttttctagcataacggctaaaatacccctgcgagtatgaatattacctttcaatgcttcatgtagctcccaatcgacatgtggtctagtatatgtatctttacccacaatacataaaagcacatcacaatcgttcatcccttgcaatattgtatcttttatgtactggtggtgttcgccatcaaaattcacgtctttagggactgcataaaatgggatatcattatctttcaataaatcttcaatatgctccctagcctttgtatctgccctatgataacttataaatactttcatattttacccctatataaaaagtcctattattattccaactgaaacacacaaaataggcacgtaataaaacaaaatcgaccttgaaaatatacaatttaagagattattattacgagttttacattcttttgtaatttttaattcaaaatcgatttccgcctcttccttattgcgcaccatatcataaagctttctataccttctctctaattgcaaataataagcgtcaagtaacgcaaatattaaaattggcactaatactattggaacaaacaagcctgctgtttttgggacaaaagcaaacattgcaacgactaaagttaatgcccatcctttaatcataaacgaattctgcgccattcttgttataatggcttgtatcatttccaaatgttttattttattttccatacttttatccgttctacttcctgtaaacctcatctaaggttttaccgtctttgttcttccactcagcccaaccgttacgactgccacccaggacaaagcaagctgctccactcggggttttgaatgacatggatttcgttaaataatattttccttcttgctctgaaatatctccgttatttaacgcaatctgcctttgcttgttaagagcttccaggcggcattttttctccatatcgatttgcgaatcctttaataccacaaattcactgccgtcaaaaacgccataggcatcgataccgttcgtcgttgtgtggaaaacatcaccctcgttcaggcttgctctggcattatccatcttgtaaccctgcgttgccattatgaactgaatttcttcatacacctcctcaatggagggcaggtcatactcatcaatctcatacttgggcttaacagagttttcaaccttataacggtttgattcgtgcgccttcatgatcgcatattcttcaagaccgcttatcatgtcaagtgaaaatgttttattatcagcaaggaacataattgctttattccagaaatccttagagcggttatgatcgtcgagccttagtactccgttgcgagtttgtcctatgtaaatctgagctatcttattctcatcattctcattgataagataataaataccggggcggttaattccagtaattttcttggcttcagaaagcaaagggcgaggaataacataggtcgtcattgtagaaaggtgacgcctgattgaccggattccgtcaggctgtccgttatgatatataatttcaagtttcttactcgttgccatcttgtttctcctcgtttattacatccataatatctccaacgttacagtcgagcaccttacagattttaagcaggacttccatagatacggtctcattctttccgagtttggcaagcgtagtcgtagaaatatccgccttcaagcgcatttccgtctttgtcattcccttgtctatgagtaatttccagagtttgttgtagctcaacatcacgagtcacacctcaactaatataatacatgataattataacatataaatcaattcatttcaatactttatcagcatttataaatataatatttgaaattactacttcaattaactacaataactgcacgcgcgctataaaaaagagactgtaaccgtaatggtaacagtctcttcgtttttattaagttatatacaccaccatcgtcaaaggtttatagcgtgtggggaaaaactttatccccagacgcttgtaatactttttcgcggtgtccgcgtctaccgtcagggtaaacagcggatcttcgggtgtaaatccccgattagcccctcggattacggatgttagcctgtgccccttatcttttgcccttagcgaaaaattgagcttctggcattacgccgttatcgcaagactaggatccatatattttatccgccttagcggttgtattcaattttaattttttaagtttttcccttaccattctttaattatataaacacccttaccgttaaatcttgccattgattttgcctgagcataccgtttttttcctttctgtaagacagtgccgacttataatcaatggtaaattcccaaaccaactttttcatatcgttaggcttttcaattagatcgaagttcatataccaattaaagcacgtttccgttacaggaacaatagtatgaacgaactgcttaatcacttctctatcgatataatgctcggtaaaatccatctttgataatagaaaatcttctacctttttcgcaggttcttcttctccgtcttcgtttggaaccattcccgcatcaagaatacgccttttgttgataagctcgattttttcctgctcgatttcctttttaagttctaaataggaatctttaggaatttcgtcttccaaccttaaccgcattaaacgcttgagtttttcgtccaactttactatctctttatcaaccgttgccttgatttccgctgctttttgatattccataaacacgccgatttgatataaagacgacacgtcgtttaaaatatctttcttgtttccccataaccctgcgaaaatatgccttgccatcatttctaatttccaatcgcatatttctttaagattacaagcttttgaatcttcaatccctgctttaattctaatatccttagagccgtagttaagttgattatagcatttgtacccgtagatgacttcaccgtttttatttttacgccatttgtttttgcgcattttataaccgcatctacattttaatttctttgtccaaacgtcgccactttcgtgaatgcccgttttgtgaagaacttccccgttttccgttctgaatttactataccttgtgcgttgctgtcttatttgcttgcatctatcccattgttcttcggatataatcggttcaaaatcgcctttaacgtaaagataggtatcttcgtcacggtttataataatcttttgatcaaggaaattatttcttcgggattttaagtacgcaggatagcctttgtaggttgagttacgtaatattcttgcgatttttgaattttcccatctgactaacccgtaactatcttttcttttacgccttatcatctcgtcacgaatctgagagattcctttaccggcagaatacatatcgtaaatcatgcgcaccgtttcggcttgctcttcattgattacgtaagtccctttcgccttgtccctgtcataccctaaaatattaccgcttccgtacaacacgcctttatctctactgattttctgccccgcacgaacacgctctgaaatttttcggctttcttcttgcgcaagcgttgccataatcgtaagcctaagttcaccgtctccgtccatcgtccaaatgttgtcttctacgaaatagacttcaatgccgtactctttcagttctctcgtaaccacaagcgtatcaaccgtgtttcttgcaaaacgacacacttctctcgttacgatcaaatcaaattttttctgcttagcgtcttgtatcattcttaaaaatgcaggtcgctttttcgcttgcgttcccgtgattccttcgtcgatatatttcttaataacataccaattcggatttctattcgccacgtcttcgtaccattgtatttgattttccaaagccgagagctgcgcttcgtgttccgtactaactcgtccgtagaaaaccacttttctttgccttgccctgttaaaattaacgttagtgggcattaccattccgttttcaatcaagttaaattgcctcctttaaataatttattttgctttactacactttccccaaactgaatacgcttcttttcgattttggcgtattctagctcgtcaatcatttcgttatcacgcataatttctaacatcttaaacgcgataatcttattcagcacctctatatttattttcgatttatcgactttttcctcgtttgggatagagtaataaacttgatttcctacttcgctattcaatttttcttcttttaattccttataattcaattctcctaaatttttattttatagggtttttgtccgtacttgtaacggaaagataaatacggacgccctacgcaatcttttttctccttatcaattcccgatattacgggtgtgttaagtgtagttttttctacattccgctgttatcggttgacttcaagtactcgtaagcctttttaatgaagtccacctttgtcatattgcgttccttcaaaaacgcattgatctcttcaaaaagctctcgcgggatcattgtctgaaaattaccgctcgccgcctgacgcttttctttatttttctcttcgtatttacgatttgccactctttgcggagtatcttcttttctcgttaccatagctgtcctccttaatcgacgtagacaatttcgtttaagatttcttcttcgataagacggtgtatttcatccctacggcgtacatcttccagataattccccgttcgtttaaaccgctcgtttttggacagcttttcatacataacgtcatagagatcgttcgccgctttatcaacgccgtgcaggtattcgggcagataccctgccaaactcaacaatttaccgaaattatgttcttcaagatagtgtttggcaagtgctccgtattttccgtaaacgtgctgcacgggttttacgagcttttgatactcaataacttctcaacagtaagaccttccgtttcagactttctttctaattcttccaaagtcataacaaacctccaaaaaatattcatcgtatatatactatatcatatactttctttctcggattgtcaagcataacggagaatgtttactctttgccgtaatcatatcggcttacttttgtctcttgcgttttttgctgttctctttccgccttcatttcctcttcaatctcctgtaaacggttacaatagtctcggcttaaatactcactctcttccccaaaagacgataaaaaaccgccaataagtttccccacctttcggtgcgaaatggcaaggtttcgtttcaggcgattgtcattgaccttatgtctatacttccgctcaaaaatttcgggtttgatattcttgactgcacgcaatacgatgttgccttgccgccttttataatcttcttccagttcttgtatgagcgttatgttctgcggatcaatgaaataatggttgccgctctttgtcggttcgccaagttcgtctatcttacgccgcaaatccgaaagccgctcataaaattttctatctgccttccttgcccgtatatcaaaaagcataagtcgatttactgttttatcgatctgctcccgatacggcaacatatcctttttactatagaaaaaacttgcgtccttcggtatcgttttagcaagcgcgatcaattcctttcgcacctcatctttgcttacaatactcttgggaaaggttattctttttaattcccgcaaagcctcgttccgcgtcatatacatcttgtccgtcctttcatctataaaggcgttcagccgaacgtgcatacggtctatcaccgctttctctatttttcccttgtggcggtactctaactctctttttctgtacttgcacttcggctctttctctgcgaaccaaaaatgtatatgcagatgatgcggcttatccttgtgcagtgaacatattaaatccatattctttggatcaagccccatatcccgaaagaattctccgaacgttcgctttacaagtcgcatacatttttcaggcatatcgatcttgcggctcatttcctcattgagcgagatgaagccgtgccacaatatcttgtccgcctttgcccgctcctgtatttctttaagttcctcttgcgagatgaacccgtcgccgttgaacacgcctgtggatttttcaaagtacgaaatcatgtcgcgcatttccgacttggaattctcgccgttcagcttgcggtcagcggtcatatacttgtaaatgttgttgccgctgtcgcgcatctcataataaggacgttcccgttcaaacttcttgcgttcttccgtcgttgcgttactctttaacttccacggcgtatatgtaatgttaaatatgatcggttgattacttatggcttttcctccttttggttcattttttcatgtcaatttgctttttatttgccgcaagcaaaccgatggcgggtttcccgcatcggaaagcaaaaacgcaaagtgcaacagcaaaatgcgtttttcttatcctgctacaaattatccctaatttgctaccacctactcgatttttttgcttaccatttttcactgtatttttgctcatatctccgcaccaattgaaaaatatttcgtacattttttagctcctcatccgcatcatactttgctgcaacatcaccccaatccaagtccgttttataccgctctgcactgccaaacagacttccttgtatatcggaatatgcgttgcgaaaatcctcatacgtcagtactttcggtgaagtaaccgtttcagttcgttgaaaatcagatacctcttcttcagtcaaaggtactgcgcaaactttctttttctgtgctccgcccctttgcccgctgctctttcgtttcttggaaacatccaacttccgtttgcacaaagtaaagtatccttgcatcgtcccatcctcaaacttcggttcttcgtttccgaacatatacgcacaaattgccttgacaaatatcccttgtttccttgtattcatcagcttcattgccttgtaatacgtttcgtaaaacgtaaaatgcttggactgcagattatacttcttcggtatcttcccgatactttccgtttccttgacttctttcaaaatacttgcgatattgctccaataaaaatcctctttgtccgataactgctccataggttctctgtcttcaaactcatacgcgcaaatacaatttgccagttttcccgcgcttatgtcgtccatactttgcagtatgtctgcatacctttcataaaatgtaaattgttccattcttttttctccttcattttttgccgacggttatggctcatcggcttgccttgtttgctcttactatcacctcctgcattaatctttgtatgagcaacctgttcggatacccttctgcaccgcactgttcgggcaatgcaaaagcccgacctttgttcacggtcgggctcggaacttcaccttattcagatgcttcctattacgctgattagagctgttttccgttggtatgaaaatgccacaattttacggctgttttcccttaaaaaacagtgtattctccgctttattctacttcttgttctaactactgtggcacaatcattcaaaccgaagattacttcattctcatttttttgtacttttttgcgaattttcttccgtacaaactatattctccgttctcgtcttccattacttctttcgctgttccgtcatataattcccataacagttccgagaatatcgggtgattgataaacgccgcataaatgcgccaatctgccgcgctgttcttctcgtagtggcgcagcacgaggatcaatacgttttcattcgtcagccatttagtaacctgccgatctcgctctgcctttatatccgttatttgctcataaaggacttcccgttcctgttcgtccgctgtccgtatcgacaaatacaagcgattgattgccgccttgctctcgtctatgatttgtacgattttatctttatgcctgtattccgtagcgttccctgaacccacatcatacgctaaacttgacgaaatcgggcaatagtccccgtattgctccctgccttttcgaaaattcaccttattcacaagcgcatacagatcatccatcgccgtatgataaaaggcgtgctgtttgcttctactctcgtcaatctctgcaaagaaattcggagaaggacgttgatacttcttacgcaataccgcaagttccttgcttacagaaatattttcaaagctgcgttttgccttatcgatctccaatcccgaaagaaccgcaagtttgcagatgtcctcgtaaacggaaagcatctctccctcctctgcgcccttatgtagttcatcccacaaaatactgttgagcttttgcgacaggttgacgatttccccgatcttattgacgcttgtatcatggtcgagtttagagagcgtctgttccgttttttcctctgctttgatgttgcacacgggaactttgaaaaaatccttatatcgcgcggccgcgtttaccaacagcttgtcatccgttatcagcatcgtatccgaatcataatcacagccgttaagcctttgttgaatattctcgcctattgcgttgacgcagacaatgttttcacccaagtcaaagtaatttcatatctcgccgctgagattgttttccacacaatataagttccccatcgtgatatgaggagaacgcgcgcacagcaattttgtcccatttataaagcgatcacagcggatctgcccgggctttaattcgcttgtcatttcttcaccagcaagatactttaaaagctctgtaccgtttccgaagagagtggcgttcgtaccatttaatagaatatgtccacgctttaaccgctcctttaaactgcgcacgacgtcgtcacgaaaattggcatacagttccgttttatcgaaatgcggatatttgtgcatgagcgtaaagataacatccgcacgttccacaagtccgtcacagtgttcttcttcaccgtctttttcacgagcaaaggcatccgtaaaatgatagcgcatgaagtcaatatccctgcgtaaaagagagagataatcaatgctcggctgtaacagatgtttgacttcctcttcggacagagaaagcgtattgataagctgataactgctctgaaccatctttccgtggaaaaagcgcgtacctttatcgtatttgactactccgaaagtgctgtccgtatgcgccgcccattttcggatatttttctcagttaatccgcccgcgaatttgaaatatttcaggctgttcggtgtcgtcaccatgacaatctgatgtatgtcctcggcaagcgtgacaaaaccgcgtcttttcagatcgtccaaagtaatttttttatctttaaaccatttctgcaatctggtacggaaagcgcacgacttgaaaaacttgtttcgtagcagcaccatatgcttgtccgcatagccgtttgcaaacatactctcgtccaaaaggctttcgccgtcccaaatgtcattggtgatttgtgttcgtttcgttcttgcagagagttttccgtcctcgatctccaccgatacgacttcctcttcaaacacgcttttatagtcaggaacaaacaaaatgctgccaagcggaatttctattgttcccttgatactgctaagcgataacgcccggtatgattcccacgaagcaaggtctttttgcggttttaaaccgcattcgctccacttcatcatatgcctgtacagtcgctcgtctataaaaaggcattttccctcgcgcgaactgcctgcactgcgcttgtacctgacatagtgaataccatccaaatgaaagccgttttcgtagaaatgttcccgaagtgctttcaggttgacgggcttgccatcttgcggtttatagacgtaattgaattttacattgacgacggcgagagtataaagaatttcattcttatcctgaaaagagaactttttgcggcaaactttcttatatactttttcaagttccatgcaatccaacgaatcgtccaatatatttttaaacagccgaaaataggctttgcttttactttcaggcattttgtaccctacgctaacgccgttttcttgttcttgtttataaatatccgccgcttcaattgaaataattctacatccttgtttcattttacctagccctgctattgccttttttgatctgaaattttcatatttccactcccgttaggaatcgatacgcaattcacgtgtatataaacccaatagaacaataatatttaaatcaagaattacaatatattattattcactaggttatatataactgatgtttttcatcgctagtaaaattacaatctttaagctgctttgcttggttttttattttttttacaagcgccctaaacttctcattgttaatataagcttgatcccacttttgtttatacatgtgtttaattacaaaatctacaaaacctagtggcttaattatcttatccataggaattcttatttccgtttctacccctatatgaatatgtgcataagcatgtaatccttctttatattccctatccgccacgtcatatcgtataggacaaggatatgtttgaggcttatccgttgtcaaatacatttcatattcttgagcaattgtatcaatattatcttcagttaaatatttttcttcaaactcactataagaaagcgtttgttcaatcctatgaaaaaaagaataatggatatctttcggggattctgatgtgaattgaaaaaaactaccatcttccaaaattatatcatagtctgaattatgtaatgcagttaaaaatttagccttgtaatccccagtatggcaagcttgaaaataagcctctgagtactttccaggcttcaaattctttcttttaaccgtgcaagtatatgaaatgcccactacatccaaataattcaacacatcctctatagaaacaagtatttttgcactagtcattactgcccccgtactcatccaacatcattttgacttcttcaggagacaaatctaattctttcattttgtcgataatttgtttaacttttttcttgttttttgcgttctttttatctctttctataacatatcgtggttcggtttgcaagaattttagcttaaaaccattttcaaaaactttttccacttctttccaaagctttccgtctttaatatttaccccacttatttttagccatccttttgctctagtaaatgctgtaaatattctatttctcattgaacggcgattgctattatcttcgaaaatttgagttcccattacatatacttgagccgcttcatttccttttgctctataaactgtagataacgtaacacatccttcctcaataaaccctttagaataagacctatctgtcaaattaaagctttcaatacctctagcccttaatctatcacttaatagttttagttgtatcttactatttttatcatccaaagtaattactataatatcgtcaggatgcaatttttccgtatggatactattataaatatcttcagccaccgcatcaatttcttctatcatgccatcataggaattaattttaataatttcctcaggtttttgcttatcagaaataatcaaaggactattaacttttggacgaacaatttccattttgtcgcctatacgactattcccttgaacaacttcatatccgaaatcgtgccaatgctgattattttctagagtttgaataagagcatcattatatattccaaatccaattgcatgagctaatactaatatctctagaggatttcgataagttttttctaaaacaacatcgttgtttaattcgggaaactcttcatttaatttccccaaatctattccctccgcaccataatcatttttaaaagtagcaatcgtatcttgaatcttaacatcaaaaatattttgcaaatcgtcatagcaccaaactaaacaatcttcttttactatagctctgcataattgatagaaagaaggtctaaaatcttgagcctcatcaattaacacataatcatagtctttattcattattcctttagtcttatgtaacaaatcactgcatactgcatcaaaaggatctacataatgtaattgtttcgcttgttcaaacgttaatggaataatattattatttttacatgctgtgtaatacacacctgaaattgttccaccaccccacgaatgtttaatttgtattttatcaaaatccggcaaattgccatcaccaaaaaaacgataaaatctcacaatcatagtttctatataatcatatagactcttagtggtaaaagtatataatattttcttgttaggttctctcaagtgtatcaaagcagctttcatacacaaaattattgttttacctgagccagccaaacctcttattctctgtggcccagcaatttgtgctaaagcggcatttttctgttccaaatccaaataagccatctgttcttccatttccttaagtattgcaccttttgtcagaacatcgttttcacctatttcacgttttttgggttttaaaattacctttgcaccttctaatatcgcacatatctctttttgcatttcggtagtgatctttttatccgatttcatcaataatgataaaagttgttcattgcttgagcacacctcattttctaaatcatattgttgcgctctttgagcaggaactagtggtaaaaacaatactgattttaattcaaatgataaagaacgcttcgattctttcaacaatttagaattgctttttacaaatctagaaaacaaatagttttcaatctgagatgtttcttcatccatttcttcaatcttctcaaaagaagtttctgaagaacaattaacaataaaaacacctccgtctggcgaaataattaaaaattttggtgataaaattctttcatcaatatccatgtaaattggatattcataataaagagtgtactcgtttctatctttgagattttccctcaaatattcaaaaacctctttagttattgtatctttataaagtttatccgaactaattatgcaattcatatatacctctcgttacataaaatatctaaaatcataagatttattgtgtgtaatcatattttgctttgacattcgagctactatttttgaaaaatcaattgttactggtaaattcttatacaaactatccccactgttccaattcatttttgttaacattaacaactcattaaccaacatatcgccactagaatctccttgaaatctcttaattactataggaataggaataccttttcctcctttataataattaaaattaccctttaactcaacatcttttacacaaccatgagtccacaataatagcgaattattatctaattgcacggtagtccctcttttaatggcaaatccatgtgccccgctatcatattctgacttaaactgaattccacgccatccagtaaactcttgaatttgaattaattctaccttttctattccacttaatgctaaatttatgccttctatttcttccgaagtaaatggagtggttttatgaacaacgattctctttattttgttaatcggtgatgagtgataatacgctcttaataaattccccactatatatgatgcatcttctttagtcatgtggggattccttcttacaattttaggatctcttaattgattaacaatcaacctcatcccatttccacaagaatcgaacaactgactacaaccaacgtaatagttcccatttggcaacatcgaatagctaattcctataaaagcggtatcatcattaaaatacttaggttgccacaactcaccatttgctttagcatagatagcagaggaaagtccccacttcacttttaattgtagcatatgattaatggatttatcttctaccaattggacttttatttgattatttgcacaaaacagttttatggcatcatgtaaatcaaaggctccattttttcttaatcgttttgcttcattaggtatataaactatcaaaacatcaaaatcatttcgcttatcaaataacgatttaattttagaagtcaaaacactataatactcttgagctgtttttatagaattaaaagactcactatataacacacttaaactagagaattccgttggaatgtctaggctctttctatatacactttcaaagccagcatactccttaacaaaaccatccgaatctttatcccctatggtttcgtttaaagattttaaatggttaataattctaaaataaaagtttttattagataatattgccaacttaattgattctctattcttcgagtataaataatcatatggcccgtcctctattaaccctaccaattggtttacatgcgaaccataacaagactgcatctgaggctcatcaaactcaaaagcttttattgttggccattctttttctctttttgttcctccttgactaagagcaatactattaaacttaaaatcaaattcaccaagagaaaagtcaaataaacaaaatttataaatttgcctctgccaaaacattaaattttcagagaattcactattgcgccttttagataaaatatcattgaatatttcttgtttttctactttttgcaatggttccccattaactttttgtacatcaatagttggttcaagaatcaaaaacaacctatttgaatagctatctaaataaatgtttaaagcttcatagtatacgtatgccttgtttttatactctttctttgaatcagtaagtcgtaattttctttttgaaactctttcaaatgatgcattttgtgataatttcaaaaatatcatatcatataatagttgatattctaatgaattctctctttctaaaaaacacgaagtaaagtttaaggtggaaatatttttatcaattttatcacttaaaaatctttcttctcctataaaacaaatatttcctttttttaatgttgccactaccggtttaccgcatattaactcacgcaattcattaaacgacttcatcttcgttttacagtactttatcgtatttttagacaaatcagtacacaactcaaatgcattaaattttacaaatgggtattttctttctgaacttaaaaaatcaatcctatttgtttcggacttcttcctacctaacgattcgatatattcttcttttaaatccaagcttaaatacatgttgtaaaagaaatcgtcaaagtctgtaatttccactaaattaacttctttgcctaatttttctgcataagttaacacatttcttaccttatcagaaactacttgaccttttaaaatacaccaacttatcccttttgacaaaaaagaactgtcgttaaagccacgcataagccactccattatagaatcatcgttcccagaataacccacaactaataattgcttttgagaaagttgattataagagaattttgcaattctactttcaagcattctcaattcttcttcagtattttgaattttatcgtacaaataatccccatgaagtttgataattttatatgcattatctacaatatctatttgtggatttaacgatgaagatattgttacatttctatatgttggattaataatatttaaggcactttcaattaatgaatcaaaattagttgtaaatgcgtccttaatataaccatttttaattaaagatgctaaacacaaatacccattactcggcaacttgtttgatactattttagatataaaatttcttctagataatattgtctgataacatttttcaaaataaaaagaatactctcgactatctccatctgcaggataatccgaaagcccatcaaaaaaaccttgtatcttacgttttccctctaaagattgaatatccttaaaatattgctctgacatattgttttcattacaatataacgttcttttgaactgccacaccaaatcttttgcagaaggaatttgagactgaactgatgcgcccgctcctaaaaaaacgctgatgttttctctatcaaaacttttcatcaacctaatgtattctttcattgaaaatattttcattccctatttcctctttttatgttcaaaacttattttttctaattaaaactaacatgtattatataccgaaaatattatttaaatgcttttattttttctaatatctctttatctgctgggcagaaattatagtagtgaatttcactagattatccattttatatcgttatgctctagtttttgtggaacaccttctgctataattgcgttaaacaatgttaaatgcactataatatcaggatattcgtggacaatgtccataaaaacgtcaccgactcttatcgtaatatttaattcttctctacattcacggattaaggcttgttcttttgtttagccttgttcaaccttgcctccaacaaactcccaaaggagcactctcgccttatttgcaggtctttaacaaatcaaaaacttgcccttatcccatataagcgccgctacaacttctaccatctaaaacctctattttattctctcgtaatattcattcaacttcttatcgcaaacagaaagtatatgcactttctcttcgtccgaaagtttcttccaaactgttgaatctacttccacgataccaagcgttttcgtatgacgcatcatattcatatcttcaaaacgtttaaacggattggaaaggatatttcgttccgcttccttatcggtgtatcctccttttgcgaaaatactattttgtttctcaactttcaacccttttgctcgcctatcttcgtaatacgccctaaaataagtaacgatatcttcaatcttaactctacctttcttgtcagcatattgcagtaaagcttttagtaaaacaggcttatatgaataactcatatccatctgctcaaccatttccataaataaagtcttgcgattattgtcatctataattttccagccaaactcttgcgcatagcgttttaaagtttcttctttgaaatacttaaataccctatgttcgctcataggtatcactaagtcaggaatcaacttctcttcacgaacatatctttctatcgtttcagactgcacgtccacacggcgaataaattccatctgactgatcattcccgccgcctcttcttgccaattaaaaatatcaacggcctcgtaatcggtagcatcaacgggataatcaataaccgcatcagggcgttcaccttttgcataaatctctatttccgcttctcgttgccctttcttacccaaaacagttccgcctgcgtgataatcttttagcttaaacaaacggtgcatagaatacggagcattatattgacttgcattgtccacaaagtcaaataccattaaaaattcttttccctcgctaagtcgcataccacgacctaattgctgcatatataaaactttggacatggtaggacgagccataaacaacacttccgtttgcggacaatcccaaccctcgttcaacaaatcacacgcacaaagaacttttaaatcaccacttgcaaactttgcgatttgctcgctcctttcagacgttttcatactacccgaaaccgctatagccgaaacaccttgcgccttaaaaagttctgctatctgttccgcgtgttttactgaagcacagaacactaccgttctcttgtctttaacataattaagccaagtatcaacaatgagtttatttctttccgtaacacaaattttaacgtctaaatctcgaatattatactgcacgctgttaaaacgaactttcgtcatatcaatattcgtatgaattctaatacaacgaacattggtaagcgcccccatttcaaccgccgtttggatatccaatttatgcgctgtattcttaaagatttcaaggatgttggtatcgtctgaccgctcaggcgtagcggttaaacctaatataaatttcggtttaaaatatgccaaaactttttgataagtatccgctgtggcgtggtgagcttcgtcaatgattatgtaatcgaaatcatcgtccttaaacgaatctaaattaagtgcaacactttgaatactaccgcaaataacgtgcgaatcgtagtcctttatactgtcagcaaatttaccaaccgaaacgccactccatattgactgaaacgtgttatatgcttgattaacaagttccattgtatgcgctacaaacaacgtgcgtccgccaactcttttggcgtccataactgccgttactgttttgcccgtgcccgttgcttaatataagagagcaatagtttctttactttctctcattgtctgtaagttgttaagcgcttcttgttgatattcccgaagttcaagtttaccgccgtcaagagcttgtcctcgttgtgtaggaagataatcatctatttccttaaatctactttccgagcccaaaaacaagcgtaattcatctttaacagtatcgggctgtttttgcatttgcctaaccgtccaacgataaacatcccaaccgagatgaatcatactgttctgtttaagcaaatcgtcggtaaatttatcctttgaaacgagtcttggattatgcgatccttcgtcgcctatttcaatagcgattctttttgctccgctttcgcagacaaaatcggcaaaccgtgcattttggtaaatgtcgaaaaacgggtattgcgagtacaaataccctgctttttccgcaccgaaagtgtcagcaaataaatctatgaataaatcttctgctccgctaccggaaatagacttaaattccgtcatctttactcctctattacctttttcagcaatatcttcttatcaaatccgccgcttttctccgccttttctgctcgaatgctttctaattcttcaagagaatacccgcgagctttcgttgtcgcataaatcacttctaataagtccgcaagctcctcaatattttggtccttgtgatattccgcaagttcttcgtcaagctttttatctaacatttcaagataattttcattagacaaaatctcaattttgcactgtttacccgacttttcaatgatttcgggtattttatccctaactaatttatcgtaaataatttctttcattttcaatctatcgcttcttgttccaatttgcaattatttgacaacatataatcaattaaaccttgaaactctttgtcctctattttttttaaccttttaatatcgttgtcggtaagttttttccagcatctcatattagtcgacaaagtttcaacatccattttataaggaaagaattgaatgtttgttttatctcgcaaatgtttcaatatgtgaataccgccaacatcaatgtcgccaaaatggaaaaataacaattcaggatagttatcttgtagtttccttaaaagcattcgttttgtgtggttatgaaatccccctaaatacaacacaatatatccatcatcattaaaatcgtaaaaactagttaaattttcaacagtaattaccttttttgcgcctgttttaataaacattaaatcatttatcatttcatcggacaagcaatactcgtatcctaattgtcttaaattgataataacaccgtttaatttaaaagtaacatctcctttaataattgcatatgttgtatttcttacaagattcttttcagacaaaatttctaagactgtttcttcatcgaaattatcaacaagacactcttcgtcaaagtcataaaaaattctagcaatccttgattttaacttttcaaactttttagaatccccataaaccttaaccgaaaagtctctaaacttagtttctttatcaagattttgtatttcttttattcccagcaatatatcctttaattgctcgcaagaattaaaacttttaggaaaagaatgcttttttttaatccaatctctacaagattcaatatatttcccgacaagaccaatctcttcctcgtcggataatatttgaccgactttctctaattctttgcccggattggctctattcaaaaaacgatatatttcgtcgactctaccaatatttaatgtcaaagattcaaaatcgcagaatttgtctctttttataactataaacccattcttttcgtattctgccaaaatcgaatcgttccgacttcgataatcataggaatcgacagcacaataagttgccaattctttgtcttttagcgatagcgaaatacttagtttccgctcactcccccccttagacaacacgctgttctcatacttatccaaaagcttattcaaaatagtctttccaaaatttttcatgctgatactccatcggtaagttgaataatattaacccgattattgctctttacaaatcctattaccgtatccatatacgaagaaagcgtaggcatacggttagacggaaccacaatacaaagctgaatatcaagctgtttataaaactccatcaaggattgaattctgctctcgtccatattgttaaacgcttcatccaaaataacaagacaagtcggagaaacggaattattttccctctttaacaactgattgaaacaagcagctattataacatagaaaggcgtttgtgtttcaccaccgcttttttctttatttgttttagaaaaataagaaacttcattgcgcatatttgtcattttaatatcgaacttcatgtagtttctataatctaaatactttgcaattttttgttcggaagccgtatcggactgttcagtaatgatattatcaaaaagttgttttaatacgtctttctctcgctcactcaacgactcatctaacaaagattgaacttccatgaccttccccgatgtaatgattttatagtattctttcatctcatccacgtcagaagaatcgtattcaaactgataaatttccctatccgtaccaaacggcgtcttttttaaatattgattgataccacgcaacgtatccttagcttccttgatacgttcagatagttttgcaataaaatcatttttaaaatgttcttgacttttttcgtaagcacggaatgccctgtctcggaaatcaaccagacttctatctctcaattcgtaatatttttgaatgaaatctaatacattttcaatcaaaggcgacatagaaggtgcataatccttcacatagctattcataccatgtattatagtagagcgcacagaattattataattttgagccttagcgcaatcgctttccaccctcgatttatcgatttgtttatttacttgataagagaataagaagttttcaaatttgttttgatcacagttttgcttcttgtcttggtattctaattcgtgtctttctttcgctttaatttttgtatctatatcttctttcagtctaccggatttttcgcgattagtattgttttgctctgataaatcctttttttctgtatatagcattttaagagctttttttactacagataatctttcttgaatttcaaagaaatctttattatcttgatcttctcgaatttcaacttctaactcagtaataacttcttcacattcctttctttccgcccaaacgtttttacatgagagtagttgtttaatttcggatttacttaaaatatcaaggtcgcgacttactttttccttttctgaacctagctctttaatgtttttttcaagctcatttatttctttcgttaagatttcctgacggcgtaagatggagttcttaccgatgaagggataacgataaacttcaggattgatattgtctgccatacgcttgttgtatttcatgcaagtatcagtgatggcggagcggtaattctttaactcgataacgtcgtcgacgcaaattacatgacctaaaagcatacttgcagcaaattcagcgaagcggttttgaacagaaagcttagtgaacagactgttttcttcaaaagatatttcgttaggattatgtttacagttaaaaatgctgacaccgtgaatatgttctctcgttttgcaagcctcatatatttttaaagcgtcatcaaaataaacaggatcgatgataagcgcaaaacgttgcgtgttcaaatagccttccaaagcgttagtccaacgttcatcgttaatttctaaatattcacaaagaggacgaacctcaatttcttttttatactttttgaaaagttcgtctttgattatagaaatcaaccttgttgttttttcatcatacctgtttttgccttttttaatttcagataattcatattgcttacttgacagtttatcttttaaatctgttatttcgttttcttttcttgcaagagcggttcttgtttcgtgattgatcccctcaatctcttcttgatacgttcttaaatgctcttttaaaaggggaaaattgtcattttgaatatcctccataaatctatatcgcaaggaaaaatgacgaatgattttattttcgtttgcaatcaggttttgatagttttgtatttcttcttttatttttgcaagttgttctttaagattatttaatcgatcctgtttttcttttaaaactttgaaaagttcatcgttttcaatatctcttttttcgttttcgcggaaagaaatactttcttgatttttatcaattttaccttgaagttctgaaatagtatcttcggtttttattaacgcttttcgttttgtttctatttctgattgaagttcttgaataaaaattagttctttcaacacttcaaaatacttcaacttttcacagttatcgtgatatttttctgcttgtgagacgaatgtatc

SEQ ID NO: 538 - DNA, 2778 bp, Unknown
  16S sequences of unknown bacteria
ttggcccgcccggagggattcgaacccccggccttcagaatcggaatctgctgcgatatccagcttcgctacgggcgggtattaaatttttgccgtcttaattcggccaaatgattataccacacttttgccgaaaaatcactatgaaaatccgaattttgaaaaaaatttttattatcggccgacaggctttatttttttgccaaaaaaccatgtcgaaaaaccgattgcgaccccgagcaaggcgccgaaaagcacatcgctcggaaaatgaacatatagatagagacgggaaaaggcaattataacggcgagaggaacggcaaagaacgcgaaccttttatttgcaagggtcaaaataacggcggaaataaccgatgacagggtgtgtcccgacgggaaggaaaaatccgtgggatttttaacaagcagcccgacattttcaatccagcacgggcgcggtcgggcaataaggtttttaagagcgacatttcctatcaaaagcccggcaagcataccgcaaaggcaaagcactccgcatttacggtatttttttgtgcacagcaaaaccagggaaattgctatccaaacaatgcccttatcgccgagaagagtcaacttcggcatgataaaatccaaaaaaggacaggccaaagagtctcttataaaatgaagtatctgccaatcaaggctttgaataaaatccacggtttatcgccccttctgccgataatggtaacttgaaaagtccagtccgtcaatctttttcggaaaaaattcaattttttttaaaaaaggggttgacaaaatgccttttggggtgtattatcataccaacctacgagataggtaggtaataactgcaaacaaatttgaagataaaatcaaaaaaggagtaattgtcatgtcaaaagtttacacttccgcagatcagcttatcggttccacccccctgcttgagctcagccacattgaaaaggagctcggtcttaaggccaaaatccttgcaaagcttgagtacttcaatcccgcaggctcggtcaaagaccgtatcgccaaggccatgattgacgaggccgaagcatcgggcaagcttaaagaaggctcggtcattatcgaacccacctccggcaacaccggaatcggacttgccgccgttgcggccgcaaagggctatcgcattattatcgtaatgcccgagaccatgtcggttgaacgccgtcagctcatgaaggcctacggtgccgagcttgtactttccgacggaacaaagggcatgaagggagcaatcgccaaggccgacgagcttgcaaaggaaattcccaacagctttattcccggccagttcgtaaaccccgccaaccccaaggctcacttcgaacacaccggcccggaaatttatgaggacaccgacggacaggtcgacatctttgtcgcaggcgtcggcaccggcggaaccgttaccggcgtcggtgaatatctcaaatccaaaaaacccgacgtaaaggtcgttgctgttgagcccgccacctcggcagttctttccaccggcgttcccggcgctcataaaattcagggcatcggcgcaggcttcgttcccgatgtgcttaacacaaaggtatacgatgagattatccccgttgccgacaacgacgcctttgccaccggcaagcagatcggacacaaggaaggcgttctggtcggaatttcctccggcgccgccgtttttgcggccatcgagcttgctaagcgtcccgaaaacgagggcaaaacaattgtcgttcttctccccgacaccggcgacagatacctctccactccccttttcgccgactgagcataaattttttgccgatactcgtaaacgggtatcggctttttgctgttttcgaattttgttttctgacaagaggtgtataatggaaaggattataaaatgcggttgtcgcaaatataaaacggagaatttttatgaagatttctgaacttttaagatcaagacgctattccctttcctttgaggtttttccgcccaagacctactctctttttgagagcgtaaagagctccaccgaggagattgcaaagctttccccctcctttatgagcgtcacctacggcgcaggcggcggcaccagcgattatacccttgccatggcgaaaaacatcaaggagcaatacggcgtgccttcccttgcccacctgacctgcatttcctccaccaagcagacggtggagcacatgatacattccttcaaggacgcgggaatagagaacataatggctctcagaggcgacattccgaaggagcgtttaaacgacgaccgcaccctttgggattacagatatgccgttgaccttataagggacataaagcgcatcgaccccggattttgcatcggaggcgccgcctatcccgaaattcatcccgaaagcaaaaatcagcgggaggacataaaatatcttaaggaaaaggtcgaggcgggctgtgattttctcacgacccagatgttctttgacaataatcttctttataattttctttataaaatccgcgaggccggcataaccgtcccggtaattgcgggaataatgcccataacggcggcaaatcaggtcaaacgcgcaatcgagctttccggctcctttatgccacaaagatttttaagcctcatcgacgccttcggcgacagtcccgacgccatgaagcaggccggtatcgcctatgccaccgaccagattatcgacctttatgccaacggcataacccatgttcac

SEQ ID NO: 539 - DNA, 6530 bp, Unknown
  16S sequences of unknown bacteria
caacaacacggttaattggattcccgagagtatcggcaaaggccgtttcggcgactggctggaaaatgtgcaggactggggcatcagccgcaaccgctactggggtacgccgctgaacatctgggaatgtgagtgcggacaccgccattcggtaggcagcattgcggagctgaaagaaatgtcgcccaactgcccggacaatattgaacttcacagaccctttattgatgaggtgacgattacctgtcctcattgcggcaaacagatgaaacgggttccagaagtaattgactgctggtttgattccggttctatgccgtttgcacagcatcattatccgtttgaaaacaaagacttgtttgagcagcaatttccggcagatttcatttccgaagcggtggatcagactcgcggatggttctattcactgctggcaatttccactcttttgtttaacgaggctccttaccgcaatgtagtcgttttgggattggtgcaggatgagaacggacagaaaatgtcgaaatccaagggaaatgccgtcgacccctttgaggcgctggacacttacggagccgatgcgatccgctggtatttttacagcaattccgcgccctggctgcccagccgttttcatgacaaagcggtaaaagagggacagcgtaaatttatgggtacgctgtggaatacctatgctttctttgttttgtatgcgaatatcgatgattttgacgcgacaaaatatcagctggaatatgaaaaactggcggtaatggatcgctggctgctgtcaaaactcaatacgctcatcagggagacggatgacgatctgggacattatcgaatccctgaagcggcccgggctttgcaggattttgtggatgatatgagtaattggtatgtgcgccgcagccgggaacgtttctgggtcaagggaatgccacaggataagatcaatgcttatatgactttatataccgctctggttactgttgcaaagctggctgcgccaatgattccgtttatgtctgagagtatttaccgcaatttagtctgccgattggatttttctgcaccggagagtgtacatttgtgtgcttatccaattgcagatgagaaattaatagataaaaaactggaagaggatatggataccgttttgaaagtggttgttctgggccgcgctgccagaaatggcgcagctattaagaaccgccagcctctggccaagatgtatgttaaggcagaagatagggtaggagaattttacaaaaagatcatcgaagaggagctaaatattaaatcagtagaatttaccgatgatgtttctgcctttaccgcctatcattttaaaccacagttaaagactcttggtcctaaatacggcaagcagttaggggaaattcgcaatgttttgtctacgatgaatggcagtgctgcgaaaaaagaactggattccaccggatttctgaagctccagctttctgccggtgaaattgaactggcaccggaagatttattgattgaaatgacccgttcggaaaactattattcagtagaggatggcggcgttacagtggcaattgaaactgttttgacagacgaattgctcgaggaaggatttgtccgtgaaattatcagtaaattgcagatgatgcgcaaagaagcagattttcaagtgatggatcatatcgtggtttatgtcaaagggaatgaaaaaatcgccggtattgtgcagaaaaatctgcctattatcgagaacgacactttggctgatatagtaaaattggaagaaatggatggatatgttaaagaatgggatattaatggcgaaacagttgtcttgggcgtaaaacgggtaaatagctgatcgtaatcaccctgaaaaatccatataacgattttaaccagtttataaacatcccccgcaaagattatatctttgcgggggatgttttcatcgttgtccatttagttttcttctgccggcaatgcagttttttgctttactgtaacggattcatcataacaggaaaaaatttcgtcaatttcttttttctgcattttaggagttatgatgctaatcaatggtacaagaatcagcccggcgatcatggcaatagcaccagcgttaatgggggaggaaatatagttccaaaacatattggtcacggtgataccgattcctgcggcaaaacttgcccagactgcagctttggtgacccccttccagtacaatccataaagaaatggcgccagaaaagcgcctgctaaagcgccccaggaaatccccattaactgagcgataaaggtaggcggatccaatgccagaacaaccgaaagcagaatgaaaaatacaataagtacacgcattagtaaaaggagccgtttttcatttaaatttttgagaacattatcttttaaaaagtccagtgttagcgtggaactggaggtcaataccaaagaggatagagtggacatggaagcagaaagaaccagaacaatcacaactccaatcaaaatatcgggcagagaagagagcatgaagggaatgatgccatcatatattactccaccttgttcgttatacaaaacagggttgtcaaataaccgtccaaatcctccgagaaaatagcatccgccagaaatgataatagcaaaaatagttgagatgattgtacctgttttaatggatttttcgcttttaatggcgtagaatttatgtaccatttgtggtaatccccaagtccctaaagaggtcagaattacaacacccaacaggttgagcggatctggtccaaaaaaagaagcatacgcgccttgctgtcctaatgtggctggtactttgctggggatttttgccaactggaacagcgcttgagaaaacccaccctggccattcagtacagctataatgactgctacgatccctcctagcataataatgccttgaataaaatcattgatggcggttgccatatatccacctaaaataacataagccccagttaacactgccatagcaatgacacaaacagaatagggaatgtcaaaggccatgccaaacaaccgagacagtccgttatatacagaagcggtataaggaacaagaaaaacaaaaacaatgacagaggctacaatttttaatgccttgcttgcaaagcgctttccaaaaaaatcaggcatagttgtagcagaaaggtgattgctcataatgcgggtgcgacgtcctaatacgacccaggccaaaaggctgccaattaatgcatttccaatgccgatccaagtagaggcaacgccgtatttccaaccaaattggccagcataacctacaaataccacggcagaaaaataagaagtcccataagcaaaagcagtcagccaagggccgacattccgacttcccaatacaaaaccttgaacgtcagtagaatgtttgcggcaataaatgccgatagcgatcatggtgccgaagaaaaccacaagcagaatgactttggcaatcataaaaatactcctttgctttaaagcgctgaataactctggccattatcatatcagatattagctagtatgtcaatttaaacttttgaagattaaaactttaaatgagaaaaaataatcattgacagaacctccattacaggatagaatgaaaaagatgtcaccatatggaaaggggcggttttgtgttttggcaaaaagatatagaaaccatgccgcgcgcagagattcgcgcattacagctgaaaaagttgcagcatacggtcaaatggagctatgacagggttccttattatcataaaattatggaagaagcaggtgttacgccagatcaaatcagatcgttggatgatgtgcgccgtctgccttttaccacgaaagcggatctgcgggataattatccctttggcttgtttgctgtacccaaaaaagatattgtagagattcatgcatcttctggtactactggaaagccgattgtaggcggatataccagacacgatttggatgtttggagcgattgtgtggcccgccttgccgttgcggcgggagccacttcagatgatatttcccaaattgcctttggctatggattgtttaccggcgctttcggattgcattacgctttggaaaaaatcggctctatggtcgtaccgatttctagtggaaacagtgaaaagcagattatgctgatgaaagattttggtactactttgctggtagccactccttcttatgcagtatacttaagtgaacttgccaaagatatgggggttgccgatcagctgaaactgcgtctgggtctattcggcagcgaagtatgcactactgaaatgcgggatcagattgaaaaaaatattggaatcaccgtaaccgataactatggccttaccgaactgggaggccctggtgtatccggtgaatgtcagttccgcaacggccttcatatcaatgaagaccatttcttggcagaaattattgatccggatacgggggaagtactgccggaaggagaaaccggtgaactggtcattactcctttgtcaaaagaagcgttccccatttttcgctaccggaccaaggatattgcgaaaattacatatgagccctgtgaatgcggacgtacttttgcccgcatgaacaaagtagtgggacgtacggatgacatgcttatcattaagggcgttaatgtctttccatcccaaattgaaagtgtattgattcaatcgccccatattggaccgcattatcaattgattttgcgcaagaaaaattatatggataatttagaggttaaagtggagttgattgatggctcccttctggatcaatatggcgcactggaaaaggtagctagagaaatccgtgctcagctgcgtacagtgctgggacttgattgtaaagtgactttggtggagcctcgttccatagaacgttccaccggtaaggcaaaacgcatcgtagatttgagaaatgaacccaattcataaggaggaaaagccatgctggtcaaacaaatttctgtatttgtacaaaatgagcgagggcgtctatcgcagattactcgtttaatggcagaaaacggaatagatattcgttccatttccatttctgacacggtggatttcggcattctgcggctaattgttaacgatccggaaaaatgtgaaaaagtgctgaaagaaaatggctttaccgtttccattaccaatgtaattgcagtgggaattacagatgaaccgggaagcctggctcaggtatttgcattggctgatgaaaatgggattaatgtagaatatgtttatgcgtttatcagccatacaacgcaagatgcctgtattatcatgcgagtgacggatggcgagcgggcggcaaaggttctggcagagcgtggaatcaaagttctcacagcagaagatgtttatcgtttttaaaaccggcgtccctgtttttcacaggggcgtttttttatcaaaatttcccgaaatgaaagtggaaaaaagatgcatacagtggaagaaattatccgggaatataaaaaattagatcaaatagtcggggtagatacctccgaactggaaattgcattttcttctcgggcagtatatcagtacggatgctgtaaataccaacagaaaaagcgaaaggtcgtcccctataaaatcttaattgcctcttttctgcgggaggaggaagaagctttttggaatactgtccggcatgagtatgcccatgcggcagccgctcttttgaccggaaagaatcagggacataattctgtttggaaagcagtttgtcaaaagattggtgcagatccagcccgtttggctgaggcctgttcggcacagaaagaaaaaagcaaagggcaggtccggtatgaaattatctgtcaggcctgcggtactcgatacaaaagaatccgccgcagcaggtttgtagttgaggttttggaaaaccctgatcaaccaacgtcgtatcgttgccattgcggatgtcgattttttcaatgtctacaatgtaatgtaccacagaagacaagaggtgaaaatgaatgaatttacaaatcagacaatgtgaaatcacagatgcaaaggcaattcatgatttaaatcttagagaactgggatatgattattcagatgatgcaacaaaagaaaagatagtaaaacttttggatagtagcaaagatagaatctatgttgctttaatagacggcaatgttatcggatatgttcatgccaatgactatgatgtgatttatgaacctcatatgaaaaatattatgggaattgctgtttcaagtaactttcggaaaatgggtatcggtaaagctttattggattcagttgaacattgggcacgagataccggcgccagcggagttcgactggtttcaggagcaacaagaactggtgcacacgaattttatcaccattgcggatatagtggggataagaaacagatcaatttaaaaaaatgttttattttcgctgatcaagaagattttgagcattgttaattacatc

SEQ ID NO: 540 - DNA, 4136 bp, Unknown
  16S sequences of unknown bacteria
ggcagggtcattacctcgccgtttgccatgtttgcgtagtatttttcctgcttctcgtcgtacttcggcgcgggaatgatgccaaaatcgtccttcatatcgcggtagaaagtgatttcgtgtccccagctgacctggaagagacagccgccgtccgcgaattgaacctcgtcgactgtgccgagcaggctctgcggcgatgtgtagccatatgggtctttgttttcgaaattgactattttttcgagcagggaaaccagcttttcgtccttagccgcgttgaagagcgggaagccgtcgctgtccttcgttacatagtgctgacctccgccgatgaccagcagatgcaggaacgcttttgccgtgccgttcgttccccagaggtcgctgccgtccatcttcgaatcgccgttcaggtcgcgggctgcctttgccgctatctcgaagtacttgtcggtcgtccatttgcccgagtcgaccaggtcgtaaaggctcttgccggtgttcatctcgttgtagatgcgcttgttgaacagaaagcagtttgctgtcgacgcgtaggagagcgagaacgctccggcggcgcagagctgctttccgccgagcctgaagactgaggtcgcgtcgggattccaccagtgctcatcgaggctcagatatggaattttgcctatgtcggcgtagttgtcgacgagtcccatcgtgctgatgccgtagaccatgatgatgtcgtagggattgtcgcccgacatgacgagattctgatagcttccggcggtgttcttttcactgtcctcgacacttatcgagcacttgaaccgctcttctgtcgcgacattgcgcctgtaaatcgcgtcgttgacgagatcgccattctcggcttctgcgtcgagctggacattgacccagttcatccagtcctgcgagcagtggagtatcttcagttcaaagccgtccatgttcttgtcgggaagaccgtcgctcagcttttcgaccgccgacgtggtctcaccgggagtgtctgaaggcggcgagggatgcaagaagggacgcgagaagaagtatggaaatgtgttttttcattgtggattctccttggattccattctgatcagattcttcatgtcacaaagcgccgtaaggaaagcagcttccctgctttcaaatttgtatggattctcaaactttttccccggaataacgagagagttgaagccgtcgaaggtctcgagatgcggctcgagagtcacggtcacctcgcgctcacccgagaattcgccgattatctccgcgattttcgcctcgccctttccgggcgggacaatcgcgccggcgaagagcgcgtcctttatgtgaaagtagcttatccggtcgcgcagcagttcaaaggcgctcagcggctcgtatccgcctaggacgaaattgcccatgtcgaagacgcatccgagctcgggcagcgcgtcgagcagacttttgcagtcgtcgggcgactcgccgaagatcccggcttcattctcgtggcagagcgtgacgccggcgcttttcgcgagtccggtcatctttgcgagacgccctgcgacctcgtcgaagctctcgcggatgtcatgcccgtctgcggggtagaagctgaatatcctcacgcggtcagtgccgagaatgcctgcgagctcaattacccgcttcgttctctcaagctcggttctgaagtcgtcggacagctttgatttcccgagcggagagccgatcgccgagacctttattcccgagtcgtcgagctttttccggacttcatttgcctcggcgggcgtcaagtcggcgacattcttccggtcgatgaaccgcggctcgatgtaagcgacgctgttttcacggagcatcgcgagctgagtgccgaaatcattcgagtattcgtcggcgaaggctgagagcagacagttcatatcctgacctcgttcactatctcctcattgcccgagtcgagagcgcgcttcatcgcgttcatgatgaagaccggcgcgatgaaatcctccggcaatttctcggaagccccgccgtctaaaagcgcatggaaagccttgaactcggactcgtagcagccgtcgagcttgtattcaccggcggcgaatttcttctcgaggctgacgtccgcggcgtagatgtagttcccctcgatgaaggacgcccagacgtcataacccgtatagcgcacggcgaaatcgtaaacgcctggctttctgtatgccctgaccgactcgggaaagtacccgaacagctcgcacatcacctcgacaaggtgctgtgcgtagaagaaccagccgccgtgcgggttatccatcgagaccggggcgcgcaggcttccgccgaggattttgccgtattcgcccgagtcgcgcgcggctttcagttctccgacgaatttcgcgtgcggacaggatgagccgccgcagaaacgcacaccgttttcccggaactcgtgcattaacgcgaccgaatcatcctcgtcaatcgtaatcggcttgtcgatgaacatcgggatgccggattttatgtatggacgggcgaactcatggtgcttagcgccgtggcgggcggtgatgatcagcccgtcgagctgtccgacgagcgcgtcgggagagcacattatgtcgacgccgtatttgccgtgcaatttttcagcggcttcgcggtcttcgctgtagactccggcgcactcaatatcggtgtagagcttcttgttgtaaacaatgtcgagaaaagcgtcggcgtgcgagttctcacagccgagaattgcgaatttcttcatctcagtacaccttctccattggattttcggcgtgcaccgtctcgatgacgcggatgaccttggcgatctgctcgggctttatctcaagctccgcgccgcttgtgagcgtgttgtagagcatcgagtagaacgcgtgcaccgcggtgtcgaacgcgccgccgacataggacttctcatcgtcgtgggtgaccagcttctcgccgcagtagatcggaagcccgtccgcgtccttcaacgacccgaagattaccggccgcccggggttctcgccgtcgaccaggtactttatcttgtaaccgctcccggtgccgagcagtgtgccctttgtgcccatgaccttgacggtgtagccgcagaaagcgtcgttcgagtttatctcgatgtcgatgaccggcttgcgcggcgcggagaggatgatcttcgcggtgtcctcggcgtcgccgcttgtcagcgctctgccgattcttgagaactcgacgcggaaatcatcgtcccaatcgaggaagttcagagccgcgccgatcgggtgaggtccggtgttgtagacactgccgcccattttcatctggagcgtctgccagtcccaacggcgggaaaagccattgttgcgcaggttgatctgggtgattttgccaaggatgcccgagtcgatgacctttttgacctcggcgtaatagggcgcgtaaaggctctgctggaagaccgcgagcgtggcgttgtgtgtcctcgcggtgtttataagatcctgacactcgtagtaattgcgcgcgaagggcttttcgacgaggacattctttccggcttcgaggcaggtcttggtgacggcgtagtgctggtcggagtaggcggcgtttacgatcaggtcgggattgagcccgaagagatcgcggtagtcggcgaaggtcttgcagccggggtattcagtctcggcgcgtgcgcggcgttctggatcgagctcggcgacggcggcgacgttgaagagcgtgttcatgtctgagcgcaggaaagcgccgtggatattgcgtccactgcggccctgaccgattatcgcgaggttcagttttttcatacaagttcctccttgtggtgattgtatttacataataccatatttttgccgggaagtaaattgaaaaaaagcgaatattccgcaaaagatattgcaaaaagtgtgattttgtggtatcatatatgcggaggtgagcctatggcgataatacatcacagcttctacgaggacggaagcctgtattttgaccacgcgacgaacgattcaccgacggcggagcagtacaagccgcactcgcacacgctctgcgagctgatattcttc

SEQ ID NO: 541 - DNA, 9906 bp, Unknown
  16S sequences of unknown bacteria
aattagcccaaacttatacgcctgtggacattgtgtaagacattgagttgcgtaacaccgcagccaacgcagtagtggttgaagcaggaagctccgacttatataagtcggagtagttcacaaggaattcatctgatgtcaatatatcgtaaaaataattttcccgtggtatatagctatgagaaatgatataatatacagtatcaagaggacaagtgaaagcgcttaccttccaaaagccaaaagggattttggattaaaaggaaggtgataatatagtaagaattacaattacttttggtaagttaagaattaccgtttacataaaaaaatgaccgccgtgaccttgaaaactacggcggttatataatcgtatcagggtagccgttttcaacggctttcctcttgatgtcaatatatcataaaaacaagtgtaattcaatagcaaatcttgattatcggctatattcaggcgctttttacatacttgcgcctgattttttttgacttattgcccgtttttaggtataataaatggtggtttgcactttttcgggcagactaataaacagagcaaaaggagaaacaactatgctactggcattcgatgtaggcaacagtaacattgtactgggtgtttttaaggacggcaagcttatacagaactggaggcttgaaaccgacaacaacaaaagtgcagatgaatacggtatgattatcaaccagcttttttcctatgagggactggagataaatcaggtaaaagacgttataatctcaactgttgttccgtcaatgctgttcacattacagcatctttcatcaaaatatttcaacaagagagctatagtaatagagccgggcgtcaaaacagggctcattattaaatacgacaatccaaagcaggtgggagccgacagaattgtaaatgcagttgctgcatattcaaaatacggcggaccgcttgtagttatagatttcggtacagcgacaactttctgcgcgatatccgaaaacgaggagtaccttggaggaaccatagctccgggactcaaaatatcatcagaggcgcttttcgaaaaaacagcgaagctgccaaaagtagaactcgaagaaccgggacatactatatgcagaaacacaatacagagtatgcagtccggacttgtatacggccatgtgggaatggttgattttgtagtaagaaaaatgaaagaggaactcagggaatgcaccaaatccggcaaagagcctcttgtaatagcaacaggcggacttgccacccttatagatcaggagagcagctgcatagactatgtggacaagatgcttacccttgagggtcttgagataatctacagaaagaacaaaagagaaaacggtaaaagaagataatgactttaaaaataggcgatataactttggagagcccgtttttactggcaccgctggcggggataacagacgcccccatgcgccgcatatgcaaaaatcagggcgcggctctggtgtactcggaaatgataagcgccaagggtctctggtacaaagacaaaaatacagaaagactcctgtatatgtatgaggacgagggacctgtagcattgcagcttttcggaagcgagccggagattatgagctttgcggccgcaaagcttgaggagcgcaaaaatgtcatactcgatgtcaatatgggctgtcccgttcccaaagtagtcaaaaacggagagggctccgcgctgctcaaaaacccggagcttgcaggcagaataatagaagccatgataaaagaaacaggcaagcctgttacggcaaagataagaatgggctgggacgaacattccgtcaactctgttgaggttgcgaaaattctcgaacaggcgggagcttcggctgttgcggttcacggcagaaccagagagcagtattacacaggcaaagccgactgggatataatccgggaggtcaagcaggctgtgaatattcccgtaataggtaacggagatatattttcggggcaggatgcccttgatatgatgaaacagacaggctgcgaccttgttatgatagcaagaggcgcgctgggaaacccatggatatttgcagaggcaaaggctctgtgggagggcaaggaacctccaaaagcgcctgatgcaaatgagaaacgtgaaatgctggaaaagcacttctgcgacctgctggagctcaaaggagagtatgcggcagtcagagaaatgcgcaagcatacaggctggtacctcaagggaatgcctggtgcagcagctatgagaagagaaataaaccagataaccgacgcacaagaactcaaatataaattaaggagaataagatgattttctggtcagtttttttaacagccctgattgctacggctatattaacgccggcggcaatatggcttgctcctaaaatcggcggagtggatataccaaaagacaacagacgaattcatacaagacctgtaccaagagtgggcggcatagcgatttttatcggagttacgctgtcgataggcattattctggcaagagataatatgcagcttacaggcatactgataggtggagcgataatcttcatactgggccttatagacgacctcaaaaacctgccgccggtagtcaagctgctgggacagatagcggccgctgcggtagtatacggtttcggcaccaaaatcgaatttatgagatacctgttttcaatggacaagcagtttgtgcctgagatagcagcgtgcataataactataatatggcttgtgggaattaccaacgccgtaaaccttatagacggaatggacggccttgcggcaggcgttgttgccatagcctcatgctgcatcgcatatgttgcatatatacacggcacatatcatcagtgcctgcctatgctggcggttgcaggcggagcccttggatttctgccgtttaacttctatccggcaaagacatttatgggtgactgcggctcgcagtttctgggctttatgatagcggcaatttcaataatgggacttgtcaagagcgcaactgttgttgcccttgtaattccgctgctggtactgggacttcctgtatttgatacagcctatgcaatactcagaagactcataagacataagcctataatggaggccgataaggagcatatacaccacagatttttaaaaagcggtatgggacagagaagaagcgttctgtgcatgtacggtatctgtgcaataatgggtactgcggcagtgcttctgtcaaggcagctttatgttgaaaccataggcttgtgcgttatagcgcttgcatatatctacatcgttataacagacagaaaccatacaatgcctacaattgtagaagaagtaaaaaaagacgttgaagaagcagttgcaaaacacagaggagaaactgatgaagatactgatatcaaatgatgacggaataaatgcaatcggaatatatgagcttacaaaagcgctttcagaggttgcggaggtgtatgtgtgcgcgccgcatcagcagagaagcgcggcaagccacagcatatctttcagagatccgatcagagtcagaaggacggagtttgacaatgcagttatggctcttgaaaccacaggtactccggcagactgtgtcaagctgggacttaaagtcctcggagatataggtatagaaatagacatggtgttctccggcatcaatctgggaggcaatatgggtacggatactctgtactccggaactgttgcggcagctattgagggcagcgtatgcggcaagccgtctgtggctgtttccgtaaacagtcacaatgcagctcactttgaatatgcatgcaggctggcggcaagatgcgcgcagaatgcctgcggcagacttgaaccgggaaccgtactgaatataaatgtgcctgatctgccggatgcagagataaaaggcaccagaattacaacactgggcaaaagaaattatgagccatggttcgtacttgaatcaggacaggagcatgatgcagataatattgatctgtgctacaggtatggcggcaatccgattaactatgatatggaggacgaaaacgcagatgtggctgcagttgatgaggggtatgcttccataacgccgcttatgcataatcttacagcaagagatatggtagaagaaataaaaaaatggaggttaatataaatgttaaacagagaaaacacacttttagtggtaattgacctgcagggcaaactgatgcctgcaatgaacaaatcagcagagcttgaagaaacagtaatcaggttctttagcggtatgaatgaatttaatattccgaagcttgttacaacacagtattccaagggacttggaggcactgcgcctgcaatagcagaggcgctgggtgattttgagcctatagacaaaagctctttctgcgtaatgggctgcgaggaatttgtcaataaatttaatgaagtcaaaaaagaaaacatagttatatgcggtgttgaggcgcatatatgcctgcagcagagcgctcttgcaattaagaagctgggacataacgtatttgtgcctgttgactgcataggctcaagaaaagctcttgactatgaaacagcattaagaagaatggagcaggcaggctgcgttctgacaacatatgaatcagttctttatgagattttagacaatgccagggctccggaatttaaggctatatccaaaatagtgaaatagatttcaggggaaagagagagattaatgtatatctttgataataaaataacaatcaagaataaggcggtgcttgaggagtatcttaacggatatgaatatgaaacatcgggactgtcattctcggcgctttacatgtggagagacatcaatgagttctgctttgagattataggcgactatatgtgcatatcgggcatcagtcaccttgagcttgatcagaagcttaactttatgttccctccgctgaccaaaacgggcagttacgacagaaacaagctgagagaaacaatccttgaggcaaagaagattttcgagtctaagggagctgtattcaatctcagacttgtgccggaacatatgacacagcttatatgcgacgctgtacccgaaatagaattttctgaggacagacctaacttcgactatatatacaggagagaggacctggtggagcttcggggcaagaaataccacgccaagaagaattatataaattcttttaagaaaaactacgaatatgagtatgagccgataaattcaggtatggccgatgagcttatggagtttatagagttttttaacagcaggaaagaaatccccgagcacgaaatggagcttctcaaaaatgaagaggctgcaatgagagatgtttttgaaaacttcgaagcctgcggctattacggcggcatcataaggattgacggcagggttcaggctcttacggcaggcggcagactgggaagcaatatgcttacccagcatatcgaaaaggccaataccgattacagaggactctatcctatgatatgcaatgaattctgcaaagctttgcctgaggatatagagttcatcaacagagaagaggatatgggtatcgaaaatctcagaaaagccaagctttcatacaagccggtcaagctgttggagaagtatataggtaattttaaagcaaaatagttaaaataaaaacgtgcgaaagcacaagatgatacaagaataaaaagcatttgttatatttttaacaatatatttataaatatattgcactaatcgttttttgtgttattatatagctataacaaagttattaataataaatttataatatttttaggaggttacagaatgagagaagttgttatcgctggtgcagcaagaactccgcttggaagctttggaggaagccttaaaaacgttcctgcaagaactttaggctcaatagttattaaggaagctttaaacagagcaggcgttaaacctgaaatggttgacgaagtacttatgggttgtgttcttcagggtggtttaggacagaacgttgcaagacagatgtcattagacgcaggtcttcctgttgaaatcccttgcatgactataaacaaggtttgcggatcaggtcttagagctgtaagtatggcagcacagatgatcaaagcaggagatgcagaaataatcgttgcaggcggagctgagaatatgtcagcgacagcatacgctattccatcagcaagatggggagctagaatgaacaacgccaagcttatcgatatgatgacaaatgacggtcttattgacgcattcaacgactatcatatgggtatcacagcagaaaacgttgcagaacagtggggacttacaagagaagaacttgaccagttcgcattagagtcacagaacaaggcagaagcagcagtaacatcaggaagatttaaggacgaaatcgtgcctgttactattcctcagagaaagggagaccctatcgtatttgatacagacgaatatcctaagttcggaatgactatagacaagatgggtaaattaagacctgcattcaagccggatggcggtatggttacagcaggcaacgcatcaggaatcaacgattcaggcgctgctgtagtagttatgtcaaaagaaaaagctgatgaattaggaatcaagcctctctgcacaatcaagtcatatgcatcagcaggcgttgaccctaagatcatgggcgtaggacctgttcctgcttgcaagaaggctcttgacaaggctggattaaaggttgaggaccttgaccttatcgaagctaacgaagcgttcgcagctcagtcagttgcagttaaaaaagaccttaactttgaccctgaaaagattaacgtaaacggcggagcaatcgcacttgggcatcctatcggagcatccggctgcagaattctcatcactctgatttacgaaatgatgaagagagactcaaaatacggtcttgctacattatgtatcggcggcggtatggggacaactatgatcgttgaaagataattgataaattcttaaaggtacataacaattaagattagaagctgctgtgtgggtaattccatacagcagtttttcatgttaggtatggaaacaaaaataattattgataacaaagccgataagtaatagaataaagctgacagacaattgttctgccgacttttacttgtaatgaaaggaaacagtgaaatgaagaaattatcagtagtatttctggcagttgttatcgcaatggctcttgcaggctgcggaggagaaaagcttccggaatcctgtatgctgtattatgattatgcgggaatttccgttgtggcagatgacagcagcgatgcagagcttgcagagaaagcctatgacggtgtacctgaaacaatgggagttcacatctcgggcaaagctgacgttgacctcataacagggcagttccaggagggaactacaatagaggaacttacagacggcaaggcctcaagcgagaacaaggtaggcgctgttgtatggaacggcgaagcctacaatgcgtttaagataacagcggataactgcaacatacctaatgtgtttacaggcgagggcggaatactgctgcttgatataaagggtgactgtaccgcaggcggcggtggtgatatcccttgttttggcggctttgatacagtagtgataacaggagacggcacacttgacttcaaggattgcagcgggctggaagcaggcgcaggcaacctgccgcttccgtcggttatagtttcaggcgctgatgtgcgctgcgctgacggcataagtgtgaaaaacaacagcgaagatgttcctgcggttttagtgcttgacggacagcttaattctggaagcgtatatgccatagatgacagcgcagatgtatgcgttgcgggaggaagcttcactactgaatatatagacggtgcaggtgatctcgtgttcagagacggagtttccgttattgatatgataatggaaagagagcaggcgccggcaattacagtatcgggaggtcaggcttactttaacgaggcacttccgaaagcgacagccgttgaggcaggcgcagggtcaattacggctccgggactttcaggtatggatactgtaaatacatacaatcaagccgaggcgacagacagcgagaaatcgggcacaggatatatatatacggattttaattccgagtggacaaaaggaataacctgtgacaaactgtgcatggctgatgtcgataacgaatatttcttcaaaggctgtatgaagcttaacagctccaaagcagacaaaatcgagccatggggcggactgtggcttaacgccaaaggcaagagcagcaccaatcttctttgcggcacaggactccttattacaggaaacggcagcatagatgcagatgaactttcactgtttggctggggtaatgtgcacaaacctgtatttgcagtaagagatgatgcggcagtaagctgcggcagcttcacaatggactccgaagcaggtgaagagggcagatttatcatagacgaaaatgcggctttcagttgcaggggtaatctgtggatgaaaaatgcggcggttatgataagaggaggcaatgctgaatttgcggcagattttgcagtggaaacaggcagagttgaaatctcaggaggcacagtcgtactcaatacgctttaccttgcagacggagatttagaaataagcggaggcaaggtcatagttgcacagaacatagatgttccgaagggtaacgttactgtcacaggcggcgaggttataattccgggcggcgaagacggtttcaatgtatcggagggcaagcttaccgtcaagggcggcagcattcacgaatagataaattaatttagaacagaggggagaatttgtgatgaacagagcagaagcatttgaactattaaaaaaatacaacaaagaggaattccatattaaacacggcgaaacagtagagggcgttatgagatattttgcgcaggaactgggttatggcgacgaggttgaattctggggaatggtcggcctgcttcacgatatagactttgaggaatatcctgagcagcactgtgtcaaggctgtagagcttttaaatgacgctggagcagaagaccgccttataaatgcggtggtttctcacggctggggacttacggatacagacgtggagccgacacacgaaatggaaaaggtgctttatgcaaccgacgagcttacgggacttatcggagctgcggcgctgatgagaccgtcaaaatcggttcaggatatggagcttaaatcaatcaaaaagaaattcaaagacaagaaatttgcagcaggctgcgatagagatgtaatccgaaagggcgcggagatgctgggctgggagcttgacgatttaatgacaaggactcttgaggctatgaaaacctgctgcgagtagtatttgatacaggagagctgttttatgaaaaatttaaagagtatattaaccctcatatctctgctgtgcgttattttgtgctttgcaggctgcggcagtacgcaggcagaagaaccccctgataataagccgcaggcggaggagccgcaggatactgcgcaggactctgcagataagtcgtctgacggttataccgataagtcttccgatgcttatacaaataaatcttctaagaacacttcgcaggggataaccgaaaagtgctcccgttatactgtaacacttccgtcagactggcagggcagatacacaaatgaaaccgttgtaaacaggggttgtatatttaacggcttctatcataaggcaagcaaggaagcagattgcggcggacatctgttttctatagtgcttctg

SEQ ID NO: 542 - DNA, 3533 bp, Unknown
  16S sequences of unknown bacteria
acggaatcaaatccaattggagggcgagacagagaagtggacgctgctctatgatgagtcgcccgtgccgtacacagaatcctggaccgtcccgacacccaaagcgcgcatcacggcccttgcaccgacggaggaaaaacgttttgccgttgaagccgtaccgtgacggtgctgctggcaagcttctgtcaccggtggggtagactgccaacaaagatgacctggcgggcggtgaaacggaagcgcacttctccgcggcagaagacatacagcagcattgcataaaggggggggcgtggccgatgaagaaattccgccgcattctggggcgctgtgcgttgggggcgtttttgctggcggcggtctatagcattctggtggcggcgggggtcctgcatcctgcgccgccggtggtgccggaggggccgatgtttgtgccggagctgagccaggagcaggaggagcgctttgccgagctaaagaagtgctatggcagtgtccatttgactgtgatgagcaaaaaaccgtttacggtgacaaattccgcggggaatacggcatgggtcgacccccggggggatgtcactggcgatttaaaggtgtattatgcatatcgctacgagacggcgtatgatggcggcgcctataccgtgggaatcgaggtctgcggcagcgaggagatcatcgtggatctggagcggcagcaggctgagctttccaccggctggggtgaggggcgctggggcgcgacgcttctatgcgaagtctctagtgatgcgatggatgttattacattatatccggaccgacggatccaaattgtggacggccatcggtcgggcagaagctatacggtgcagattaaggggaatgatggatcacgttctgtcggcatgggctgccaggggcgcatccgggggagccagcagtttgcattcccagcacggaatcaaatccaattggagggcgagacagagaagtggacactgatctatcaggaagcgcccgtgaatgatactgaatcctggaccgtcccgacgcccaaagcgcgcatcacggcccttgccccggcggaggaaaaacgttttaccgttgaagccgtaccgtgagggcaccacttcttcgggctgaattgctgaaccattcgataacaggctttgctggaatccctttttctttgcctggcgtgcaaggtcgcaaaacccgataggaaggcgtgctttcccattgtatctgcgcaatgctgcagcgatgcgcggatcggcctgaaaaacggcctcactccgtttgagattcggagcaaggccgtgtcatgcgccgctattctgcgacggaactgaaccagtaaaactggataatagacaaaaagccccctgatgtagaagaataacgatatcaggggcgcctttgttttgcgcggcggggggggaaagcctgcgccgatggggggatcacagcggatagatattcatccgcttgatgaggccctcttcgtttaattcttcgatgacggcgctgacggagacgagctggccgccgtagctgatgaagtaccagacggcggtgtcgttgcggtatttgacggcggagatggggaaggcgccgcggttgaagccgaatttgttgtggaacatcatttcaatggccattttgccctcgagatgcatggtgtcacggccgatcttgatgagagaagagtcgtgcagaacgccatgcttatcgaacaggtccgccagggcgacgttatcgcccgactgcatacaggcgatgtatttttctaaaaccgtacgggtattcataggatttacctccatttgtatctaaatttcgttgcgcgggcgctgcagtcggcttaaaagcgttcggagcggagcagggcgtcgatgccgccgtcgatgaagaggatgacgccattgatgccgctggcctgcggggaggccaggaagcagatgccgtttgcaatctcctgggcgtccaaaaattcctttttgccgtagcgggtcgggatggggatgagcagggcggcgtccatctgggcctccgtcatgccttgggtcatgggggtcgtcgtgttgccgggggcgacggagttgatgcgcagaccgtcgacggcccaggacggggagatacggcggacccagcgggccagggcgtgcttgctggagctgtaggccgaggcgcgctggttggcgggaatgtccttggcgaagtccaggacccggtcctcctccatgacgttggagatcatatcgacccagtcggggcggacggtctggttcgtgatggagttggaggacgtcacgacgcagcagccgccttttttaatgagcaggtcccgcacgccctcggccatctcgacggaggcgaagaaattcagcgcgatgatcatctccgccgggcggaccgggccgacgccggcgttgcagatgatgccgtcgaggccctcgggaaattccttgtgaatggcctccaatgcagcctggcggccttccttctgtgacaggtcggcgcagaaatcgccgcccttgtaatcgacgttgtagacccggtgcccctgctgctccagctgctgcttgacgcaggcaccaatgcccgttgtgccgccggtgatcacgtaagttctcatgtgtgtttctccttttctgtaagatttgtacccccagtataaaaaaagaaaacgcaaaaataagttggcgggccaacatttttgcgttttccgaaaaaagtagttttataccgatttttaggaaaaaagtacgattttttcgatagaaaagtaccggttacagccattcccgggagtagagctccgcgtctaaaatgcggaatttgttcttcctgcaatacagcagatgctcctgctccatacgccgcagctcgtgggagagggcgctgcggttgacgcacagatagtccgccagctcctcccggttgtaggggacggtgaattcgtcgcagccgaagaagctgcgctggatggcgagaaaggtcaggatgcggctgcgcaggcccttctgagagatgatctcgatctgagacattttccggagattttcaccggcgatgaggccgaggatgctctccatcatgatgagccggtccgcttccggcagcttgccgggcttggcgacggtctcgtaggggatcgtgtggacgacgctgtcgcgggtggcggtgatgtaataggtgctgacctttttcttcgtcgcggcgatgtcgatgccgatgaggaagccggggatgtatttggtcatcaggctctggcggccgtcgcggtagagcttcgtggcgataaattcaccggattcgacgatggcgaaggcatttagctgctgcccgtcgtgtaccaggacatcccccttggaaaacatcttgcgctggggctgcagctgtgcaaaaagcaccggaacgcgctgcttcggaaactgctcaaacatccgtgcccgctcgatcaccgcccaatccattgcctcacctgctttcgtgggtttgaaattattatacaggatgcggggggagatttcaatgggggg

SEQ ID NO: 543 - DNA, 1741 bp, Unknown
  16S sequences of unknown bacteria
gtcttattataacattccgcacatcataaagtcaatgaatattgaacttttttcgtgcgctttttacatatcggcggaaaatgcggaaaataaaaaatactccgaaaaatctgcgattttcggagtattttcgaaaaaatcttatttcagcgtatcattcttgcggtctcgggagacacctgatgaaggatcgaggtcaattcctcgttcgacatcgttgtgtttcttccgtcgtcgtagatcttatctacgatttccttcatctttataaccacatcgtcggtcttggagaatttcacgtcgccgtatcccgacagactgagcatgttgttgagccaatgagttattccggcaagtcccgagtggacatcgaccgcgaccgaaacggggcggttgagaagcttctcggtgtcgaagatgttgtatatttcctcatccttcagaagtccgtctgcgtggattcccgcgcgcgttacgttgaaatcgcgtccgacgaacggggtgcgcggaggtatcttgtaaccgatctcatgctcaaagtattcggcgatctccgttatgacgggcagattcatgccgccgttgtctccgcgcagcgagcagtattccatgaccatcgcttcaagagggcagtttccggttctctcgccgatcccgagcagtgagcagttgacaccggacgcgccgtacagccatgcggtcgatgaattggtgacgaccttgtagaagtcgttgtgaccgtgccactcgatgttttccgacttgacaccggcgtagtgaccgaagccgtagatgatgccggggacgcttcgcggaagcgccgcgcccgcatacgaaacgccgtagcccatcgtgtcgcaggcacggatctttacgggaattccgtattcctcgcccgcgcgctcgagcgcttcgacgaacggaacgacaaagccgtagtagtccgcgcgcgtgatatcctcaaagtggcagcgcgggcggataccgtgctccatcgcggatttcactatgcggaggtatttttcaagggcgctctttctcgtgagccccattttgttgtagatgtggtagtcggagcaggagacgaggattcccgtttcctttataccgagggatttgacaagatcgaaatccttttcgttcgcgcgtatccagcaggtgatctcggggaattcaagtccgagggacatgcattcctcaagcgcgcggcgatccttttcggtgtagacgaagaattcggtctggcggatgatgccgttctttcctccgaggcggctcatcagcttatacagatcgacgatctgcttgacggtgaaaggcgcggtggactgctgcccgtcgcggaaggtggtatccgtgatccagatctccttcggcatattcatcggcacaaagcgatggttgaacgataccttcggcaccgattcgtaatcgaaaagatgacggtagagattcggcgtttctctttcctgaagggaatagtgatacgcagactgctctatcaggttcgttgtatccgaaagccctatgcggatatcgtgatcgtttattactttttccgaattgtcttgcatattcttcggctgcctccttcgccttttgcctttgtcgggcgacgctgactttgattatataccgaaatttgcattttgtcaatacaaatcctgcattattttgcttccggcttgtacgattacaatagatatgttacagtatcaaaaaaagagtagcaattgagagc

SEQ ID NO: 544 - DNA, 12940 bp, Unknown
  16S sequences of unknown bacteria
aagcacatcgaaaaggacgccgcgctcgagcgccgcttccagcccgtcaccgtgggcgaacccagccccgaggaggccgtggagatcctcaagggcctgcgcgaccggtacgaggcgcaccacaaggtccgcatcacggacgaggccatcgccgcggcggtccagctctccgaccgctacatcacggaccgctacctgccggacaaggccatcgacctcatcgacgaggccgcctcccgcgtgcgcatccgctccttcatcaccccgccggacatgaagcagatggaggaaaagctcgagcagctcaacaaggagaaggaggaggccatcgcccaccaggactttgagcgcgccgccaaggtccgcgacgaggagcgcgccatccgcgcggacatggaaaaccagcgcaaggagtgggagaacaagcgctccaccgcgcagaaggaggtcggcgaggaggacgtggccgagatcgtcgccgcctggacgcacatccccgtcaccaagctcacggaggacgagtccagccgcctgctccacctggaggatgcgctgcacaagcgcgtcatcggccaggacgaggcggtcagcgccgttgcgcgcgccatccgccgcgcccgcgccggcctcaaggacgaaaaacggcccatcggctccttcctgttcctcggccccacgggcgtgggcaagacggagctctgcaaggccctggccaaggccatgttcggcgacgagagcgccatggtgcgcatcgacatgtccgagtacatggagaagttctccgtctcgcgcatgatcggttcgcctccaggctacgtcggccacgaggagggcggccagctcaccgaggccgtgcgccgcaagccctattccgtcgtgctctttgacgagatcgaaaaggcgcacccggacgtgttcaacatcctcctgcaggtgctcgaggacggccgcctgaccgactccaccggccggaccgtggacttccgcaacaccatctgcgtcatgaccagcaacgtcggcgccgcggacgtgggcaagaacgcgcgcgggctcggctttaccaacgaccgctcggacctgtccgtgcagtcctatgagcgcatgaaggaggccatgctcgaggagctcaagcgcaccttccgccccgaattcctcaaccgcgtggacgagctgatcgtcttccaccccctggacgaggagaacatcctgcgcatcgcggggctcatggtgcagtccgtcgccgcgcgccttgccgagcgcgacatccacctgacctgggacgacgaggcgctgcagttcctcgccaaggagggcttcgaccccacctatggcgcgcgccccctgcgccgcgcgatccagcgcatggtcgaggacgacctgtccgaggagatcctctccggccgcgtcgccctgggcgacaaggtccacatgtccgtgcaggagggcaagctcaccttcaccccggaacccgtcgaggtcggttaaacaaaacgtgcgcgcccggaacgcgaaaagcgtcccgggcgcgcacgtttttgccgcatcagccctgcgcggcgccctgcttgatgagcacgtatttctgccacttgcgcgtgcgccagcggtaggtcatcagctggccgcggacccattcgtccgccatgagcgcgatgaagaccgcgtagacgcccaggtggaagacctgcgtcagcaggtacccgagcgggatgcagatgaggccgatggacccgaccgccgcggccagcgcccagagcacgtcccccgtgccgcgcagcgacacgccgatcaccaggttgaacggccggccgaactcctgcaggatgtccaccaacaggcagtagaacaccatctccacgatggcgggattgtccgtgaacagcgagaggatcggccgctggaagaggaacagcgcggcgatgaccgcaaggttcaggcccatggcgatccaggtgttgcggaaggcgagcttgtaggcgccgtcgaagtcgtgcgcgccgcagcggtagccgaccaggatctgcgaggcctggcccacggagtagcccagcacctgcacaaaggcgatgagctgcaccgcgtaggtgtgcgccgccagcgcgtccgcgcccatggtcgagacgcagtaggtcaaaaagatgttgcccgcgttgcaggcaaggccgtcgcccgcgccggggatgccgatgcgcaggatgtccttgagcagccggaaggggaaggggcgcggcaggcgcaggcgaatccgcgcgcgcaccgcgcagccgatcatcaggaagcaggccacaagctgcgacaggaccgtgcacgaggcgatgcccgcaatgccaaagtccggcaggccgaagggccgcatcaccaccgccgcattgcccgcaaggttcagcacgttcatgaagaggaagaccagcatcggcgcgcgggccctgccgtagttgcgcatgatggtggccagcgtcaggttcagcgcctgcaggaagcagcacccgccgatgatggtcaggtacgtcccggagtagttgagcagctcgccctccatgttcatggcgcgcagcagcggcttgtggaacaggaggagcagcaggccgacggtgaggccgaagaccacgttggccacgaccgcggccgtcgcagcctcggaggcgcgattctcgtcgcccgcgccgcggttctgcgcgatgacgacggccacgccaaaggtgacgaagctgaaggccatggtgatgaagttgaggaattggttggcaacgccgatcgccgccaccgcgtcctgcgacaggcgcgagagcaggtagacgttgaccatggtcaagagcttgttgagaaagttttccacgaagatgggcgcggcgagcccgggcagggtgagtttgcgttccattgcgtcagcccccaggatgtttttttctgcaaggaaaaccgtttcggcgcgggcgcgtccgaatcctgccggtttgcgcaaaagcgttcccaatgtgtcggatcgcggaacgcgcggggggaaagaagcgcgctccgggggatctttttgcagaaaatcttcaccgccgcgcggttttgtgctagaataggaagaaaaggcagaaggccgcggaccgcaggttctccccggtccgcggcgctgcaaaaaatttttggggggcgcaaacttgtggaaatggcgcaaattctggctgtggtgatttttgccgtgatgtttcttctgatcgtcacggaaaagatcgagagacactgggtctctctgggctgcgggctgctgatgctcgtagtggtgttcggcttgtgcatgcacagccctgcggcggtgtggaacacgctggggctgcagagctttgcctcggtggacctgtggtatcaggccagcgagggcgcggagaccgcctcgggcatcaactggtccacgatcctgttcatcgcgggcatgatgctcatggtggagggcatggggcgcgcgggcttcttccgctggctctgcctgcagctggccaggctcgtgaagtataagaccatcccgctgttcctggcctttatggtgatgagcagcgtgctgtcgatgttcatcgacagcatcacggtcatcctgttcctggcggcggcgacggtggagctgtcccggatcctgcggttcaaccccgtgccgatgatcatcgcggagatcttctgcgcgaacctgggcggcgcggcgaccatgtgcggcgatccgccgaacatcatcatcggcacctcgctggggtattcgtttgcggactttgtcgcaaacaccggcctgatcgtggccgtgggcctggtgctcgtgatcgtgtacttcttcctctgcttccgcaaggaactgcagagcggcccggcccaggggggcgcgatttcctacccgaacccgaaggacgccatcgaaaacaagcgcgactttgcgatcagcagcgcgatctttgccgtggcggtcgtcctgctggtgacgcacgcgcagaccgggctgaccgtggccgcgatcggggtcttcatcggcctcgtgacgctggttgcggcgggcaaggacgcgctcgtgctcctgaaaaaggtggactataagaccctgctgtttttcatcggcctgttcatcgtggtgggcggcctggagcagacgggaatcctggagatcatcgccaacttcatcgcggacatcagcggggacaacgccatgctgatggtggccatcgtgctctgggtttcggcaatcgccagcgcctttgtggacaacatcccctttgcggcgaccatgatcccggtcatccgctcgctgtcggcggcgcagggcgtggacctggcggtgctggcctgggcgctgtccatcgggacggacatcggcggcagcgccacgcccatcggcgcgagcgcgaacgtcgtgggcatctccgtcgcggcgaaggagggccacctgatcggctggggaaaatactgcaagtacgccgcgccggcgacggtgctggtggtgctgctggccatggtcatgatctacgttcggtatttctaagaggaggtgcgggttttgagcaagcgtttgatcctatcggttgggcgggaattcggcagcggcggccacgcgattgcggagggcctggccaagcggttttcgctggagttctacgacagcaacctgctggagcacatcgcggagaggaagaacgtcagcggcgaggcgctcaagaagtacgacgaacggccccggaaccggctgttttcccggacggtgcgcgggtactccaactccatgcaggaaaacgtggcgaatctgcagttcgacgccctgcgggcgatggcggaggagggaaagtccttcgccatcgtgggccgctgctccgagtcgatcctcaagggctatgacgggctcgtctccatcttcgtcctgggcgactgggaggccaagcgggagaggatcatgcggctctacaacctctcccccgaggaggcggagcacatgatgtcccggaaggactgggagagaaagtcctaccacaactactactgcaaggggaagtggggcgactcccgaaactacgacctgtccatcaacagcagccggctgggggtcgagggcacggtggacctcctggagacctacatccgcgcccgcatggacgcctaacgccgcgcaaggtcttgcctaaaggcggtggtttgcggtatactaaacatatcctattacgctccgacagaggcggggagagaaaaacgaaagattggagatgacctggatgaaccgagcgtccggcattttgatgcccatcacgtcgctgccgtccccctacggcatcggcaccatcggcaaggcggcctacgagttcgcggacttcctcaagcgggcgggccagagctattggcagatcctgcccgtcggcccgacctcctatggggactcgccctatcaatccttctccacctatgcgggcaacccctacatgatcgacctggacatgcttcaggaagaaggattgctcaagaaaaaggattatcgcaatttggactggggctccgaccccgagagcgtggactacgccacgatctacaacctgcgcttcgacgttctgcgcatcgcttttgagaacgccaagaagcgcgacatgaccgattttaccaacttcgtgcgcaaaaacagcggctggctggagaactacgcgctctacatggcggtcaagaagtccttcggcatgcgcgcctggaccgagtgggaggacgagggcatccgcctgcgcgaccccgagagcgtccgccactaccgcaaggaactggacgaggacgtgcgcttctacgagttcctgcagtacctcttctacaagcagtgggagaagttccgcggctacgtcaactcccttggcatcaagctctttggcgacatcccgatctacgtcgccatggacagcgcggacacctgggccaatcccgaggtcttctggctggacgaggagcgccgccccgtgcgcgtcgccggctgcccgccggactacttctccgccaccggccagctctggggcaaccccctctacaactgggaatacctcaaggccaccggctacaagtggtggatcgaccgcatcgccgcggccgccaagctctacgacgtcacgcgcatcgaccacttccgcggctttgacgagtactacgccatcccctatccggcaaaggacgccgtcatcggcgactggctgcccggcccgggcatggacctgttccacgccatccgcgcaaagctcggggacgtgccgatcatcgccgaggacctcgggctcatcaccccgggcgtggccaagctcctgaaggactccggctacccgggcatgaaggtgctccagttcgcctttgacgaccgcggcgagagcgtctacctgccccacctgtacacgaacaactacgtcgtctacaccggcacccacgacaacgacaccaccatcggctggtttgagaacgcctccgagggcgagcgccgctttgccaccgagtacgccaagctctccccgcaggagggctacagctggggcatgatccgcgagatctattccagcgtggcggacctgtgcatctgcccgatgcaggacgtgctctccctgggcagctgggcgcgcatgaacacgccctccaccctgggcggcaactggaagtggcgcatgaagcccggcgccctgaaggaggagtacgcgcagaagctcgcaaagctcggcaagacgtacggccgcctgcccgcgggctttggcgaaaagaaggacgagctggaggcgcgcatggagctcatcgcgcagagcgaatactgcaagacgctcgaggagctcgacgtccacgagctgcacatggtcctgggcaaggccgtcatgggcgaaaagagcgcgcagtgggccgccgccaaggcgcagcacgccgcgcaccgccgcgcctactacctctcggccgagttcctgatgggccgcatggtctacaacaacctctatgcgctgggcctgaccgaaaaggtccgggcgatctttgccaagcacggcctggacatcgccgcctttgaggacgtggaggacgcggcgctgggcaacggcggcctcggccgccttgcggcctgcttcctggactccgccgcgacgcacgacatcccgctggacggctacggcatcaagtacaagtacggcctgttcaagcagagcatcgtcgacggcttccagtgcgaggaggccgacgactggacgcgctttggcgacccctggtgcatccgccgcgaggaggacaagcagctggtcgagtacgccggccagaccgtctgggccgtgccctacgacatggcggtcttcggctacaagacggacaacatcggcacgctgcgcctgtggcaggccgagcccctgcacgacttcgactttgcggacttcaacgaccagaagtacctggaggccgtgcgcgagcgcaacgaggcagacgacatctccaaggtcctctacccgaacgacaacggctacgagggcaaggtgctgcgcctcaagcagcagtacttcttctgctccgcgtcgctcaaggacatcctcaagcgctataaggccgtgcacggcagcgacttccgcgcctttgctgaccacgcggccattcagctcaacgacacgcaccccgtcatctccatccccgagctcatccgcctgctcggcaaggagggcgtggactttgacacggccttcgccatcgcgcagaagacctttgcctacacgaaccacaccgtcatgaaggaggccatggagacctggagcatcgagctcatctcctcgctcctgcccgaggtctacgccgtcatcgaaaagatcgacgcgcgcgaggccctggagctggcgaccctgcccggcatggatgaggtcgtctccgaaaccctcgtgcccgacgaggaggagatcgcccgccgcaaggccgaaaaggctgcggaagtggaaacgcccgccgcagacgaggccgcggacgaagcggccgcggaagaggagacgcccatgaagcgcgtcgtccgcacgaagctggacacgatgcgcatcctcgacggcggcgcggtgcacatggtgcgcctggccatctacggctcctcctacgtcaacggcgtggccgagatccacacccgcatcctcaaggaggacgtgctccgcgactggtacgagatctaccccgaccgcttccagaacaagaccaacggcatcacgcagcggcgctggctgggcctttgcaacccggagctgacggagctgctcaccgagtgcgtgggcgacaagttcttaaaggacctcaccgtcctgtccgacctcaacgacgtcgtcacggacgagacgatcgacgcctttaacgccatcaagttccggaagaagcaggagctgtgcgactacatcgagaagcacgagggcatccgcctgaacccgaacttcgtcttcgacgtccaggtcaagcgcctgcacgagtacaagcgccagctgctcaacgcctttgccatcctggacatctacggcaagctcaagcgcggggagatcgagaacttcacgcccacggtcttcctcttcggggccaaggccgcgcccggctacttccgcgcaaagggcatcatcaagtacatcggcgagatcgccaagcgcatcaacagcgatcccgacatgcaggacaagatgaaggtcgtcttcctgtccaactacaacgtctcctacgcggagaagatcctcaccgccgcggacatctctgagcagatctccaccgccggcaccgaggcctccggcacgagcaacatgaagctcatgctcaacggcaccgtgacccttggcacctacgacggcgcgaacatcgagatcgtcgagcaggccggggaggagaacaactacatcttcggcgcgcgcgtcgaggagatcaacgagatgaaggacagctacaaccccaacgcctatctgggccaggacgacaacctgcgcgccatcgtcgaaacgctgatcgacggcaccttcgacgacgggggaacgggcatgttccgcgagctctacacgagcctgaccgagggcgcctcctggcacaagccggacaactacttcctcatctacgacgagccggactacgtcaagaccaagctgcgcgccatcgcggactacgcggaccgcagggcctttggcctcaagtgcctgcgcaacatcgcgggcgccggcaagttctcgtccgaccgcaccattcagcagtacgccaccgagctttggaagctctaaagaacgccgctgggccggaagcaacttccggcccagctttccatatccaatcgggaaaaaacaggaaaggagttttttgcaatggagaaaatgcgcacgcgctttctgcccaagatgacccacgacgaggtctgcgagtacgtaaagcgcaacgacatcatctacgtccccttcggcaccgtggaggtccacggcaccttccccctggacgtggagaccacgaccccggaggccttcgccctgctcatggccgaggagacggacggcctggtgctgggcaacctgccctacttcttctgcggggccagccccatcagccccggcaccatccagatgagcgtggagcagggcctggcctacctcaaggccatcgcccactccctgctcaaccagggcttccgccggcaggtctacctctccctgcacggccccgccttcctcaccggcggcgtgctggccgtggacttcttcgacgagaccaagtgccccatcggctatgtggacctggtcaacggctgcgagtacgcggcaaagaagggcgtgaagatcgacagctacgacgacctcttctgcggcgcctatgagatcctcggcaaaaaggacgagctcgtcgtcgacccggccatcgacgccgcgccgaaagcggactccgagaccgccatcgacgacagcgacgtgttccgccgctttgcgcacccctccggctccgtgggcttctacttcgcccggcccgaggaccacgccggcatgaccggcgcctccaagacggtcgaggagcgcgacgagcgctgcgcccgcggcgccaagaccatccgcgagatcgtgcaggccatggacatgcccacctatgtccgcaagctgcgcgagctggacgagcagcaccagaacgtcatcctgccgcgctatgcggacatcctgccgcgcaatacctaccccgccccgggctggaagcgctgacgaaaaaacttcccgccgttttcggggatgcaggaggggccaggccccttcctctcaaatccgcagcgccggcgtgtacgccgcgaggatgcgggccgaaggcccgctttccggtattcggcgcgttgtgcgcgtagcgcgcggcgcgccgaatgtctctcgaaaccatgcaatttgcatggtttcgaagcgtgtcgacgttgtcgacacgcagcgctggacacacgtccggcgcttttttttagggctcgtgcgggaggacgatcttttccacgcggcaggcgccgtcctcgatcgccatttccgccagcgtgatctcctggtggaagcggcgcgggccgcagctgcccgggttcaggtagagcacgccgccgcgcacctcctgcgcataccggtgcgagtggccgtagaccaccacgtccacccccgcaaggtccgcggggaggtcccgcttgtcgtgcaccatgtggaaggccaggcccccgagcgaaaaccgcaggtccaggggaagggacgcggcccagtccttgtcgttgttgccgcggacgatgtacagcggggcaaagccgcgcagcgcctcgaccacggccggcgtgttgacgtccccggcgtgcagaatcgcgtccgcaccctcgagccgcgcctgcaccgcaggccgcaaaagaccgtgcgtgtccgagagaatgacgagcttcatgatgcgttccccctttccaggacagtataccggaaaatttctctttcggaaagggaaaattcccccttgactctgccggtgcgtcaactgctatgctgtttgcagggagggagagaagatggaatactccattcgcgaactgtccaacctgtccggggtgtccacccgcaccctgcgctggtacgacgagatcggtctgctcaagccctgccgcgtggcggagagcggctaccgctactacggcgcggcggaggtcgaccgcttgcaggacatcctgtactatcgggccctcggggtggggctggcccgcattcgggagtgcctggacgcgccctcctttgaccgcctcgccgcgctgcgcagccaccttgccgcgctggaggcggagcgcgagcggctgaaccgcctgatccgatccgtgcagagcacgatcggggccatggaaaggagcgaaatcatgcaggacgagagcaaatttgcggccttcaagcagcaggccgtggactggaacgagaggacgcacggcgcggagctccgcgccgcctacggcgacgccgagatggacgccgccaatgccgcggtgcagcgcctcaccctcgagcaataccgggagtggacggacctcgggcgcgagatccagcgccggctggaggccgccgtgcaggccgggctcgccccggacggagaggaagggcgcgagatcgccgccctccaccgccggtggctcaccgtctgcggcaatgcctacgacccgcgcaggcacaagggactggccgacctgtacacggcggacgcgcgcttcctcgcgtactacgaccgcgaggtgcccggctgcgcccgcttcctgcgggacgcggtctgggcctgggtgcaatgagcgaagggagggggcggcgcgcgccgctccctcccttcgcattttcggcgctcacgccgcactgcgcacggacagcaccgtgtaccccgcctggcgcaccgcgctgcgcagcgcggcctcgtccggcgcggactttgtgcgcacggtggcgcggccggagcccacgtcctccacgcgcgcccagacgccgtccaggctgttcagcgcgttttccacgcggcgcgcgcagttggcgcacaccatgccgtcgaccgtcacctccagcacatagggatagtgccgcttgtcgcggtcccggaccttcacgcgcttgggcgcggcctcgcgctcgccgcagcagccgccgccgacgcggagcttccgaatgtagctgtacacggcataggcgcagagcagcaccacggccgccagaatgagatacgttgccattgcccgcttcctcctcacacattggttagtttttactaacttagtatagagcgcagggacggaggctgtcaaggccgcggcgcggcattttttggaaccgtgcgcggcgcgcacgcatacgatgtggtgcaggcatgtatcctgcgtttcggaaaggagatctatccgatgagaggctttacttctggataccaatgcaatgcgggccgcggcgtatacaactgcgccatgccgcagtgcggcgttccggtgcaggggtgctgtccgccccggccctgcccgccgccgtgtccgccgccctgcatcatcggcccgacgggaccgacgggccccacgggccctgcgggcggtccggcgggtcccacgggaccgacgggtcctgcgggcttcccgggaccgacgggtcccaccggcccgaccggtccgaccggccccacgggccagggcatcaacgacgtcgtgcccttcacgcccggcgcattctacagcctgggcgagctcgtgtactacaatggcagcctgtatcaggccacgcgcagcggcgcgagcggcgtgccgggcttctccccggactttaaccttgtgaccgtgaccgggccgcagggggcgacgggtcccacgggccccaccggccccaccggtcccacgggcgcgacgggcgcaatgggccccaccggcccgaccggtcctgcgggcacggcgggcgcgaccggcccgaccggccccgcgggtgaagcaggcgcagtcggcccgaccggtccg

SEQ ID NO: 545 - DNA, 26240 bp, Unknown
  16S sequences of unknown bacteria
ggctgtcctcgagcacggggtgtccggtgtcgcatagctccctgccggtcgctctgctcgcctcccaccctccctgcgggtcgctttgggctgcgcccaaggccccactggggccacgcttcccttcgggacagttcgctacgctcacccgccgggaaaaagcccttgattgcccatttttgaaagagggagttcgcaatgtcgcgcgcagcattgttggatagttattacctactatcgtgcgcgctcgtgctcactcttttcctctttcaaaaagggcaaggctttttcccttcgctgcctatcgccgctctgcttccccgcagttggcgctgggcaggctcaaccaatgcgagttgggatgttacggcgcaagttgggtggcttcgctgcatccataagcagacctcttttccaactcacagctggcggtgggcttattcaaccggcgctgcttgggatgcttcggtacggctgggatggtttcgcagtgcaaaaaacgggcttgcttttttcctctgccgttagcgctatacttgctcaaccggcgcagcttgggataatcctgtgtagcttggatattttcgtaacgtaaaaaggccagctggatttcatatccacgctggcctttttttgtgagccaggaggcccgttgccgaatggcggtctttcctattcaactaacggtttaccacactagaccggcaagccgcgaggcccgtcgccgagcggcggtcttggggacgaaagcgccggaaacacgaggccttccgccgagtgtttccagagcgccatgcttatctgtacattcctgcgcgcccgtaggcgcgcagtccggcttcaggggcactgcccctgagttcgtagggggagaaggggtagaggagaacaccggcgatctctccggccagaagacccggctcaacgaagaaaacaatgttgccgttgtcatccagataaaaatcagtctcgggagccagcgcagaacgaacgctgtccaacgtcaggccgtccagatagtcgccttctacgttctccatccccacttgaacgatctcccaaatcaggtcatagaccagatcgacaggttgggtgctgccgtccgattcttctgtgcccagaagttcggaaagcgtgatcttgcggggctcgtcccctcgaagaaaggtgtcggcggaaagcgtctccgtctcgccgttgcccgacagctgacgcaagtgcagcacgacgctgagatactctgcgtcgttccgggtgatctcgtaatccagtacccagctttccggctcgctgccctcatcgtctgccgaccatactgcccccggaggaagtccgcccgcttccagatgagcggccaaatccagatagtattgattgatttccggctcgtcgccgaactggggcagagaaaaagaagcgcctcttctttcccccactctgtcctcaatttgcagagccgccgccgtttcctccgccagccccaaaagaggctggcaaaggagcaacgccgtcagcaggaaagccatgcagcgcttcttcatttttttcattcctttcggaggctcagagtcttagccctgcgcgccttcttcgctggcgaagctgttctccagataagagcagtacatgctgtaatcgccgctcttttcggtcaggaacttcagctcggcctgataaatgtagttttcggacaccagatacacatcgaacacggtgtaaccgtcatcggtggtgtaggctacggtgccgtagttgttcatgtcgttcacggtggccttcgcgccgttcaggccgctggcgatgacgttcacatagctctgcaggtcgctctgatccgtattctggatgcggcgggcaaagaaggaagcgctcttgtcaggcagttcggcgctgacgccggtctcgtcttccttgagcagctcgtcgtcaaacacggcagggtaggacagggtgaagcccagcttggaattcacatattccaccacggtgtcggcgttgtattccatgaaggcttcttccatgttcaggtcagtgccggaagagaagcccaccagacggaaaccgttcaaggcgctggcgtcgctgcggaaggtgaagataccgcgatccagccaggtcacgtcggtgaattccgtgccgctcatctcgctcaagggcttgctggcggtgtagatttcgccgatgatctgcagggtgttgttttcgccggtgttgttcaccgtcacgggccggaagccgatgtagttgctttcgccgtcagcggcggtcacggcggtcagttcgggcagctgcgcgtcgaagatggagctgagcagcgtcttctgggcggcagtgtccgtcatcattgcggcggtcacaccaacgctttcgccacgggtctggccgatgcgaatgaaggcctgcacaaactcgggggtcagttcgccctcggaatcaggcaccacgatggcatagtcatcctcgccctgcgcatccaacgcggcggcgcagaccagatccatcagggggtacagcgcttccagatcggcggtttgctccgccgcggccatggcgcagcccagcatcatcacgagtgcaacgacccatgcaaatgtctttttcatccactgcttcatattccgtattcctcctaagctatcgtgtatgaacaccacgcaggtgtcttcctcttataagacgaacaacctgcgggatttcatccaagtttggcaatatattctgctgcggcgatggcagccacattgccttcccccaccgccttggcgatctgcagcggccggccggtcacatctccggcggcaaacacgcctggtagactggttctcatgctccgatccacccgaatagcgcctccgtctgtttccagcccgtccagcagcattcgcagcggcacggcggtgcggaagatgaaaacgccatcgtacagatgagtctcccgatccgtggtcagggcgattttgctttcttcccgcgcaaggctgcggggtttttccgctacgatctgcacgctctccggcagcgccgaagcatcgtggggtttcagggcgtaatagtcgacgctccccgccagcgtgtgcagaaacgccgcttcctccaccccggaggccgaagcagacagcaccgcgacccgctttccacgatagaacatgccgtcgcaggtggcacaatagctgacgccgccgcccagtagttcttcttcgccgggaagaagtacgggccgggctgcacccatgcacaggacgacagccctagcttccagcacgtcgttttccgccagcagcaggaagcaatccccactcggcatgatctgacgcaccagcgcgtttttttcttccgcgcccaacgccaaagcctgttgacgaaaccgttccagcaattctttgccggggatctgcggcagaccggggtaattgtcgatccgctctgcgccgccgagccagcctcccgtttccgccggggcgatcacagcggcgctcaagccgcgcatccgggccgtcatggcgcaggaccagcccgcggggccattgccgacaatcgctatatccacaagcttttcctcctttgccatttctttggagtgaactcagtataacaaatccgccgaaaaagcacaagagaaacgttataagtgtaacatatttgacacaaaaagaaatatttagactttattcgccttctccttttttgaaacgctcctctacggtgttgcgtttccatgcgaccagagctccggcaaaaatgccgcacggatgccaactgaactgttcaaatccaagctgagaaagcattttcattgcacggcggcgcgtgatgttttccgttgcttccgcaggagtctcccggatcgcatccagagcgctgcgaaggggcgcaggcagattctccagcgccatcaccagttggccaccttccttcagtacccgatgaacttcccgaagctgattttccatagcggattcatccaaccggcagggtctgagcaggacggcgtgaaaagcttgatcccgccaagggatatcccctgcggcggcatacaccagatcggcgctgcgcaccagaccacggttggaacgaaccagttccatatcgtcggctacgccgcaaacctcacattccatattgcgcagcaggtattccgccatcaggccgttgcccagacccacgtccagcacccggtcgtcacggtcgatcactgcccatttcagcaggcagcgttccatcgtgctgagccttgggtggcgcgacgaaaaatgcgcccgttcgtaggttctgcttcctgcctttgagatcatacaaggcctccgtccattacagtaggggttctccttaccgtcaaatacagaaagaaaaccctgccggtaaacacaccgacagggtcagtatatcatattttcttcaaaaatgctatatttttgtaatattttttcaatatttttgagatcatacaaggcctccgtccattacagtaggggttctccttaccgtcaaatacagaaagaaaaccctgccggtaaacacaccgacagggtcagtatatcatattttcttcaaaaatgctatatttttgtaatattttttcaatatttaagaaactaatttgcctttctttgttgctgacacaaaaaagacaaaacaaaaagctgatgctcaaatgtgcatcagcttttatactgcatcttacaggcacttactgcgccttcgccagcctcttggccagacgagcctttttgcggttcgcggcattcttatggataacgcccttggtaacggctttatcgatagcggaggtggtgacaccgtacatagtagcggcgttcgcagggttttcagcgacctccgattcaaacttcttaacggcggtcttgaccttggttttcacgatgcgattctgaaggttcttggtttcgctgaccttcacgcgcttgatagcggacttgatgttaggcaacgtctttcacctccttggtattcattcagtcgcagggtatattttatcatgcgatccctgaaaaatcaataccttttttccaattctttcgccacttcttttcagggcagcagcattcctgccgctaacgccgccacgcaggcggcggcagccaccgtgagcagacttttgcccatccagccaagcaccagtgccaccgccgcgccaatggccgaagcggtcaggctgcccgtggcggaaaacactgcgggaaaggtcatggctcccagtacggcatagggcacatagtataggaaggatcgtacaaagggactcttgactttgctgcggatcgccgccagcggcagcatacggatcaggtaggtcacacccgccatcaccagcagatatttcagaaaagccgaccactccatcagtccagcgcctcctgttctttctccgattcatcctgcgacgcatcagggggaacgggcatcagccacgctcccagcgcggaagccgtcacagcacagaggatgatgcggaacccgccggaaataaaggaaaagaacgaaagaaactcaaacatgcagctcatggcgacggcgatcagcaccacgaagcgcacctgccgggatttgcggaagggcggcagcacgatggcgatgaacataccgtaaatggcgatgcccagcgcatccgtcacgctcttgggcagaagcccgcctgccagcgctcccagcgcggtgcccagcacccagccgatgaacgggccgttggtcaggccgtacagataagccttgcccaccttgcccggctgttgggacgctaccacgaacacctcatccgtgttgcagaaggacagaagcagccggtggggcgtggtcatggtttcgtccagtttctggctcaggctcaagctcatcaacgcataacgcaggttgatggtcagctgggtcaaagccagttccgtcaggcttcctccggcggccatcaactgaaggcccgccagctggccggcactggtcacattgaaaaaggagatcagaaccgcctgaatgggataaagtccctccatcgtcgcctgaatgccaaaggcaaaggctaccgaaaggtagcctaatgcgatgggcaagccgtgacgaaggccttttacgtagtttttcaaaacattaccttcttctgcgcagtttgtttacgacggttccggctccgataagggtcaggatccagccgatcaggcccattcttttcccgttgccgcgacgatttcgacgcgcctttcgcgccgggtcgctctggctgaacacgatcatcaccagaatggccagaaccagccagccccgagcgcttaacccgccttcgtcctgctcgtgggtctcgtgatactgctgataatcggcggtattttccgtgatggagccaatgacctgctcccacagttcagaaccagtggaggactttttcgacgtgaccgtctcttccgtctggaacagaccgttcaggctgatatcggcgttatactgccgttccagcaggtcgttcaaagccttagaaaagctggcgaacgccgcgtcgtactgctggctttgaaacaaagtggcaaaagaagacgaagtgtacagcagattttcggcattactggctcccagcttcttttccacattgctgcccatcaccgccgcgaagctgtcctcgcccgcagcgcccagcagaagcagatcgtccccgcccaactcccaacgttggaacagttggcgggcataggtcttgacctccatgccatccaggaaattcaccagcgccacgtgcagcttcacgccggtttcttcctccacccgggaggcataggccataacatccttggccgtcagcgttccaagcacattcgcgtcgtccgtcaatgcgccgcgattttccggcatccgaaccgccgcaaaggcggccagactccagcagagtgcaagcgtcaacaccagaagggcacagatttttttcttcatcttaatggttctcctcgtccagtccagcggtcactcatacaactcgcaggggctgacgcccagcagcccggccaacttgcctaccggcgttgtggtcagcttgcggttgaaatcctccgcggcgctgttgtatgtatcgaaaagcgcgttttccgtcaggttcttccagtcgctttccagcatggcggcgtaacgctgatctcgctcgctctgctgaaagctgtcggccgcccgaagctgttccatcacttttgcgaacaaaacagacagtttctccgtgtcctttttctgttcttccagcgtttcatcgcccgcgttcagtttccgggacacctgccgaagggcctccacgtctgcgttgccgggcagatggcgatccgccaccacgcacaggttcagcccatcggctccctgatagctcaacgcatccagcaagccgttttccccgctgagaagctgagtcacctgctgccggtcctcccggaagccggagaacgtgccataccccagtccgaacagcaccagcacgatagcgatcaaaacgcatacgcccatggggagtttgaatttcatgatcggatgattcctttcctgttaaactgcgccgcatcccccgtgggaaatgcggcgcttttcatgtcagtgcagctccagcagcttctttttcaagtcggcctccatggcgaccatttccttttcggcctccagacgcttggtgcggccgtcctcctgaatcttcatcacttcgttgatggtgtccatcaggctctggttggtctgcttcagggtctccagatcgatgatgccgcgttcggcctcctgtgcggtctggatggtgccagtcttgagcgcctcggcgttcttgcgcagcagttcgttggtcatgttggtcacggccgtctgggccttcagcgcctcctgactgcggtgcattcccagcgcgatcacaatctggctcttccacagcggcagcgtgttggaaagggtgctctgaatgcgttccaccagcagactgtcattattctgcaaaagccggatctggggagccatctgcagggccacctgccgggtcagcttcagatcgtgaagctttttttcgaagcggtcgcagttggcggcaaggtcgttggcccgctgagcgtccatcgcgtcaccggtctcggcggccttctttttcagctcttccagctcaccctcccggacttccttcaatttctgctcaccggcgataatatacatcgtcagttccttgaaatactgggtgttcatatcatacaggtgattgaacatgctcacatccttgagcaactgcacctgatgattttccagctggctggcaatggtgtccacattcgcgtccaccttatcgtacttggtctgcatatcactgacggccttctgggcgttccagaacaggcccttgatgccgctgggcttttcggcggcggcgctgaagcccttgatctcgttgaccagattcaccagcatatcgcccacttcgccggtgtccttggtgcggatggtggccagcgcgctgtcgctgaaatcggcgatcttcttctgagcgtccgcgccgtaaagcagcacgtggtcggagttattcacgtcgatctttttgacaaactcctcgatgctctttttatcttcttcggtcagcatggtggtgtccatctgcttgaccgcttcgctggcggcctgcgccgcagcggtggcgctgggggctgcctgcgccatggcttccagctgctgagtcgtttcctccagctgcactttttccttggcgaccgacgaaggatcgagggtcaaaacaggggtctgctgggtctcattgttctgctgatgaatttcactcatgggaaaattcctccttcaatcgctctatcgccggtttgatgggactcattcgtcttttttggcctgtgccgcggcctgaccgtcatacacggggtagaccccgccggacatcgtaggagcctgaggcatatgctgccgggcctgttcctccgcgccgctgacggcctgctgcacgccgctgtctgtgtgaagggtcggcgcgctttgccgggtctgcgcctcctgcgctgcccgctgctgacggcgctgttccgccagcgctgcgtccagtctggccgcctgcttggcctgttcggcggctttttccagttcgctttccgtcaggccgtcccgcttgagcatctgttccagcacgtcgatatcggtggcgatgtccagcatatcgtccttataaagattcttaagcattttctgacagccggtgatcaccacgcccagcgcgtcgtcaatgcggtgctgtgcttccttcgcctcagccatgggcaggttgcgctcgtccagcttgcgatagctcttgaccatcttgagcgtagtgggcaggtaatagtccatgaacttgcgaatctgcggggcgcgggcaggattttcatacacggcctgaaaaatcgccgcgcagttttcctccagatcgtccagcttggccgacaaagactcgtcggggatcagatcgttttccttccggatttccgcgatcatttcccggccctgggtcaacagttgatccacgtccgggttgccggtattggctttaaggcgctccagcgcgtcattcttccgcttttcttcttccttggcggcttctgcggcggcctcctcggccattttctttttctgatcgtcggtggtcaggtccagaccctgcgccatggtacggatcaccgcgctgacaaacgcactcaccgccagctgtaccgccagactgaacagaccgtgaatcttaaaaatggaactgagcagcacgaacgtcacgccgaaagcaaccgcacccgcgccgttgccgctcttttttttctttcctttactcattgcaggctccttcatccatcctctatatcagccggggcgttttcgcccggcaacttggccgacgcattggattataccatatttcccctcatctgaaaagaagaacccgctcgaaacaacctttgcccttcctaaaagttttctgaaaatttcatgagcacaaggggcagtgccccttgaccccggactgcgcgccttcggcgcgcaggggcgtagagcgacatgcggcttggctgcggaattaccgccgctcggcgacaagcctcgcggctcgcgggtctgatgtggttttttgttcgttggacagaaaaggccgccattcggcgacgggcctcatggctcgcaacaaaggccagcgtagatttgaacccatgttgaccctttatgttacaggaatatccaagctgcggcgaagagcatcccaagcagcgtcatttgagtctgccacacgccaactgcggggggaacagagcggcgataggcagcggagggaaaaaggtgagcacgagcgcgctacgcccgtatgtgaaagccggccaacttcattgcgcgcgacattgcgagccccgccgtcaaaatgggcaataagagcctttttccggcgggtgagcgcagcgaactgtcccgaagggaagcgtggccccagtggggccttgggcgcagcccaaagcgacccgcagggagggtgggaggcgagcagagcgaccggcagggagctatgcgacaccggacaccccgtgctcgaggacagcccctgagggcagtctgcccacggaacgtggtcagactgttccggcccttaggccggaattggacgacccgaataaattcgggtcgtccaaccgttcggctcccgcagaccgaaggccgactagcgccagaaatggctgaaagccatgaagcgcgtagccaagcccaagcgcagcgcagggcttggccgcagtgcctagcgacgtgggccgcctctggagtcgccgtgccgcgggctttctttggtactttctttcgcttcgaaagaaagtacttcccccctcggggcggcagccccaccgtttgcgccgtagtcggcgcgtcaatccccccgcaggggctttttacagcaaagctatcgtaaactgcgacatcaccgcccttaatagcactttgcgcagggcccataccccgcctccacggctgtctccaacgaaacctgccgcggatttttcatccgggagcaattcggcttgctgtgatatttggagccggatttgggaatccaaaccagcacgtcgcctaagccgccttcgtccggctgaatgctccgcgcctccatttcgtctgaaagcgcctgataggcctcctgcaattcctgatccgataaagcagcgaacgtggccttccattcattgacagcccgcgcgcaaaggggcgcggccaccaaaataagacagacagccaacgccgcccaccgagaacgaatcttggaagatattttcatcttaagtgcctccttggatcagcggagaatcgaccttgtccattcattctacaacaaactacaacaaacgcgcccgtcctgtaaagggagcgggcacgccggtcatttttactttatcacagagaagttcagccagcaaaccgttcaggctcgtcccaacatccggcggcggccgtcatccagaaacttgccaagatcggccatattttcaagggctcgtccgcagccgatgaccacgttgttctggggatcctccgcgcaggagcagggcactttcagcgtgtcggcgatggcctcgcacaggccgaacagctctgcgccgccgcccgacagcaggatgccgtattcgaaaatgtccgccgccagctcggcaggcgtatgttccagcacgccgtggattccttcgatcagctgctgcagcggatcatccagcgcctcagtcacatcgtcgctggtgatgcgcatggtcttaggcaaaccggtgatcagattgcggccggtcacttccatataaagctgctccgaccggggaatgacggatccgatgttgatcttcagctcctccgccgtccgttcgccgatgagcagattgtgcttgcgccgcagatggcgaatgatcgcatcgtcgaagcggtcgccgcccaccttgatgcagtcgctgacgatcaccttgccgaaggacagcaccgcgatgtccgtcacaccggcgctgatgtccacgatcatggtgccgtaggcctcgtcgataggcaggcccgcgcccagcgccgccgccagcgaacggttcaacagttgggtgcgtcgcattcccgcgtcaaacatggtggagatcagcgagcggcgctccatttcatttacggcgctgggcacggccagaatggcccggggccgggcgaacatatgcttgccgacggctttcatcacgaagcccttgagcatgaagctgaccagctcgtagtccgtaatgctgccgtcccgcaagggccgcagcgccagaatattgccgggggtacggccgatcatccggctggcttcctcgccgaaggcgatgatctcccggctgtcccggtcgatcgccaccacggatgcctcccggaggatgatccccttgcccttcatgtaaatgagcacatgggaggaacccagatcaatgccaatatcattgacgccagccatcggtcattaccctttctttctgcagaaatgaaaacaggccggaaggggaatttcggcccctgtattttcctattcgccattcgattcatttttcctgctttggtatttccggcgtgtcgcttcgccgccccgcagatgccgcacggccttgttatagcagagaatccgccccacctgcgcggccagcgtctggctcagctccggcaggcgttcgtgcatatccttatgtacggaagacttgctgaccccaaaacgccgggcggcggcgcgcaccgtcgccccgtgctccgcgatatactgcccgatttccagacagcgcgcttcaatttcttcccgcatatccatccctccccggaggtttgggaaaggatatgcggcctggggcggaaaattgctttgttccctcccggggttgtctttacaggaagaaaatgatacaatgctttccatcccctttaccaaaggagcctttgttttgattaccttctgcacccttttcagcggttccagtggaaacgcctccgtgctgcgcaccgaaagcggcgcgctgctgatcgactgcggcatgagcggcaagcaggtgctggccgccctgcaggcggcgcatatcgacccggctgaactgcgggccgtgctggtgacccacgagcacagcgaccacgtcaagggcgtgggcgtgatctcccggaaattgaacctgccggtctatgccacggcgggcacctgggagggcatgtcaggagccgtcggggaaatttccgccgctcatcaggtgctggtggagccaggggaaagctttttcatgctggacgggctggaagtcaaccccttttccatcccccacgacgccaacgagcctgtgggctaccgcatttatctgcccggcggcagcagtatcgccgtagccaccgacctgggctatttttccgaaaccgttcgagacgcggtgctgggcgccaatgtggtgctgctggaaagcaaccacgaccccgacctgctcaagcaaaatcctcactatccctccgcgctgaaaagccgtattctgggacgaaagggacatttgagcaacgccagtggcgcgtccgctgcggtagagctgctcaatgccggagcccgtcacctgctgctgggccatctgagcagtgaaaacaacacgccggaaatggctttccaaacctcaaaagccgcgttggaaaatgaaggagcccgcgtgggctcggacgtgacgctgcacgtggccagtcgttatcagcccagcgtggtttataccattcgttgactcaacctgcattctggatgaaggagggatcagccctgtctgtcaccgtactgtgcgtcggcaaactgcgggagcgcttttatgcggatgcggcgcaggagtatctgaagcgtctttcccggctgatgcccaccgaagtggtggagctccccgatgaaaaggaacccaccaatccctcccccgccctgaacgaggcggtcatgcgcaaggagggcgaagcgatcctgcgccacattctgcccaaggcctacgtcatcgccctgtgcatcgaaggcagacagctttccagcgaagccatagcagcgaagctgaaggagctgttcacgcagggaaaaagtgatatcgtctttatcatcggagggtcgctgggactacatccctccgtcactgcccgggctgatctcaagctgagcatgagttccatgacctttccccaccagttggcccgcgtcatgctgctggagcagctcttccgcgccgccaagatcaacgccggggagcgttatcacaaataatgtcctaatttcaacgcttgcgaacccctgccgggaatgttataatgaaacggacatcggtttccaagtccagtcgcaaggaggccccttttcgtgaccctgaaagagatactgaaaaaaaatctgaatgttcccaatgttttatccctgatccggcttctgctggtgccggtttatctgattttgttcgttcgcggacaaaagacggctgcgctggtcgtttttgccgccgcctgttttactgaccttctggacggccgcattgcccgcaagtataacctgattaccgatttgggcaagctgctggatcccgtggcggacaaagtgatgatcctgactgccatgttttccatgaccatcggcaacgacgccattcccgccgtgatcccgtgggcggcggtgctggtggtgctggccaaggaactggtgatgatcgccgggggcgcgctgctgctcaagcacggcatcgtggtctattccagcatggtgggcaaggtggctcactgcctgttcatcgccggtcttctgctgagctatttccacgaggattttgttcgtctctgtccaggatggttcatgacccccgacctgatcgtgatctggctggcagtggtctgcaccctgtgcgccttgtgcttctacgtctggaagaacgtccgtcaggccaaggagctgggcgtgatcggccaaaagaaaaagtaaaacgatttttcagcgatcaaaacgccgccgggtctttcccccgaaaggaaagcgcccggcggcgtttttggtttaagggaatcggctaacgctccttatttggcgcggtagctgccgcattcgctctcgtcgcacttgccggagtggcagtcgcagcggggcttgacgttgatggcgtccagctggcacaggtcgcccgcgtcatgatgctggcagctggtcacctcgcagtggatgcactgatgcttgtcggaaaaggccatgttccttcacctccccatgacttgataagggcagtttgcccccgccatgccagcttcattcatccatctgtttcccaaaaatacgcgaaaatgtaaaaatgccctccgccctcgaccgccttccaaaactatgctatactgtaaaggagtgtatccgcagggctttttttgacgctggcggaaccttaatgttttctttttgggaggctattccaatgaaaaaaatgaaccgttccgtccgttccctctgtctggccgccatgatcgccgcgctgtatctggcgctgacgcttctgttccagcccatcagcttcggcgccgttcagtttcggatctccgaggccatgaccctgctgcccgccattttcccggaggccaccatcggcctgacgctgggctgtttcctgagcaattttctggcaggcgcgaacgtctacgacgtagtcttcggcacgctggcgaccctgctggccgctctgatctcctggcgggtaggcaagaaaaagctctggtacgccgccattcccccggtggtctgcaacggcgttatcgtaggtctggtgctgacctatgcctatcagattcccgccctgtggatgaacatgctcaccgtggccgccggcgaagcggtggtctgctttgcgctgggcgttccgctggtccggttcttgaacaagcacaaggataagctgctctgaattttctgaatgagggttttaggttttcatcaaacggagcttagaagggggcgttatggcgctatgggaaagaaaaaacgcagttgggcttctctgctgctggccgggctggtgctgctgaccgtgcggcctgctgccgctgcggaggcgtcccggcaggaaagcattcgcattctcttcgaagaactggtcgagcaggaaaagaacgggacttccatgtccgcagaggaagcggcggcccggagccagtgtacggatccggcctgcgcccatgtttccgtggatgaagagggcaacgtgaccgccctgtgcccctatggacagtaccttctgtccgcaaacccctatatggtgttcagcgccaaccccgtgaccgagctggagctgcagcccggtacgaacacactctaccgcagcggcacttatcatgtcaccggcggcgacggcttcgactccctgatcgtgaccaagggacgggccgtatcactgctgctggacggcgctcttttggcacgcctgcagctttccgacggttccgccgcctcgctgcagcaattaaacggcgcgtctctgagtgagattgtgcccgtcaacgcgacgctggacgtgtccggtgcggtatcagtgcagaagctttccgccggttcgctgacgctgaccggttccgggcgactgaccgttggcgatctgaacgccacgatctccggcaattccaccggcagtgtgcgggtggtgtaccaaagctgcggcgcggaggccctccgtcagctgcaaaagctcaccctttccgggggagaacggttttccgccgatctgcccgccgtcttccggggcacggaagtaccgctggttctgagttctgaccccgataaaaacgacacggcctatgccgccctgcccgctcccgaagacggcaagacctacaaagcccgcgtcaacggccagcagattctgatttatctttccgatgaaccgcaggaatatgtgctttcgcaaagcgccgcgtcggtgctgaacgtggagggttcctccgccgttctgaccagcgaagaaaacgcgacccaaagtgcgcaggtcagcgctgcgaacctgacgctgcaatcggcccgcaccagcggcagtctgtccttgagcggaatgtccgccttccgtgcggaaggaagcagcgctttcagccaaatgatcctcgacgcgtccgccggtctgtccctgcggctgggcggacggctctcgctggatgggctggtcaataacggcagcctgtccgtgcagggttccggtgtgctggaaaccagcgaactgcgcggcagcggttcttacacgattgaccctcagtgcaatttcagcgtggagcctttgccggacgcgatcggcggtctggttcccacacagattcagattttgggcgaagaaaatcatcccattgtctcgacccgcgtccagctgaagctgggcagcggcgaaagcttcctgaccaccaccgacggccggggctgcatcacgctctggcgttcggaaaagctccatcaggtagacgcggtggccctgtccggcggcgacacctattccgccgtcatcctgaatggacaggcggatgtcgacgcggtgccggagatcacctccgccacgctgaccaaccggggtgtggtgtccgtcacgctgaaaaacgctggagtctggggcgtacagtacattgtcggcagtgcgcccgtttccatgccggattcgtggaacgcttccgcccagaccctctacgccgccgagggcgagaccaacctgtacctgcccgggttgaatcccggggatgtggtcagtctgcgggtctttgccgcccgggaaaaggacgcgcggctcagcgccgccacggcggacgctttcgccttctacaagacgcaatccatcaccatcgaatcccggaaggcctacgagcccgccgggcagagcaagacctacaacggccagcccatccagctttcccacctgccccgtaaatgcaaggtggcctattttctggaggacggcactcccttgcagaccccgcccaccaaggagggcagctattacgccgagatcactgttctggacgacgacccggaatatctgcccggaaaagtcgttatgccgctggagatcaaacgccgcctgatctacgtctacgcgctggacgcgaccaagcagaagggcgaagacgacccggaatttgagtttgacaccgacgaactttgcggccgtgaccggctgcaggggcgtcttacccgcgccaagggcgagggatacggcaactacgcctattccaccgacaaactgtccgccgtggatgaaaacggccagacggtcaaccattaccgtttcgtgctgtccccggacagcggccatttcttcatcgactggaactatcaccactacctgcccttcgatccgttgagcgtgatcgacccggtctacgaagaaatccacttcagcgacggcacgtccctcaaggtgcagtaccggctggccgatatgctgaatctggataaaacttacttcggttccattatccgggacaccgaaagcggcgaggagcggccctttacgccgtccctgcggctgcgtcacgggcgggatgaagcgctgctgatcctgacccccactgccgagctgagcaaagacggcggctatcgaactgatgggaacggtacgcccctctggcagggccgcaccctgcggctgggctactggcacgttcagcagctgctgaacaagcacgtagaacacgtggctttctccttaaacggcgttacgctgaccttctccctgcgggatctggtgagcgacggcgtggatcagtaccgccgtcaaagcggcctgcccaagggcaacaccgttttccgttttgacctgattcccgtgttctccaacagcgagctttccgcacaggaacaggccgcttataccctgcagggcgacggcgcgcccctgatgcgcgttcagacgtggctggaaaacggcagtgaactgatcgatttgtcccccgctctgtccggcgcacagatcgcctttgacgtcagcgcactggccaatcagcaggaaagcggtgcttcttccgatagcgaaacagagaccgtcaacggtcagcccgtgaagcagacctcgcaggagtccgttgcttccctgctgcagactgcctacgccgctactcagcgggaggacgcgacccagcaggagctggacgaagccctgcgcgtctggcgggaggctgtccaacagaccggctgcggcctgcatctgttccaaaaggaaaaagacgaggcgctttccagccgtctgatcgtcccctatactttgtccgagcagggctctgccctgtacgccgcgctgatgcgcaccaagccctacctgaccgccgctttccaacaaagtggtctgtacggctgcaacctgcactaagagaggttttttcaatatgcccaccttccaatgcgatacctccgccctgctctgggacgctacggcggtctccaacgcctttttgtgcgaatttatgcccaccgccccggacggctatgtgaaggtctatctgtatggcctgatgtatgctcacggcggtatgctggaagaagagggcgtgctggacgatctggccaaagcgctggaaatgcatcgggccgacgtggaacaggcgctccgatactgggagcgttgccgtctggtcagccgggtgcaggatcagccgccggtgtatcggttcgccagtgtccagcaggcgctgctgatgaagcaatccgcgccgcaggatcggccctacgaggaatttgcccgggcgctctgcgacctgttcggctcccggcggcagctgcacggcagcgagaccgtgctggcctacgagtgggtggagcagcagaagctgcccccggaggtggtcatcatgctggttcgccacatgatctccacccggggcatcaagttccctttcaaagacgcgcagaaggtggtcaacgagctgtgtgaacagaatgcccgcacccccgaagccgccgaagcggtattcagccgctccgaagccgcgtggaagggggctaagaaaatcctgagccgcttcaacgtccaccgttcccccaccatggacgagatcgacctgtacgtcaagtggacacaggaatgggggtatgcgcccaaggccatcgaggtggcctgcagtgagaccacggcgggcaccaaccccagctttcgctatctggacggcattttgtccggcatccgtgaccgcagcggcggtacggccaccacggcggcgcaggtggaaaagcagctgcgtggcgaggaggacgagtcctcccgggttcgggccatgctggccgccttcggcagccgggtctctgtggtggacgagggaatgcgcagcctgtatcaggccatgcgtgctctggccacagacgacgtgatcctgctggcggcccgggaggtgggtaaaaagcggggcgaacagcacaccatcgagaatgtgctgctgatgctggaagcatggaacgaccgggggctgacgacctccgcccaggtcacggcctatctcaaaaacgtccgggacacggacaaacgtctgcgggcgctgttcgcgctggccagtcaggacgccagctgcacccagcccaaccgggagctgctgcgcaagtggcgggaggattggaagctgtccgacccgctggtggagctggccgccacttatgcccgcaatacccgggaacccatgctctatatggacaagctgctttccggctggcgggataaggacatcaccaccatcgccgaggccgaagaagaacaccgccgctttgcggaagccgctgcgggcgaacggaacaaaacggctgcgcctgtgaagaaagtgatcgaacagcagtacagtcagcgggactacgacccggctatagtcgatggtcctagtcttgaggagattgaggaggcgaagaagctgtgaaccgggatcagatcatcttgcagctgcagcaggactatatgaagcgccgggaggacaatctgcgcctgtacgagcagcgggtggacgaggcctgcgagcgctgtaccggtctgcgggagctgctcaacgcccgtcacgcgctggtgctgggcggcatccgggccagtctggtggagcggaaggaaggctccagccagcagctgcccaacgccatgaacctgctcaacgacaaaatcgctgcggccttgaaggaaggcgggctttcgcccgacaccctcaagcccatctacacctgccccgtctgccgggacgaagggtatctgttcgacccctcccggcacatgtgcgcctgcatggaacgggagctgaaccggcgcattctgggcgaagcggggctgcaggacgaccggcagaccttcgaaaatttccgggaggaaatcttcagcgacgtgccggatcgaaccggtgtcagtcaacgacaatttgccagacgggctagaaacgtgtgcgaagcgtatgccgatcattttccggatgcatcgccaaagaatctgcttctagtgggcaaaagcggattggggaaaacctttttactgcattgcattgctcatcgtcttgctgaccgcggtattttaccgacatatatcagtgcttatcattttctggagctggcgcggaaggggtatttagaaaacagtcctgcgccgctttcttccctgctgaacgcgccccttttgctgattgacgatctgggcaccgagccgctgatgcagaatatcaccattactcagttatttaatctgctcaacgaacgccaagtatctggcttgcatacagtaatttctactaatttggatacttccgaattgaaagcacgctatactgaacgaattacttctcgtctcagtgatcccaccaattggcaaaaggtctcattgactggggaagatattcgctctaagctgaaaggactccaagcatgaacattcaaatttatgccgccaagaaaaatccggacgtactcaaggcggaacgttttttcaaggagcgccgcattccctaccagatgatggacctgaaaaagcacaagctgggcaggaaagaactggagctatttgtccgcgccgcgggcggagcacaggcgctggtagatcgttccagtcagaaggcgctggaacgccccgtggctcacatgagttccgacgcgttgatcgtggaagcgctgctggacgatcccgcggcgctggtcagccccatcgtgcggaacggaaacaaagtgactatcggcgcacaggaggacgtgtggaaggaatgggtggcgcagggctgatctctggtcagttttctcgaaaattccacccgtccaaattgaatataaaaaaaacctcccggaagtcttgaaaaccaacgtcttccgggaggtttttatctgtgtttggtcattctggtcattttgtttccgcagtacatttcaaaggcgctgaaaggcttgaaaaatttgaaaaacgtttgacacagagcgctggacatgttattatgttatggttgtccgcaatctgtgtttttgtgtgcccattttgcgcgataaaggtgcagaaccggcacggaaaaacggcaggaaaagcgctgcggccattccggaaggaggcgaaccctgaatggatcaggaactgcaaaacgcgaaaaaacgcgtggtcggcaccaagcaggtgcttcgcgccctcaatggcggcaccgccgcccgggtctttctggcgaaggatgcagacggtttcatctaccaccgggtcaactccctgtgcgaggaaaccaaaacccctgtcacgatggtggataccatgcaggagctgggaaagctctgcgccgtcggcgtcaaaaccgccgcggcagccgtgctcaagtaagcgcggcgtaccaaggaactataaagcgtctttgggttggacgctcttatagcacatcaatctcggaggtgtttccatgcccacgatcaatcagttgatccgcaagggacggcaaaaggctgccaaccggtctacggctcctattctgcagggctgcccgcagaagcgcggcgtgtgcctcagcgtaaagaccacgacccccaaaaagcctaactccgcccttcgtaagatcgcccgtatccgtctgaccaatcagatcgaaggtacgtgctacattccgggcattggccataacctgcaggagcacagcgtggtgctgatccgcggcggtcgtgttcgcgacctgcccggcgttcgttaccacatcattcgcggcgctcttgacacggctggcgtggccaagcggatgcaggcccgttccctgtacggcgctaagcggcccaagaagtaagccgtttttgcgctgagggtttgcaggttactttggagtgggcgcaggagcctagcggaacgcgtcacaacccaaacgcagccgcacaaaggaacaccgcgtgactttcccgccaggtaggggtaagccggaatgagtagcttttgcccgcagggagcggctggccgacagccgtcaaaagtctgtacccgaagcgtctgaacgcatcttgagtcccttacatcttactgaggcgatcagagatcgcccaacgaaggaggaaatcaaatgccccgtcgtggatttgtccccaagcgcgaggttctgcccgatcccgtacacgggaccacggttgtgaccaagctcatcaaccagatcatgctggacggcaagcgcggcactgcgcagcacatctgctataccgcctttgaaaccgtcgccgaaaagaccggcaagagcgcggacgaagtgttcaacgccgctctggccaacgtcgctccccagctggaagtcaaggcccgccgcgtgggcggtgccacctatcaggtgcctatcgagatccgccccgaacgccgtcagactctggcgctgcgctggctggtggaattcagccgcaagcgcggtgaaaagaccatggcggaacgccttgccgccgaaatcatggacgctgccaacaacaccggcgcggctgtgaagcgcaaggaagaaatgcaccgcatggccgaggccaacaaggctttcgcccactatcgctggtaagcgatcccttcccctggacgcaggcgcgtcccccacacatcttaatgtgtatctgaaaggagaccctcatctatgcctagaagtcaccctttggaaaaggtgcggaatatcggcattatggctcatatcgacgccggtaaaaccaccacgaccgagcgcatcctgttctacacgggacgtacgcaccgcttgggtgagacgcatgaaggttcggccaccatggactggatggagcaggagcaggaacgcggtatcaccatcacttccgctgctaccacctgccagtggaaaggacaccggatcaacatcatcgacacccccggccacgtggactttactgtcgaagtagagcgcagcctgcgcgttctggacggagccgtttccgtgttttgcgctaagggcggtgtagagccccagagcgaaaccgtttggcgtcaggccagcaagtacaatgtaccccgcatggcttacgtcaacaaaatggacatcatgggcgcggacttcttccgcgttgtcagcatgatgaaggaacggctgggcgccaacgccgtgccgatccagctgcctattggcaaagaagccgatttcaagggcatcatcgacctcgtccgcatgaaggcggaagtctattacgacgacgagggcaaggatgttcgcgatgaggaaatccccgaagacctgaaggaaatggccgaagagtatcaccagaagatgattgaggccgtcgccgaaagcgatgaagcgctgctcgaaaagttctttgagggcgaggaactctctcaggatgagatcaacgccgccatccgcaaggcgaccatcagctgcaccatgacccctgtgctgtgcggcacttcctaccgcaacaagggcgtacagcccctgctggacgccatcgtgatgtacatgccctccccgctggatattccggctatcaagggcgtggatccccacgatcccgaaaaggagatcgaccgtcatccctccgatgacgagcccttctccgctctggccttcaagatcatgaccgaccccttcgtgggcaagctggccttcacccgcgtttacagcggcacgatgtccagcggcagctatgtgttcaactccaccaagcagaagcgtgagcgcgtcggccgtctggtcatgatgcacgccaaccatcgtgaggaagtcgaaacggtttacaccggcgacatctgcggcatcgtgggcctgaaggacaccaccaccgccgataccctgtgcgatgaaaagaatcaggtggtgctggagagcatggtcttccccgatccggtcattcaggtggccatcgagcccaagaccaaggccggtcaggataagatgaccatggcgctggtcaagctggcggaagaagaccccaccttcaagaccttcaccgatcagcagaccggtcagaccatcatcgccggcatgggcgagctgcatctggaaatcatcgtggatcgtcttctgcgtgagttcaaggtggaagccaccgtcggcaagcctcaggttgcctaccgcgaaaccattcgccgcgcagccaagggcgaaggccgctacgtccgtcagaccggcggtcacggccagtttggtcactgctggatcgagatcacgcccgtggagcccggcgaaggctattccttcgagaacaagatcgtcggcggtgtgatccccaaggaattcatcgctcccatcgacgctggtattcgcgaagccgctcaggccggtcctctggccggttttgaagtggtggacttcaaggccagcgtgtacgacggcagctaccacgatgtggactcctctgaaatggcgttcaagatcgccggctccatggccttcaaagaggcgatggccaaggctgatccctgcctgttggagcccatgatgaaggtggaagtcatcatccccgagcagtacatgggcgacgtagtgggcgatatctccagccgccgtggtcgcatcgaaggcatggaagcccgcgtgggtgagcagacggtgcacgcgttcgtgccgctgtccgaaatgttcggctatgccaccgacctgcgcagccgcactcagggccgcggactgttcaccatgcagttcgaccactacgaggaagtgcccaagaacattgccgaaaaggtcatcggcaagaagtaatccaaatcaaagcagcaatgcttgaatattgactcaactaaccctaccgacaacaaggaggaacactcaaatggcgaaagcgcattttgaacgtacgaagccccatgtaaacatcggcaccatcg

SEQ ID NO: 546 - DNA, 3797 bp, Unknown
  16S sequences of unknown bacteria
agcagttcggcggcacgctgctgtttgtgtcccatgaccgatattttatcaacaaatttgccacccgcatctgggagctggaaggcggagcgatccatgattatccctttggctttgaaaagtaccgcgcggtgaaggcgcagcaggaaaaggaaaaagcaccgcctgcattggaaaagaagccaaagaaaccggcagccaaaggaacccgcaatcagaatgccgcccgcaagcagctgacgatctgcgagcgggaaattgcgaaagcggaggagcagcttgctgccctggatcgggcgatggaagagcatgcctgtgactatgaacagctgcgtgcgctgtgtgaagaaaaagaggcggcccaggcggcgctggacaaactttacgaacagtgggatgccctggcagaggaggcggaggggggaaacggacttgtggctacagggggcggcggcatgcggtgccgctgggtctgcttttggcggcgctgtgcgcgctgctggctctggcctttttgttcttctatacgcctatgcgcttttcgggctgcctgctgctgtgcgcggctgtgtattttgtgttgtggcactttttgtggctgcggcgggaacaccgtttggcccgggccgtgcttgtcattctggcagcactgctgattggcggtttggcagtatttactgtgctggaggctcaaatcatcggctatggccgcacagaccgggaaagtccggtttctgccgtggtggtgctgggagccggagtgaatggcacaaagccgtctttggcgctgcaaagccgtttggaggcggcgttggattatgtttcggatcggcctgaggtgcccattgtggtcactggatcccaaggaccgggagaggatatttccgagggccgctgcatggcggactggctgattgcccgcggtgtggacgaagggcgtattctggtggaggaacaggcggacaataccgaagaaaatgtcgcttatgccaaggcgctgctggcccggcacggtgtggatgtcggcgatgccgtcgcggtggtcagcgcggattatcacctgtaccgtgcgcaccggtattggggagaggacatggtgcccgtagcggctcatatgccggcggcctattggccgctgacggcgaactattatattcgggaggcttttgctgtggcaaaacagaactggctttgacaggagggtatgactgtgagcaattgtttgtgtatctattattcccgcacgggcaacacccgggccgtgatggaaaaaattgcggagcttttggacgcagaactgttggagatcaccgatggaaaggcccggaagggcgtggtggggtttgtggcggccgggctggatgccatgaagaaaacgcctgaggcgctgatgccttttcagacgaagcatcccctggggcagtatgatgagatcgttctggcaactcctgtgtgggccgggcggtgcagcagcatcacccgctcctttttgatcgagcacggaaaggaactgccggaaagggtggcctacgttattacgcatatgggcgattcgccttatgaggcggtgtatcagcagatggatcaatatttgtccgcgccgcatgtgttggggttgtccttgcagcccaaagccaccgattaccaccaaaaagtatacgattttgtgcgcgcgctgcgcggtgaggcggcggagcaggagtgatggcagaacagcgtatgttggataaactgaaggcgctggaaatccattatgaggatgttcagagccgacttgcggatcctgcagtatatgccgaccgggaaacgctgcgctctttaagccgggaggagaaagaactttcgccgctgatcgaagtctggagaactttgcaggagcgtcagcgggatctggaggcggcgcaggagctttcctccgaaccggattttcagacgagcgcccgggaagagatcgctgcggccctttcagacatagagcagttgtgggagaagataaaacttttgctgctgcccaaggatcccaacgatgtgcgtaatgtggttatggagatccgggccggtgccggaggtgaggaggcagcattgtttgcgcattctttgttgcggatgtacaccatgtatgctgaagcaaaaggctttcgggtggaggtggtgaactgcagcgaaacggagctgggcggcgtgaaagaggcccagttcctcgtggaaggagagggagcatactcccgcctgaaatttgaaagcggcgttcaccgggtgcagcgagtgccggaaacagagtcccagggccgtattcaaaccagcacagtcactgtagcggtgctgcccgaagccgaagaagtggaggtgcgcatcgatccgaacgatctgcagatcgatacgttccgatcttccggcgcagggggacagcatgtgaacaaaacagagtccgccattcgcatcacccatcggcctacgggattggtggtggagtgccaggacgaacgcagccagtataaaaacaaagaccgggcgatgaagatcctggcttcccgcctgctggacgctgagcagaaaaagcagcacagcgctattgctgccgagcggcgcagccaggtggggacgggtgagcgcagcgagcgtatccgcacctataatttcccgcagggccgggttacggaccatcgcatcgggttgacgctttataaaatcaatgcggtgatggacggtacgctggacgagatgatcgacgcgctggccacggcagagcgggccgagcagctgcgcctttccgagcagtaaaagtaacaagatgaaaagagacgtgatatggaaacaaaagtgtatcaatggaatccaacgggtgaaaacggagaagctgtggccggcgctgctgcggtgcttcgcagcggcggcctggtggcgattcccacggagacagtgtacggtctgggggccgatggcttgaatggcgctgcagtgcgccgtatttttgaggcgaaaggacgtccgcaggacaacccgctgattttgcatgttcctgacggcacttggctggatcgctgctgtgcggcggtgccgcctctggcccgcctcctggcggagacgttctggccggggccgctgaccatgatcctgccccgggctgcctgtgtgccggatgagaccacgggtggcctggatacggtgggggtccgctgtccggatcatcccatcacccaggcgattatcactgcggcggatacgcccatcgccgcccccagcgccaatacttccggccgccccagctgtaccacagcggcggatgtgctggaggatatggacggtaaaattgaggcggtggtggacggaggctcctgcatcgtgggggtggagtccacgattctggatctgacggcctttccgccgcgcctgctgcggcccggcgggctgccgctggaggcgctggagaaggtttgcgggaccattgcgctggatccggcggttacccgcttgatgcagcccggcgagcagcccaaggcgcctggtatgaaataccgccattatgcgcccaaagcgccggtgacagtggtatccggcgcgccggaacgatctgcggactatatccgcacgcatctttcctctggggagggtgttatctgttttgaagagtttacgccgctttttacaggcgtttcggtgcagagcctgggcctttccactgacaaagacgagcaggcccggcgggtgtttgatgctctgcgcgccttcgacggaacgcaggtggcggctatctgggcgcagtgtccggacacagccggcttggggctggcggtggc

SEQ ID NO: 547 - DNA, 2971 bp, Unknown
  16S sequences of unknown bacteria
cgttcctgttctcccggtggatggggttcccgggcgtcggggtggctgttctggtggggccgctggtcagcgtttccatttatctttggtatatcctcacgcgccgctggcacagagggctggcgcgtgttgcaaggctgtgaggcgcgtggaacgccgcagcggaaaaaatgaaagcccgggcccagacagaccgacgaaaaaggcaaagaagcaaaagaagcgtccggggaaaaagctggcggtggcaaagccatgcatctttgcgcagcaaagtgcaagccacgcggcgaatgccgccaaaaggggtggagccccttttttcatttaaaataaccccgcgccgtgcgcggcgaacggggccgcaggccctgttcgtaggcagcttggcgcaaaagcgcagctttttcgacaagctgagcccggcgctttcccagaaacgggaaagcgccgggcttttgccgttatttctgcatggcgcggtattgagtgggcgtaacgccttcatattttttgaatttgcgggaaaaattcgcctcgtcggtgtagccaacgcgctccacaatggccttaacgggcaaagcggtggcagccagcaggcgcttgctctcctcaaagcgcttacggtcgatgtactgcatcagggaaatacctgtcttttccttaaaataacgggtgagataagagggagaaaaacgcaggctctcggcaatggaggaaagcgaaagcgcgggcgaggcataattttcctccacatagtcataaatcgtgcccagcaggccgccgctcagctgcgccgagcgctgctcgtacagggtatcggccagcaggatacagaatttgtacaggtcctgctggagcacttccgtgctctcgtaacagttttcatacagcaggtccaacatgtttaccagcatggtctgcttgttttcggcgcattccggaatcagcttgttcaggcgtgaaagcatgtcaaaataggcgagtttgtaggagggaagggtggcggcccgggtgatatcggcaaagaagcgccccactccgcgggagatgtccgggtagctgcacgccttgactgcttgaagaatatcgtccgcgcccgtataagagagacgcgtgcgctggttgcggatgtcggccacaaattccggcgtaatggtggaattggcgtggaagaggcggtaccggcagttggcgctcgcctcccggaaggcatggggcagatctccggccgcatagaccgcgctgctgatgccgcaggagagcgacagcccgcagctgcggcacagcgcttcgcggatggcgtccagaatgcaggcgcagtctgcgtccggcccgaaggcagcgaccgccgcgatcccctgcccgttttgcaggtccaccgccgcgccgaagccgtcctgcgccccgcacatcgcggcaaattcctgccgcaaagcggatttgatgctccattgctgcttggggagatacgtctccacaaaatgaatggtatcgtcaaagcggaacaccaggacgcgcaggccgaagcggctccagcgggaaagcagcgtactgtatttctgtacgacggtttcggaaaagtcccgcccgccaagcacgcccagcagatacagcaggtactgggattcctccagttggctgtggctctccatagcggctgtcagagaagtctgctgctccacgaggtcttcaaaaatatgagagagccgggcgatctcatccggttcctccgcgggcgtcacgccgcccagctgggaggcgcgctgtaccaatacggaaaacgggcgggcggtattttgtgccagcacataagaaaggcggaggcccgacaccgtgacgaaagctgccagcagcacaaggctgagaacagctgtgagcgtaggctgataatattgccagaaatccagggcctgcaccacctggataccgtaattctccagctcgtggcgaaatacggccttgccggaaaggctttcaggcccgactgcggcagcacgggcggcggtgatatcgttgccgtaagtggggccaaagtacaaaagcaggttttcttcgctgtcgaatacataaatgtcgctgtttccggccgctgtggcgcgcagcccgcgtgtaaaggaggtatagtccagccgcagcagcagtctgccgggagagaacacatacgaggaggggatgggcatcacatacaaaaggcttctggtattgcctgagagttggggcacgaaatgggcatgatccgcggcatacaccacttccataagctggttttccgtgaggctgccgctcagttcgtcgcggcagtaatcggcgtagctgaaccgcccggcgctggaatagatgacgccgttgatttgcgggtacagcgaatctacgtaaacgatgctgagggaggagagagagttgacggagggcgccagcatttccagctcccagacgatattgtggggcaggtctctgttattataaaggttataagccatgagctgggaatcattctggacgacgatgcccaactgttcggcactggcgatgaaatccccgatctgctggctggcctggctcagggccatcgtctgcaggctggcctgccgctgctgtgtgcggacaatggaaaaaacattgaaaacagagaacatcagaatgatgaccattacagcggttacattgaatttcatcagcggacgaaagagcccgggcagcttttctttcatactcatcacctccaattgtagaattttgctgttttttcttctgttgtaaaaatattataggaatatttaacaataaaaacaagaattaagggtgtatctgggcaaatattgcggcggatgtcaatttttgcacatggcaaaatcgtgttttgggttgtactatgaacacaaatccaaaggacggacggtgaaaaaaatggttaaaatgctgcagggcggccggacggccgcaccggcacggacacgcgccgaaaagc

SEQ ID NO: 548 - DNA, 5247 bp, Unknown
  16S sequences of unknown bacteria
ttgtccactgctgtctgcagggcatccatcgctgcctggctcgctctgttctgcaatgccgcagcggcatcctcaagctggacaagcgccgtattcagctcatctgtgctgatcgagccgtccgcaagcagcgcctgtgccgcgttcatctgctcctgcaatacctgtgcggtttgttctgtatactggttcagatcgagtgtctcgattcgctgaatcgcttcttccaatgcagttcgggcatcattccaagcctcatcgctctgtccatagacacgcagctcattcagatggaatgaagcgttggctgaatcgtattttcccaccagccgcacatagcgcgcatgcaccgtgccatccactgccacatcctcaccgtggatcgtggaaagctgggtgccttcgtcttttgcataaagcagggtgaaattctccccatccacgctggtatagagatcataatagtaatatcggtcatttcttgcccagtaagtaatgacattcatgcgatcaagcgaatagatctcgcccaggtcgacacatatccatggctcatcggcatacacaccgccgtcccagtaagtcgaacggtttccatcgacgatctggttatcgcggctgttggctgatgaacccgcgctgttgtccgtgccgctggaagtcaccggtttgccataagccagattgtctgtctcttcgccatatacttccatctccacgatgtggatgttgttgatgtcgtcacgtccttccacatgcgtttccagaccgttcagccgcacataagccacctgtgcgtcgatctcatgcgtgatgcccgcagaggtcacatactcatccgacacatgctcgccgatcttgaaccattcttcgccatccgtgctgccatacagctcatatttatagatccgctgtccgccccaatatgggtagaccacgatgctgtcgacatcataaagcccatccagatcgatgatgatctgcgcatcggcactggcgacattctgtccgttttccacgctctgccagtaattgccggtattgatcacgccatcgttgatcttgtacgcatccgcatcgttgcagtttgcttcggtgtccatatgatatgcgatattcacccgcttgatcaatgcggcatacgcttcattgagcgcatcatatgcctgccggatctgctcggcatccgcatctgcctgagcagcggtctctttcgcctgtgccagtgcttcctgcagcttgtttacgctggaatcggtatagacggatagatccatctgttcgatctcttcgatccgtttttccagataagccgcgctggcaaagctctggcttttttcgctcagtgaaaactgcgcatcgatcgtaatgtcgttctcactataagacaccgtgatctcctgatcagatccttgcgcgggatcaaagccgctgatcgtgatggcatcgctgacatcgcggctgaatcccgtatcatatcgtgccgtcacttgcagctgcagcggctgtccggcttcatagatctcatcctgcgtgatggtcaggccactcagctgagacagaggaagcctctcggaagagacgctcacgccggctacggaagctacgccgctggcttgcagggcaatagattcatatccctggctgccggtctcataaccggcattggcgattacttgcaaaggctctccgccgctctcataagcggaaagcagacactttgaataaaacaagatcgatccgcgcgggacatgatagtcactggtcaccatgaccaggtccttcacgctgggatactgttcgctgaggatccggtaagtattctctgcatttcctaccgtatccggcgcctgatcttccacgatcagccgctcttcatccaaaccgtgttccagcagccattcccccatcaggccgccttcggtcacatccgggttgccggccgccgtgccgccgccggtcacgaccacataggcgtttggatatttctctgcgctcgccagaccggtctccagcctgccgatcagttcgtccttcatcgtgccgtcgctgttcaaggcaaagccgaggatgacgatgcacagactgtcatcttgcgcaagtccgtccggcgccacattgaggtttaccggcatatccgtattcacatagctccaatagtccatgatctgcgtccacgcctctgctttctgcgtatcggcttctgccatttcgctcaggacacgcgcgatatctgtctctgcgtcttcctgatcgtctcgataatacgcaatcagctgctggacatacgtatcggtgtccggctgcgcggcctgtgtcctgaccggaacgcccagtccgatcaccatggcacagactgccagcacgctgatcatctttcttatccagatcttcactttgttctcctgcctttctgatattgatccttcatctgatcccaaacgatgcagatgtcctggatgcgatgatctgtccgcagaagaaaacgtcatgcctgatcgctccctctgccgcaagatccatccttgccattttatcacgccatcttctcaggcgctttctccctcaggtcaaatcgtggtaaagttatcgttaaatcatcataagatatccactttgcctcggtacttgcggatatgctccgcgttgatctcatcgccgcggtcaagatttccgctgacccagatcggcggatccacgccgagatcagccagattctggatgacctgtccgacgatgcccaccagcagcgtcatcgccacgaccgtggaggtggaacagaacttctcgctgacccgttcatcctccagcacgctgtcgcccttcacgccgcagatatcgagcacgatatcgctgacatccttgagcagcttgccgctggaatgccgtgaagtcacctgcgtggaatagttcagggaagtcaccgcgatgaccttcatgcccttttccttcgctgccatggccatatcgatgcccgcggcattgcgtcctgacaccgatacgatgatcatcgtgtcggccgaagatgtcgtcatggtgtccagcaccgccggcgcaaacccttcgcagcgctccatcagctgcgaatagcgcactctgggaaaaatatgatagtgcgggatgatgatcgcattgaccgggaccaatccgcccgtgcggaaacacagctcctctgcaaacatctgagagtgcccgcagccaaacacatggatcaccccgtcatgcatgaccgtatcggtcatgacctgcgcgcaggcatccagcacctcttcctgtttcatcgcctcctcgatctgctcctgcgcgatcgccgcaaattctgcataccgtttcatctttatccctccgttctgcagcatgtctcatctgtcttcattataagatattttccatcctttccacaaaaatttcatggaaaagatggtacaatagcaaagcaggatcgatgactggaggaatttacatgaactatgatatcgtgatcatcggcgcaggtcccggcggcatcttttccgcttatgaagcgatcaaacatgatcccgatctgaagatcggcgtctttgaagcaggaaacccgctggaacagcgccattgcccgatcgacggcgtaaaggtgaaagcctgcgtcaactgccccagctgcggcatcatgaacggattcggcggtgcaggcgccttctcagatggcaagtacaacatcaccaacgaattcggcggcaacctctatgaatatgtcggcaagaaagaagccatcgccctgatggaatatgtggacggcatcaactgcagccacggcggagagcacacccgcctgttcacgaacaacaacacatccatacgcaggaaatgcctggaaaacgatctgcacctgctgcaggcatcggttcgtcatctgggcacggacatcaactatgtggtgcttgagaacctgtatgcagagctcagcgagaaagtggacttccatttccgcacccgtatcgacaaagtgtgcaagagcgcgcagggatatacgctcgtctccgcgcaaaacgaagaatacaccggcagatactgcatcatctccaccgggcgaagcggcagcaaatggatgcagagcatctgtgattccctgggcatccataccgaatccaaccgggtcgatatcggcgtgcgcgtagagctgccggccgatgtcttcgcccatctgaccgatgaattatatgaaagcaagatcgtctaccgcaccgagaagtttcaggaccgggtgcggaccttctgcatgaacccgcacggcgtggtggtcagcgaaaacaccaacggcatcgtcaccgtaaacggccacagctacgaagatccttcacgctataccgaaaatacgaacttcgcgctgctggtgtccaatcatttcaccgagccgttcaaagacagcaatgagtatggcgaaagcatcgcccggctctccaacatgctgggcggcggcgtcatcgtccagcgcttcggcgatctgatccgcggtcagcgcagcaccgtaagccgcatcgcagacagcttcgtcacccctaccttgagcgccacgccaggcgatctgagcctcgtcatcccgaagcgtcagatggacgacatcatcgagatgatctatgcgctggacaaagtcgcgccaggtacggccaatgacgacaccctgctgtatggcgtagaggtcaagttttacaatatgcgcgtgcagctggatcaaaatctgcagacctgccataaagggctgttcgtcatcggcgactgcagcggcgtcacgcactcgctttcccatgccagcgccagcggcgtccatgtggcccgctatctcaccgagaagctgatgaacgaagcataaaaccggcagacagccgcgatgatcatccttcgcgcgctgcctgccgttttcttttcctttccagctccttgttcgggcgctccttcatcaaaaaaggcgcccatgtccatttctcctgcttctctctaagctgccagacacgcagcctttcctcctcttcgcgcacccgcgcctcgatcactttctggcaagaatccaaaccgtgcgcacggaccagcgcagtcagcgcgtagatgaccatgccgatggcatgcgtctcacagtgcacgctgccgcacccttgtccgatggcatgcgcatatgcccccagcacaggatcatcgctctccttcgcgatcgcatgagcagccagtattgccttctttgcctgaggcatgcggatttctcccgccgcccac

SEQ ID NO: 549 - DNA, 32759 bp, Unknown
  16S sequences of unknown bacteria
tgatgcccctcccctccctttcttgctcccctctttattcagttctcagggtatacaccttgtcaagcgttttggagtcgtatggacacgcgccattagctcagttggtagagcacctgactcttaatcagggtgtcccgggttcgagtccctgatggcgcaccacttaccaacaagtctgcggtgaatccgcagttagtttggaaaaatcccgcaagggtttttcaaataggtcggatttatccgatcgtcaatagtcggtgccgatggcggtgggggtacacccgttcccatcccgaacacggcagttaagcccacttgcgctgaaaatacttggctggaagcggcccgggaaaataagcaggtgccgacacaagcagcatccggtataaccggatgctgcttcatattcctccttagctcagttggtagagcatgcggctgttaaccgcagggtcgttggttcgagtccaacagggggagccatagaaaaagctccgaaagccctgggtttttggagcttttttctttttaaaaaaactgacatacatcatcttgaaaagagtatgtcaaaagcattttccaaccgtttttgaggtcttttttcagaaaaaatcctttctgttgtttgcagacgaaatcgttggttcttgataagaaaaaatatgggctggacccactttttgcccggttttttgaaactttagacgtgaataagtacaagatcgaaacagacaatcgaaaataaagatctgacatacatttgcatgaaaaagtatgtcagttttttcatctcatattttgtgtaaattttctttcatgtcaaagaagcgcatcctacccgtttgctaatgggcagaatgcgctttcacaatttatgcaatttcggtattactctgccagataatatttataaagtaacttacagcaattggggcgatgataattttgtatcatcgccccaatttcatatatcacttgatttaggctattcgctttttgtttcgggagcactaatagtgataaaggataaggtagaataagttgcgcaaattgaaaaagggaaaaaggtagtgtcaagctttatgcgcaaattagtttgcagtcaaaagcagaatgaggttaaccagcaaaagaggcatcgtcacatgccacctctaaatgcttcatgttcatatacttcttgctgccccactgagaaccggcgacatggagcagcaagaaatatatgaagcatttggatgcgtcgtttaccgattcttccgctgtcggctgacttttttttcagagctcttttcctttttgcgaaattctcttgacactaccttcggcccacccttttacgggtggttatgactgaaattatgggaacaattttcagatatatattatcgaatattattgttgacttttgtttagtgacgttttatactgataaatgacaataaacaataaggaatgagagctgtgcgggaactgacattcatgcgggatctccggtgtctgcccctgctgcgggatggggttaccgcccgctacgagggcagtatcgacaaggccggcggcaacgcggactgggactggtcactgtatcgggatgagcggggcgaatgggtgctgttcgaccatcagggcgctggctgcgtatacaattttgtgcagcatcggtatccagacagtccggagccgaccttccggttttatttcgacggggaggaggagccgcgctttgtcattcggcattcccagttcggagaggtctacccgttcatcgagccgctggcggggcggtatatcggcccgatagacgggggcccatccgggtggcgcgcagcttcgtacccatgccctatgccaaaagctgcaaaatcaccagcgacatcaagctggagggctgccggcgggagtgcggcgaaggcggctggggccacgtgatttatcacgtctataccgacggccgggaggtggagaccttccgcacggacgaggagggctacaccgcgctggccgcgttctggaaaaggagcgggggcagcgtgatccccttcgagcgggaggagcgggaggagagcggcgtgttctccctgcggcctgggaaatcccgccaggtgtttgccgcctccgtcgccgggctggtatccggcatccgctgccgaaccaggggcttccggcgggaggacgcagccgagctatggctgcgggccgtctgggacgggcacggtcaggcggatttggagctgcccttcggctgcctgttcggcaacgagctaggataccatgggggcgctgcctgctggccggtatgtcggcggaagggtcgtattataacgagatgcccatgccgtataccgcgtcggcggagctgacggtgaccaatcgcggaacgcgggacgttgtttttgaacgcttcaccgtccggcatacgacagagtacgccgacttttatcgggagcatccggccgggtatttccgggccgccccatattacgcccgccggcatacggagggggcggacagcgtgatagccgatattcacggcagcggccatattgtgggcgcggtgattaccggcttcggtggggggccggagggatatgccatctgcgagggagacgtgcgggtacatatcgacggcgtgcgcacgccgcagatcgagagcgacgggtcggagagctatgtctgttatggctggggctttacctccccgccggagtacaatccctccagcggatatgacggccgctcgccagcctccaccgactggtccatggttcggtttatgaccggtgattgctacccgtttttggacggggtgcggtttgggttcgaatcgggagaggacaaccgcaccaattacctggagcacagcggcgcggtgctctattacggccaggacgaggcgcggcggcggcgcacggcggcgctgcgcgtcggggacgatgcctcggagcgggaaaatggctttacctgcgcggacggaacgccggtaacgctgaccagctatttcgagggggacgacgacgagacgccggtgacgctgaccggccgctatccgcgaacgggctgcgccttccggatggacgtacccccgggagcggcctatatgctcctccgccgggtgagcgaccaggaaaagggccggcagaaggcggcggtgttcgtcgacggggagcgggtgacggaatacccctggtatgtcgctgaccacaacccctgcaagcgctggctggaggacgagtttgtgatccccgcccggtatgtgcgggggaaagaggcggtaacggtgcgcgtcgcccccgaggacgcgggggggggcctcacctggaacctgttcgatctgcagatgtttgcggtgctggagaataaaggagagatgtcgcaatgaaaaacggaaagctgtctatcggcctcatcggcgcgggccgggccgggatgatacacgcgcgcaacctgcgggcttcggtgccccacgcggcgctgaccgcggtggccgatccggtggaggcggcggcgcgggccgcctgcgaggagctggagctggagcgctttgaaaccgattaccgccggattttggcggatgaaacggtagacgcggtggtggtggtgacgcccaccaagtaccactgcgaaatcgtactggaggcggcccgggcaggcaaacatatcctgtgcgaaaagcccatggccatgacggtggaggaatgcgcggccatggaggccgagacggcccgatgcggcgtcaagctgcagatggcgttcatgcgccggttcgaccagagcttcatgcaggccaaacgggtggtggacagcggggccgtgggcgatgtggtgatggtgcgctccaacaccaggggccccagcattcccaagccgtggatgtacgatatttccaagagcaacggtccgctggccgaggtgaacagccatgacatcgacaccctgcggtggtttacgggaagcgagtttgccagcctgtacgccatcggcggcaattaccgctgcccggacgcggcggcggattttccggatttctatgacaacgtggtgctgaccgccagctttgccaacgggatgcagggctgcatcgacggggcgcagggggtgctgtacggctatgacgcgcgggtggagatcctgggcaccaagggctgcgtgttcctgggcaaaaccagggagacggcggtgacggtctgcacggcggacatgaaggcggccgaggagttcaccaacagctggaagttcctgttcaaggacgcttatcttgaagaggacacggcgtttgttcgctgtctgctggaggatacgccgcccctggtcaccggccacgacggcaagatggccgtccaggtggtgaacgccggcaatcagtctatccgggaaaagagaatcgtcacactggacgcctgctgaaagaaaagctctaaggaaagggcggcggggggggctcctcccgcagaaaggagattgcgcatgttagccgcgagaatgtataataagaaagacatccgggtggaggaggtgccgacgccggtcatcggggaggacgaaatccttctgcgggtcaaggcggcggccatctgcggcaccgacgtgcggatggtgaacaacggctataagggcatctcgcccgaaactccccgcatcctgggccatgagctcagcggcatcatcgagcgggtggggagccgcgtgacggcttaccggcccgggcagcgagtggcggtggcccccaacatgggctgcggggtctgcgccgactgcgtggcgggcaacacccatctgtgccgcacctacgaagcgctgggcatcaacctggacggcgggtttgccgaatacgtggccattcccgccaaggcggtggcacaggggaacgtgacgctgctggaggatggcgtatccttcgaggaggccgctatcaacgaggcgctgtcctgcgtatgcaacggctttgaacgctgcgacatccggccgggggacgacgtgctgattatcggcgcggggcccatcgggattatgcacgggatgctggcccgcatggcgggcgcgggacgggtgtacataaacgacctgtccgtcgagcgcctggccacctgcaaggccatcgaccccgcctttctcacagtggagggggacatcgaggaggtcatcgcccgggacacccggggcgagggggtgcaggtgtgtatcaccgcctgcccctccccggcggcgcaggcgacggcgctgcgggtctgcgggaacaacgcgcggataaatttcttcggcggcgtgcctgccgaccggcagccggtgccgctggacaccaatctcatccactataagcagctaaaggtatcgggcaccacgcgggccagccttacccaattccgcaagaccctgcgctttatttccagcggcgtgctgaacgtgaagccgctcattacccgcaccctccccctgaccgccatcggccaggcgctggactatgcggcggcggcggacggcctgaaaaacgtgattcttttttaggaggcgggcgtatgcgaccctgtttcatcggttgcgacattggcacccagggcactaaaacggccatatacgcggcggacggggccttgctggccgacagcttcgaggcgtccgtcctgctccatccggagcccggcgccgtcacgcaggatccggaggagatgctgggcagcgtctgccgcaccattcgcgccgccctggaaaagagcggaatagcccccgggcaaatcgccgcggtgggggtggacgcccagatggcggggattcttggtgtcggcggagacgggatagcggttacgccgtacgactcctggctggatacccgctgcgcaccttatgtcagcaccatgaaagaggcggcggaggaggcggtgatccgcctgaccggcgggcaggtgacggtgaaccacgggccgaaaatcctctggtggaagggcgaacggccggaggcctacgcccggatcgcccggtttgtgccgccttccgcctatgtggggatgcggctgtgcggcctgacggcccgggacgcgtacatcgacgacacccatctgcatttcaccggctttgccgacaatccgaaccgccggtgggacgaggggcttctcggggccttcgaggtggcggcggagaaaatgccggccatccgccggcccgccgaacgaatcgggacgctgaccaaggagatggccgcggcctgcggcctgtcggcggggataccggtggcggcgggctgcggggattcggcagcctccgcgctgggggccggggtgcttcggcagggcgaagtgtacgacgtggcgggtaccgcctctatcttctcctgcgtgaccgatcgatacgcccccgatttgcggcataaaaccctgctctttacccgttcggcggcggatgggctgtggaacgccctggcgtatatcagcgggggcgggatgtgcctgcactggtaccgaaagctcagcgccctgacttacaaggaactggacgaggcggcagcgggggccgcgccgggatgcggcggcctgctgttcctgccccacttcgctgggcgcacctgcccgagcgtgccagaggtgcggggaacttggctgggccttggctgggagcacgggacagggacgctgttccgcagcatcctggagagcgtcgcttatgaataccggctgtatctcgatatcctgcgggaatcgaatccggcgctgcgtccggatacggtgaccggcgcgggcggcggctcccacagcgctgtgttcaatcaaatcaaggccgacgtgctggggctgccttaccggccgctgacgggaggcgacaccgccaccaggggcgccgccatcctcgcgggctgcgccgcgggagcttacgcctccccgcaggaagcggccgcggccatccgaagccccgggcccgcccggcttccggaaacggcatacgaggccttgtacggcgagaggacggtcgcttatcggcgcgcgctggagggagcggccatgttataccggagtctgaagaatggggaaggagacgcgccatgaatccgatcggcatctatttcgctttttgggagcgggagtggcagggcgattatctggcctatgtgcgtaaagtgaagcggctgggcttcgacatcctggagctgggggccggggcgctgccggacatgacagcggccgagcggcgggccgtggccgacgccgcccgggaggagggcgtccgcctgacctactgcatcggcttgccgccccagtatgacgtgtccagcccggatgagagcgtccggctggcaggcgtccggtatgtgagcaccctccttgattgcatcggggagatggggggcggcatcctgggcggcatcgtctacgcctgctggccggcggcggaaatgtccattgaccgcaaggccgtcatgcggggaaaggcccttctatccgtacgagagctggccaagcgggcggaggaccggggagtgacctattgcttggaaatcgtcaaccggttcgagcagtgcctgctgaacaccgccgaggaggggcgcgcctttgtggacgaggtggggcatccggcggtcaagctcctgctggacagcttccacatgaacatcgaggaggatcacatcggggccgccatccgggcctccaaggggtacctcggtcatttccatatgggggaatgcaaccgtaaggtgcccggtcggggacacatgccctgggacgagatgatgcgggcgctggcggacatcgggtatgacggcggcatcgtgatggagcccttcgtcaagcccggcggccaggtgggccaggatatcaaggtgttccgggatctcagcggcggcgcggacgaggcggagatggacgccatggcgaaggaagcgctggagtttatacgagaaaagaatcggagggcattcacgtgaaacggataaaaatcgggattctcaccatgtccgacgggcgggaatacctgcacgaggaatacgaggagatgaacctgcgctaccagcgggacattgccgccgcgctggaggccaccggcgattttgaggtggtgcagggacagtgcgccatccataccaacgcggaagcacgcgctgagggccagcggctgcgggatgccaacgtcgaggcgaccattttcaactttgccatctggtgctatccccagttcacggcggtggcgcagaatttcgcccccggcccgtatctgctgttttccaatctgcatccgtcggaatgcggcatggtgggcatgttggcggcggccggcaccctcgaccagctgggggtgaaatacacccggctgtgggggacggtgagcgatccggcggtattccagcggatgacggcgttcctgcgggcggctgcggccgtccgcaggctgcgggggctgaccttcggcaatttcggcggccggcctctgggcatgtacacggcggtggccaatctggagcagtggcagcgcgagttcggcatcgacgtggaaaacgtggagcaggacgacatcatccggaccggcgaggaggagcccgccgagcgggtggaagccgccttccggtggctggaagcccatgtgggagaaatcgcctacgacggcgagggactgacgccggataagctgaagctgcaaatccggtcctattacggcctcaggcggattatcgagcggcgggggctggactttatcggcattaaggcccacggggatctcaccgatcggtacatcaccatggacgtggcggaggccttcctcaacgacccctatgattgggacggccctcacgagcctatcgtggccgccaccgagtcggacatggacggcgcgctgaccatgcagattttcaagctgctgaccggcttcccggtgctgttcgcggacgtacggcactacgacaaggaaaataatgtgtggttcttctccaattccggcacgcacgccacctatttcgcgggcggcagcctcgatccggaggagaatctgaagcacgtgaccttctaccccgagacccattattaccccgccggcggggccagcgtccatcacttcgccaagggcgggcaggtgaccctggcccgtctcgcccgcaaggacgggaaataccggatgaccatcgtgccggcggaattcgtggattttccgcgggagaaggccctggccctcggcgcgacgaccacgccggcctggccctgcgcctttgcccggctggaggtttccgccgacgaattcctgagccgtttcccctgcaaccatatccacggcgtatatggcgactgcgtggaggagctgaaaaccgtggcccgtctgctggatatggacgtggacgtatttgcgtgataaaataggaggaatccatcgtatgaaaacagaactgaccgccgccagccttgccaaatattttgatcagaccttgctgaagccttatgtcagcgacgcggatttcaaggccttctgcgaagagagcgcccggtatcatttcaagatgatcgccatcaattccgcgccggtggccaaatgcaaggcttacctgaaggacagcgacgtgctggtgggcgcggccatcgggttcccgctgggacagaccaccatcgccgacaaggtgttcgagaccaagcaggccatcgcggacggggcggacgagatcgactatgtccacaacatcgtggagctcaaaagcggcaatctcgcttatgtggaacgggagatgcgggagatcgtggaggtctgccgcgccgcgggaaagaccagcaaggtgatcttcgagaattgctatctgaccgacgatgagaagaaaatcctgtgcgaaatcgccttgaaggtgaagccggatttcatcaagacctccaccggctttggcaccccggcccccggcgtggccgtgggcgcgacggtggccgacgtgaagctgatgaaggccatggtgggcggtgaaatcaaggtcaaggcggccggtggtgtgcgcaccctggacgatgcgctggcgatgatcgaagcgggagccgagcggatcggcaccagcgccggcgtcccgattgtggaagaattcaagacgcgctttgaaaagggctgacgcctgataagaaggaggaaaccgttatggctcaggagaatccgcaagtccgccgctctcttgacgaggtggaaaaggcgtattggaatcccggcccctccccgctggacgcgcccctgacgccctgcacaatgctgccggccatccccgcgtgtgaagacgcgccgctgacggcgctgtccctggacggggaatgggagctggcccccgacggatatacaaaggatcgggtggctggagactgggcggacgccatcccggcgcgggtgccgggcacggtgcacaccgccctgctggaacacggcgatattcccgatccgatggtgggcaggaacgacaagctggccagagagaacagctaccgcgtgtggtggatgaagcggcggttttccgccgcctccctggagggggagccgacgctgattttcgaaggggtatgctatcgcgcccggttctggcttaacggcacgtatctcggggagcacagcggcatgttcggcgggccgacatatccggtggggcatctgctgcgtgaagaaaacacgctggtcgtccgcattgagaacgcgccggccgaccccatggcctattcagaatacgcggatcacgacgagggctggaaaaacggcgtggtcatcaactgcgtctacggctggcattacgcctgcatccccacccggggcatctgggattccgtgcggctggagggcaggccggctctctgcctggagcggccgtttgtggcggcccggaatccgcaggcggggctggcggacatctgcctgcccgtgacaggcgagggggacgcggtgttcaccggcgtcatccggcccgtgaatttcgagggggagagttgcgccttccgcgtggagggggccggagggcttctgcacacgcaggtgtccatccccgatccccatctctggtggccgaacggccacggtgatccctgcctgtatgagcttcaggtgctgatggaggcggggggcgcgaggcagagccggcgggtcacctttggcctgcgcaccatcgagatggccccgctgccggaggggccccgcgaagaccggcacaactggaccttcgtcgtcaacggcaagcccttgtttgtcaaaggggtcaactggtgcaccaccgacgcgctgctccgctgcccgcgggagcggacggagcggttcctcaccctggccaaggagcagcacgtgcagctgctgcgcgcctggggcggcgggatccctgagagtgacgatttctacgacctgtgcgaccggctggggctgatggtcatgcaggaatggcctacctgctgggacagcgacaagcagcagccccgggaggagctgctggagaccattcggtggaacatcccccgcctgcgcagccatccgtccctcatccaatgggcgggcggcaacgaatccccccaggcggacggggagaccatggaagccatggcccgcctctgctacgagctggacggcagccgggcgttccaccgcacctcgccctggggcggctcgatccataactacaacacctactgggccatgcaggacatcgacgccaccctgcagctgaaagcgcctttcatgggggaattcggcatggcctccgccccgaacctggaaagcgtgcggcggtatctgccccgggaggaatgggacgagtgggatgtgacggcgaaaaatagcttcaactatcacacgccgcgcttcaacgaatggccgggcgatcccgatatgaaccatctgctcaagagggtgccggaattctacgacgcggacaccatggcgcatttcatcatcgccacccagctggcgcaggccacctgcatccgccacacgctggagagcttccgcgcccgctggccggaatcgaccggtatctgctactataagctgaccgacgtgtatcccgcctgctcttggtcgacggtggattattatggcgtgcccaagcgctcctactatgtcctggcggacagctacgcgcccttgcacgcctgtgtgaccacggaatcgacgacgctgacgccgggcggggcgctgccggttttcctgctcaacgatacggccgagcggggcgactactgtgtgaccatcgcggcctatgacgcggcgctgcggccggttctgcgcaagagctttgagacggacggcgcagcggcggtgatccggctgggcgatttcgcgccggacgcgggcgaaggccccctgtttatcacggcggaggtacggcaggagggggcactgcgggatcgcaccttctactggttcaattacaaggatcagtccggctgcctgttcgatcggccccgcacggcgctgcgcgtcgctgtgaaggagggggcgctcactgttaggaacgacgggacgctgcctgccgtcggtgtgacggtggaatgcccggagcacgataccgtcttcaccgcggaggacagcctcttctggctggagccgggggagaaccggacgcttgcagtcagccacacggagggcctgcgggtttccgcctggaacgcggatacggtaaacacataacgaaagcgaagggaaggggatccgcatggaaaaggaaccgctgtttgcgcaggagagacaaaaggagattctcgcattgttggaagccgagcagaaagtgctggtgccccagctgtgccggcagttttccgtgtcccccgccaccatccgcaacgacttaaacgatctggaggcccgggggttgctccgccgcactcacggcggagcgatcccgctgagccggaccggactggagctgacgacggcgcagaagaccgtacgccgtatggcggaaaagcaggccatcgccgcttgtgcggcggcaatggtggaaaacggcgagaccatcgccatcgataccggcaccaccaccctggaactggcgcgatgcctgctggcgcgcaccggcctgacggtggtaaccaacgacttgaaaatcgccgcgcttctggaagagcagtccgacgcgacgattatcctcatcggcggctgtgtgcgccgtggcttccactgcaccatcggcccgctggcgatgcaggggatggcggaactgcgggtggatcgctgttttatggccaccaatggcctgaccgtccacagcggtatgaccacgccggatatcggtcacgcggaggtcaaacggcatttgctgcgcatggggcagcaggtgattttgctgtgtgacagcgaaaaaatcggaaaggacagctttgccgtggtggaagggctggaaagcgtggatgttttgataacagacgcgaagctccgtccggaacaaaaatcggccttggaagaggctggcctggacgtccggatggccccggaaaaccaatagaaattgaaaccaaggcccctgccgccatgactgcggcaggggccttggttatttccagtccgccatgttggagtgctgctgccgaaagcgggagggggacaggccgtagtattttttgaaggtggcgacaaaatggctcatgctggtgtagccggattttagggagatggttaggatgtcgttgtcggaattgcgcagcaggttggcggcgtaaaccatgcgtagcttggtaatgtattgattggggcacctacctgctgcttcatgattcggcacagatggccgtggctgaagccggacagacgcagcagcgctggcacgcccgcctccaggttttcctgggcggtcatctgctctaggatacggtgcagccattcgttatagtgcgttccctgcttgaactgcgcgtaccggatgcaggtgaccagtgtttctaccagcagcatacgcagacggatatacagctcggcgttattgccgacgtagaaattcaaaaagctgtgatccgtgtccagggtgcagtcggcaaagggacggatgttgatcttcggcggataaagcggagagagaaactgctgctccatctccttgccgagatactgacacgctgcataaaaatgatgtgcggagaagctgacgttgataagctcacattcggtcttccgattcagcaaaaataataaaatcacaaaaaagacttgcaatttgagaatcggagtgatataatatcgtctgcgagttgaaagcatggttgtaaaaaacctataggctgctgcggctcgcgcagcgagacgctggagtcattggactggtctccagaagaatactttagttggtgtcgatggcggtgggggtacacccgttcccatcccgaacacggcagttaagcccacatagcgtcgaaaatacttggctggaagcggcctgggaaaatagacagatgccaacactaaaagcccgtcgaagtgattcggcgggctttttactctggtagagtttcgcgagtacacctgtttccatcccaaacacgacagtagaagaaccgtgagcggaacattgcgtagaagatactgatccggggaaatacacaaaagagcccgctgtggatgtgcagcgggctcttttgcagctctggaagcatattttcttctgaggatggaaacacaggctgaagaaattgacgggaagcggcgctggaataggtagtcagcggtagtatgggatgtacccatttatcggcagccttaagggagcagaggcgcaggaaggcctatatttccgtatgccgcattattaagctgttgattttctggcttttgctggagttgaattttgcactttttgagcgtgctcggttacaactcggacagcttagagcgtgcatgctaaacggcacgtcgcgcggttttttgtttgggttatcccaggatgacgggtagcgcctccagcaaatcaccgcacatggtatgacacagacaggtcacgccgctttggcggatattgccgccctccatgccgatacaggggaagccggccaaccgggccgacaccacgcctgcggaggaatcttccatggcaaagacactttggctgtcccagcccagccccaggccgacgcgggcggtttccgcgtagagccatggatggggttttggctccagctccccaagggttccaacctgtccgggacccagggctgtgccggcggagatgatggcgtcgtagaagttcagcggatcccccatccccagggtacggaaagcggagacaatctccggcagagctttttcggtcagaccactggtaaccagaccgattttaacgtccgcttgtttgagagtggtaagaaactcctttagatgaggggcgggggtgaaggcgccttcccggccacggccgtgcataatttcgtccatttcccggcgggtgatactgaaatacgcctggcgcgcctcttccacggtcttatccggacaatatttatctaggcagtactgcaaatgctccgataccgagtgaccggaaacaaagggcagatcggcatcttccagggaaaaacggggattgtcgagaaggagggcgacactctgctgaataatccaaatccagaagctctcggaatgcacggaggtgccgtccaagtccattaacaccgcccgggcgggaagatggcagcaaggccgccgcaacgggtacaccgcagggtagccgagggaggagcggacgtggcagtcgacatgatttgcgtacacaataaagtccaccttttgatccgccggagtgtaaatcgcctccacgccattttttccggcgcaaaaccggccgtcggccgcctcgcttgcctctatgagctcccggcggtaatcgttacccagcacatcttccattcgcatatctattactccttgtttacaatatggcgcggaggctcaaaaagcctccgcgccgttttatggtgtgtctattcccggacggctgttgtttcgccttcgatgagccgcgcctccgctttaatggtatccggcggcatggtgggatcgctgaggcggcggagcatggtttcggaggccagtttgccaatcccataaaagttctgggctatcgtggtcagttgcttattgtctggaagctgaatacccaagccgtcgaacccgacgatgcccacctgggacggagtgcggcagcctagcgaaagtaatattttgtaaatacggctggcgaaatagtcaccggtgcagaacaggccaatgcgctggcctttatgcttatccagaagctgttggataatatcggtgatatgggcgacatcctgttcgggataggtaataagaatgtgattaaaattcaccaggcctttatagttctgcacgacctgacaatacccgatataccgttcccggatcgattcgttgtagttgaggttgacatccgacaggaagtaaatcgtgtcatagccacagtccaccagatgcttcgtcgccatgacggcgcccttgacgttatctgtacgcacgcagggcaagttgataccaataatgggctgatccaccaggacaaaggggtaatcgcccatgaacagctcgtaaatctcgccctcgccgcagtccatgacgtccttagccacatacgcaatgatccccgcgcttaaggaaaattttacggccttgatggtttcgataaaatcctcgccgttatccttgcaatagtggatcatggtgaaaaagccgtgctggctcagccgcttttcaattccttttaagatgttcatttcgtctagacgcgccgtatcccggtattgggcaaaggggaggacgacggaaatgatgttggagccctgctgggtggcggctgtatagccttcgttgacaaaggtgccgctgccctgcacccggtagacgatccccatatcacgcagtctatcgagcgcctttacaaccgtggggcggctgacgtcaaactgttcagacagctcctgttccgtgggaagcttggcattctgctggtaaacatgattttgaatttgttcctgtatgtaatccatgatctcgcgatatttgggaatggtctccatgacaacccctcactttaacgaaattgacttatcgaattccttagtattatcataatcctttttctgtgaattgtcaattacttttaaaaaaatttgcatatgggcgaagtttatttggtaagcaaagcggaaatttgacaacatagtgaaatggaatctttaaaaatgtcatatgttagtcaaaataactaaaacgataaaataaatatgataaatcatatgaacctcaaattttccacataataaatttgataaggctattgaaaacgcgaaaaaaagaagctatactagaaacaggcaaatgccttgacgtaatttatggaagatgatgttaaggtatatgggatctaggtattatttgcaaaaccggtatagcgatttccgctgattgctctcggctttggaaagttgacaagtcaattgggcggcaaaggagggacttgacggcatttgtacggaaaggcatcgtatggcggtttaccgattatcaagagaaaggtgtatgagaagacatggcgaaaagacaaatttccctgttggcgtccctgagcctgctgctaggctccgtggccgtcatgacctttactcccgcagcggccgagggaacgccggagggctatacggcaaatccgacgcagaaaaatatccttttggaagagggccagtactataaggagctcacgggctttgaagggacgggaattcgtcaggcggatattgacaggaaatccgatggtgaactcctttacagcacgttgtcaccgaacaacggctccaagctggcaaaagtcgtccacaccaaaggttcttccggagagaacagaaatattatcaaaatattctgcatgcagtttgataatccggatgtgggaaaggattggtcccaagcggcctacctgcaaatgtatgtccgcaatccgaatgccacgccggtgcagctgaacagcatggattatcgtttggcttctgcggatggaaccaaagtttctatgaaattgggagcgaaagtcaaattctacgatttgaaggataaagcgtggtcggaaatcacggtgacgcagtctgcatcgccggatgtcacgaacacatgcgtcgagctgcctggcggcgcggaaggaatgctgaggattccgctgaacagcgatacatacgcgggataccaggcctcgggcatgaccaatgtcagccgtttcattctgtatgtacaggctccgcctgtgtcagccgaaaattttaccgttttcatcgatgatcttggtttgatagcggaggatgagaaggagcccgccctcccggactacacggcggatccggacttcgaagcggctttgctggaagggcagaccgcccggctgattcagagcttcggcgcccagaccctggagttttcgggggatttcagcgtggccaacacccacaagaactttaccgtacagtttgccggggataagggtgcacaggagcgcagcacggccaagtatatccagttcgaggtggaaaacaccgctgatgttccgctggatttgttctttatcaagattacggcgccgggtaccgggtatgatcgcgtgttgactcttggcgattcgggttcggccttttacgattacggtacaaaaaaatggtcgagtcttacagtggggaaagcgcagctttacgaagcccccggtttgtccgtgcccgcaggctcgaagggcattctgcggatcccgctgagcatcctgaccggcggcaatgtggacaacgacaactatgtgctgaatctggataccagcactctggaaatctacgccaacaccccgcatgcgacggccggatccacggctacctttaagaatctggccctggtggccggggcggacaatgtgttcccttccgacgagggggaacccaccgacttcccctttgtggagaatccgggcaagaacgtggccctgcaggatgagcagacctacaaggagctcaacagctttgaaaaggagcagggcgtgaccttcggctgctcggagaacgcggctgtgggagctttctccggcgagggcgctaagaacggctccaagagctacaagctgacctttaacaatgggggcgccaacgccatcgccttccccaattttttgcccgaggcgcaggccaacaccgactggtcggaggccaaggccgtacagatttatatcgataatacggcggacaccaatgcgattgtcgaggacatcaagttcaaggttggcgataccccctacaagctgaaaagagaggcgacggtatatttcgccgacatgtcggaaaacgcctggagccagctgcccatcgttgacggcgggaaccctgcgtatttcggcgtggtgattcccggcaaaaccaaaggcttcctgcgcatcccgttgaacgcggacaattttgagaatttcggcgaggcggatcggacggccgttaccaagatggagctgttcctccagatgcccggctgcctcaagaactcggtgctgtatctggatgatttcggcctggtggccggtaaggataccgagcttgtctcggtggacgactatatcaagacggacgatgtcaagctgaacacgggagagacctacaaaccccttacgggttttgaggatggcgacaaggctggtcttgcccagaacgaccccggcaatgtggaggtcagcggcgaggctaagaacaacggcgagaaatccctgatggtcaagtttgtggatggtaccgccggcgggttccggaattttgccatcaacacctccaacgtgaaaaccagcaactggagccgtgcgaaatacctccagttctatgtggagaacgcctgcccggcggggacggattcgatgcagctgttctacatccaactcaacaacggcaacaaaatgctcagcggcgatgccaccggtttgaagctgtacgatttggccaccgaaaaatggagcgacctgccggtggtcggcaattcggatcacgtgctggccggcacccagaccaaggtgcccaccgtgcgtatccccgccggcttcaaagggtacgtccgcatcccgctgaccaacgagaatttcaccaactgcaccctgtccgacgagctgtccaacatcagccggatcgccatgttctccctggtgaagggagtcgccagcggctctaaagcgtatttcgacgactttggcctggtgacctacgacggcgacaaggctcccgattatgaggatggcgtggcgcccggcgaggacgacgaatacgacgatgtggtaacccattttgatctcagcggcaccattaccggcccagacggcaagccgctggccggtgccaccgtgaccttgaacggagagaccgtttacaagaccaacagcaagggacagtaccggttcgacggcctgcagacgggcctgcttgaactggcaattgtcggcgcggacggcactgactacagctatgtgactgtggaggtgctcaccggcgccaccacccatttcactgacaccaatgtccgtatcgcccacgacgccgacggcttgactatggatttcaccatcggcgagctgggcccggagttgacggcggtggagaccggcgtctttgtccctgagaaggacggcggcgacaataccgtcagcgacggcggcgagagctccgacggcaacaccccgagtcccggtaccggagaggccggaaaaaccgcggcggcggcgttgctgctgctgggggcggcgggctgcttcgttttctcccgcaagaaggcctgaatcacggaagataggagaattgctatgaaagcatacggcagaaaagcgaccatattggcggccgtgctcgcgctgttcctcactgcggccgccggctgcggcgggaaaatcaacgaacccggcggcagcacgagccctgtttcccagggggcgtccgacgcggagtcgggcgcgcccgtagaatccgacagcagcgatgccaccgatccgacggggcaggacgcctccacacccagcgacacggcgagcgggaacggagacagcaccaatcccggcggcaacgccagcaagcccggcggcaacaaccaggggcataccgccaccaccacaaaaggcggcgggggcagcagcttcaaggagccggtttatgatttgaagggccgggtcatcgttatcggcagcgaaagcgtgccggacatgagcaaaaccaatatctataacgagagcattaagctgacccaggaaaaataccattgcaccttcaagttcatcaaaaaggaatacgtgtccttgtatcaggatttgatcaacggtcacgcggcaggcaaatccaattacgacgtggtgaacctgcggggatacgaaatctttcccaacgcggccaattccggaaccatactggacgtcagctcctattacgatttcgcgggcgatcccacctggcaggaaagctccgtgaaggacttgggcgtattcaagggcaaacggtacggcatcccctattcgcccaacgaggtgggcaacggcatctggtacaaccgggcgctgctgcgcaaattcaacgtgcccgacctgtggacctatgtggagaaggacacctggaactggcagaccttccgcgccgtctgcaaaaagctgacccaggacaccaacggcgacggcaagcccgattactggggcttcacctccagcgatccgtggctggaattcgtatattccaacaacggctccctgatctcctccggcgtcaacggcacgcccaaaatttccctggattccaagaacgctctggacgccattcaatttattgccgacctgcacatgatcgacaatacggtgccggacggcaaagagctgggcgccatcaccgacaagcctttcaatgccctgtttaccggcaaggtggccatgtatccgtatcacgcccgctacggcgcggtgatggagagcatgggcattccggcggcggacatcggctgggtttacatgcccaaggggccggcggccaagagctatgtcaccgcgagcggctctatgcccgatatgtttgtggtgccgcgggatatttccaatcccaaagaagtggtggcggcgattcaagatgtggccgcctattgggataccagccgcaaggtgcgggtggatatgtacggtaagacggaagagctgtatcaggccctgaaatccagcctggacgccaacgccaagaaggtgctggaataccaggccaagcatccggtctacaccctggccaacaactacaacctgagcgaaaccctgcagaacgagctttggcccgctattctgaacggcaaatcggtcaagagcgccgtggacagcgttaagtccaaaatgcagaccgaactaacgaaaaagtacaacggcaccattgtaaaataatgggcctgcgcggcagccatccatgcgtacccggcgggaattccgccgggtacgcgatccgctgcggagctgcgcggcggccggcgctcctttttcatatccgttgtattatgcggaaaggacatggatcgatgatgaaaaaaccagcgatacggttcggctgcgcggctatggcggctctgctgctgttcggctccacagtggctgcggagccggcgggcagcgccgatccctccacctactacgaatataagcagacctacaaggacgcggcccggcctgacgaagaaatcgtggtgaggggcagcgattacaccgatacgaatgataaggccctgaaggtgctgcccgagctggagggcgtcaaggacgtcctggccacgggaagcgaagggtttgttgaatgggaatttgacgtccggcaggccggactttatcatatcgccctgcggtattgcccactggagggcaagggcaatgccatcgagaggaacatccttgtcaacggagaggttccctatgacgacctgtatgccgtttctctcaaccgggtatacaccgccgctgagaaggaacggcagcgggacgagatgggcaacgagctgcgcccggtgcagatcgaggcgccccggttcgaaaccgtcacgctgtccggctcgttgttcaatgtgtcggagccgctggctgtctacctgaaggaagggaagaatacgctgcgcctggaggcggtgcgggagcccatggccctggacagcatccgcttttatcagaaaaaggacgaggcgtcctatgcgcaggtcagcaagggatacaccgccggcaaggcggccgaaaccattcatatcgagggggaagacgccgcctttacgtccgacaaaaccctctatgccaccagcgacaattccagccctctgaattctccggtatccggcagccagattcggatgaacatgatgggggggatcaactggcgctcccccaggcagtacatcgaatgggcattccatgtgccggaggatgggctgtacagcatcgtgatccggggcaaacaggactacaatcccgggcagatcagcagccgccgcctgaccatcgacggcgaggtgccattctatgaggccaatcggctggaattcccctatgccctgggctttcagaattatgttctcggggatggggacacggtgtttcagtttgaactgacagcgggagatcataccctgcggctggaaaacaacgtggggcccatcggcgatattctggaacgccttaaccaggtggtgggccggctcaacggcctgtacaaggatgtgttcatgctgaccgggtcctatccagacgccgatcgggattacaacatcgggctggcgctgccccaggcggcggagcaaattgccgccatggacaaggatttggagaccatcaagcaggattatctggacatggtgggcaccaagggcgacggctacggcgacatggagaagatccaggtgcagctgcgcagcttcatcaaggacatcgaaaccctgcccgcccggctggacgctttccgcatcaacatcagcaacctgtcctcctggctgctgtcctccaccgatcagcccctgctcatcgataccatcgatttgattccggcggacggggacaccggccgggcggaggccggattcttcggcaagctctggtatgatctaaaatctttcttcatctccttcttcgtggattataacgccatcagcgagggcaccgagggcggcaataccgaggccatcaccctctggctcggcaccgggcgggatcaggcgcaggccatcaaggccatcatcaacaacggcttcaccccgcagaagaaaatcggcgtcaatatccggctggtggatctcggcgtgctgctgcccgccgtggcggccggccggggaccggatatcgccattacgctggatcgctcgctgcccatgaactacgcctaccgtggcgcggtgcaggagctgaacgactttcccggcttccaggaggtcatcagccgcttccatccccaggccctcaccgagtttcaataccagggcaagtattacgctctgccggacaaatacaccttttacatgatgttctaccggcaggacattttaggggaaatgggcatcgaggtacccaagacctgggacgatgtgtatgagctgctgcccaagctgcagaacaagcatatgggcatcgggctgccgaacatcgaggaaaacaacatcgacatgttcaccacgctgctgtatcagcagggcggcacggtctacgacgaagagctgaccaagagcgtgctggacagcgatccggcgctgaaggccttcaagcagttcaccgatttttacaccaagtacaaggtcagcaagaagctgaaccatctgacctatttccgcaccggcgagacacccatcgttttcatgccgtataccttctacgccaatctgcaggccgcggccccggaaatcaaggggcagtggagcttcgcccaggtgcccggcaccgtgaaggaggacggcagcgtggacgccaccgtgtccggtacctccaccggctgcgtcatcttcagcaacagcgcgcacaagcaggcggcctgggaattcctcaagtggtggaccgacaccgaggcccaggtggatttcggcacggaaatcgagagcatccagggcccctccggccggtatcccaccgccaatctggaggcgctgcggatgctgccctggtccaatgccgagctgcaggccatcctcagccaatgccagcacacccaggccatgccggaggcgccgggcggctatatgaccagccggtatattgtcagcagcgccatgattgtcatcaacaacgggctggtgccccgggagaccatcatggattacaacaaaatgatcaacgacgaagtgcagtccatgcgcaagaagttcgggctggactgaggaaaggggatggcaagcggtggcgaaacctcatctcacctatttgaaaaagaattaccagggatacttgctgatgctccccttcctgctggtgtttttcaccttcacggtatggccggtggtcatgtccatggggctgagcttcacgacctataacgtctttgaggccccgcgttttttgggctttgagaactacgtcaagctgtttttcaacgattcggtctttttgaccgccatgcaaaacaccttcctgctgtccatcatcgtggggccgctgagctatctgctgagtctgttcctcgcgtggatggtcaacgagttccggaacccctggcgcaccatcctgacggtggtgttttacgcgcccaccctgtccaatgcggtgtttaccatctggctcatcgtctttgacggggacatttacgggtatctcaacagcatcctgctgaaaatggggctgataagcgatcccatccagtggacccgggatcccaagtatatgatgatggtggtcatcatcgtacagctgtgggtcagcttgggcacctccttcctcaccctgcgggccggtttcaacaccgtagatcgccagtattacgaggcggggagcctggacggcatcaaaaaccggtttcaggagctgtggtacatcaccctgcccatgatggcgccgcacctgatgctcagcgccgtgttggccatcaccgccaccttcaccaccgccaacgtggccaccgtcatgaccgggttcccctcggtcaactatgccacccataccatcatgcatcacctgcaggattacagcaccatccggtatgaacgggggtacgcctcggccattgccaccgtgctgttcctgttctcgctcttcgccaacaagctggcgcagaaattcatcggccggatcggcaaataaaaaaagtcaaggcccccacttgaataggggcataaaattccacaggaattttgagcggggatatcctccccgcgctggacgggaaaggatgacagtcccctatgaaattccctaaaaacccccgccgggcgaagctgctcaaccggagtcgggcgggcaatgtgctgatgttcctcttcctggcgggctttgccgtgtacagcgccctgcccatcctgctcatttttctccaatcggtcaagccgctcaacgagctgttcatctacccgcctcggtttttcgtgatgaaccccaccttcgacaacttccggcagctgtcctcgctgatgtcttccacctgggtgccctttatccggtacatattcaacagcgtttttgtttcagtgacgggcacggtggggcatatcgtggtggcctccatgtgcgcctacccgctggccaagatgaacctgaagggcggcaacgtgattttcaccatcattgtcacctccctgatgttcgcccccacggtgtcggacatcatcaattaccagaccatctccaccctggggatgctggacaattatctggcgatcatcctgccggcgctgggaaccagtctggggctgtatatcatgaagcagtttatgtcccagattcccgatgcgctgattgagtccgcccatatcgacggggcgagtacctttacggttttctggaaaatcgtgatgcccaatgtcaagcctgcttggctgacgctggccatcttctccttccaggggctgtggaacaacgccaacaccacctatatttaccgggaggagcttaaaagcctgccctatgctctcaaccaaatcgtgggaggcggcattatccgcgcgggggcgggggcggcggtcagtgtcatcatcctgatggtgccgctgctgctgttcatcttcacgcagagccggattatcgagaccatgtccacctccggcatgaaggaataacccgtccgattactgtaaaggaacatggcgtatgaagaaattgcttgcggttttcctgtccctgctgctgggcggcgtcgggagcttttcctgcctggcgttcgtgccctacgacagctatacctattccacccagacgggtgaggcggtggcgcagttctgcccgacgccctattatccggccttcaccatcgacaaggccgccatcggtgtcccgctggtgactcccacctgcatgtgcttcgacaaggaaggcaacctctatatcaccgacagctctgccaaccggctgctggtgctggacaaggagtataggctcaaggccagcatcgacaccctggaggatgaggagggcaacttcgaattcctcggcggaccggaagggattttcgtaacggacgacggcagcatctatctgtgcgacaccaagcaaaagcggattctggtgctggatcagagctacaagctggtgcgcaagtacgaaggcatccggccgctgggcgagaaccaggaggactacatgttcctgcccacccgcatcgtggtggacgcatccgggaacatgtatgtgctggtacagaacgaataccagggcatcatgcagatcgacagcgacgggcgcttcatctcctttgtgggcggcaacaaggtgacctacgacccggtgaccaagctgtggaagaaaatcatgagtaaggaacagcgggcgcagctggagcagttcctgccggtggaatacaccaacctgtcccaggatggggaggggctgatttacaccgtttccaaggcggacaacagcgaccccatcaagcggctgaacctgtccggaaaggacgtgctcatccgcaacgggtacaccgacgttatcggggacgtactccccgccgggacggacgagaaaacgacgggctccctctttgtggacatcgccagcgacgcgagcgggctcatctacgcgctggatgccaaccggggccggattttcgtctacaacaacgagggctttctgttttatgtgttcggtggcatcggcacccagctgggtaccttcgccaccccctcggccatcgaggtaaacggcaccgacgtgctggtggcggatcaggggaatccccgcatcaccgtatttcgccggacggcctacgcccagatgatttctgaggccgacgaggcctacaataccggccggtacgacgaaagcgtggacatttggaacgaggtcattaagcagaattccaatttcgagctggcctacacccagataggaaaggtttacctgcgccggggccagtacaagcaggccatggactatttcgaactgggcaatttccggggagacaaaattaccaacaccaccggctataacaaggcgttttccgaattccgcagggaaacggcggcaaaatggctgggcccggcggttatcactgttgtggcgctggccgcgggctggtggggctggcgcttctggcggcggaaaaagaagggaacgaacaggggggagaaggcgtgaaggaaaaagtaaaattcgctttccacatcctggcgcacccctttgacggcttctgggatatgaaaagggaaaagaaaggcgatatccgggtgtccctggtcattctcgccctggtggtggtgaccgatatcctatccaagcagtttacggcgttcctgttcaaccccgataaattcgcgccgatggacgtggtgttcgaggtgaacaaaatcctgctggtgtttctcctgttctgcgtgtccaactggtcggtgaccaccctgatgcagggggaggggacattcaaggacatcgtgatgatgaccggatacgcctgcctgccgctggtgattatccccctgccggtggccattttgtccaatctggcggcttattcggagcaggtatatatgaacgcggcgctgaccgtcgcgtacctgtggttcttcggcctgctgctcgcgggcgtgatgaccatccaccagtacaccatcggcaagatgctgggtacggtgctggtgaccatcgtggccatgctggcgctggtgttcatctgcctgctgttttttaatctgttcagccagcttgtcggttttgtatactccctgtacaaggagctggcactgcgcacgtaacgtctacctggatagaaaggcgggggcaaccctatgaggataacaagaaaactgggcgcggtgctggccgcggcggcgatggcggcttctctggccgggtgcggcgcggggaaggaaacgctggatttggctgcctatcggacgcaggcggacggattctccttcaccaattaccccggggaaaccgtgtacgccgcgcagccgcaggaggaatacgccgccttgctggacggatacgaggccgtttgcgaaagccggttcctgaccctttacgcagataaggcccgcgcggcggtggcggtgagcgaccgccgcacggggcgggtttggttctccaacacgccgactatcgacgaagacacggaaatcgacgaggacgcccgcaacctgttttacgcccagctgctggtggaatatctggacggccagaacttcaaacagatcgacagctacaacgcctccgtcgcccaggggactttcgatatgcaggcggataaggacggcctgacggtaacctaccatttaatggacaacaagaccgcggacaccgatggccagaaggccgagctgttcaccatcaccctgcgctacgcgctggaggatgaatccctgattgtccgggtgcccatggccgaggtggcctgtccggcgggtattctccccctgaaaatcgcggtgctgccccatttcggcggcagttccgccacggagggcgggtatctgctggtgccggacggcagcggggccctcatcgagttcggcagcggcaaatattccaccaccagctatgtaggcagcgtctacggcttcgacaagtccctggaggtcaagagcgcgagccccaaagtccagcaggtgcgcttgccggtgtttggcgtgaaggacggggacgacggcttcctggctattctcgaggacggggcggccctggcttccatccatgccaaccgggcgggaccctacagctctttcaacgaggtgtacgcgtcctttgccacccatgcgtatcaaaacgtatccatcggcgccatggaaaacgccagcaagcttatcggcatccaggatatcgcctatcagggggatttgcggctgcggtacgcttttctggacagcgcgcaggccgattatgtggggatggccggttattaccgacagtatctgactgaaaaagacgggctgcagccgctgaaggcgggggagagcctcccgttcaacctggagcttttgggggcggtggataagctgaaatccaccttcggcatcaagtaccaggggatggagagcctgaccacgacagagcaggcgatacaaatcctggaggagctgcaaggacgggggattaccaatattcagctgaaatacagcgggtggatgaacggcgggctgcggcaggatctgcctgcctccctgaaggtggaaagcgccgtgggaggcaaaaagggactgaccgccctgcgggattatacccgccggacgaacgtgggtctgtatccggccgtaaatttcctgaccacaccgccccaggcgaaagggtttaatgtcttccgtatggcagccatgcaaatcgatcagaaggacgccaaggcttattactacgatatggtgacccgcacgggggaggattacgacagcatcctgtccccggccgccctgggcggcgtggcgcaatccttcaacaaggcctacggggctctcggcatctccggcctgtgcctgaacgacatgggagagaacctctacgccgactataccaagggggcccccatcgaccgggaaaccgcttccaatattatccgccggctgctgaaggatcaatttgccggatacgattcgctgatgatcaccggcggcttcgcctatatgatgccgtatgccgacgtggtgctgaacgccccctttaccgacagcggcttcgacatgaccgatgaaacggtgccgttctatcagctggttttccacggctacgcagcctacgccggcgcgccgctgaacctttcctacgatttcgaaaccgatttgctccggctcatcgaatatggcggcacgccgtatttccagctgatggcggcggatggctcggcggtgaagaacacgtcgtacagcatgttctgttcgagcagctacggcatctggaaggataggctggtgcaggcctaccaaacggtcaacgaggccctggccccggtgcagagcgcagccatgaccgggcaccggaagctggcggagaacctataccgcaccgactacgagggcggctggtcggtttacgtcaactatgggagcgaaccggcccaggcggacggcgtaaccgtgccggccaggggctacagcctgcagcagaaatcggcggcgtgacgccacagaaaggaactggccatgaaaaaacgcaacctgtccttaatgcgcaagcgggggctgatgggatacgcctattgcgccccgtggatcctcgggttcctgctgttcttcctcacgcccgtggtgaaaaccgccatttacagcttcaataccttcgacaaggtcacgctggacgccacctttgtgggcctggccaatttccgccacgccttcacgggggacggacggttcccccaggagttggtagcttctctggtgaagatgaccgatgtgccgctgatactgattttctcctatttcgttgcgctgctgctgcgcaagaaattccggggcatcggggcggtcaagaccatctttttccttaccgttatcctgtcctccgacctgtttttgcggatgcaggattcggtgggggcggttaacaacgcccagatgaacgcctctatggaggagagtcagcagattttcagcgcgctgcaggccattgatatcagtcggtatttcaccagcctggggattgatcccgcctggatgaactacatcaacgacgccatcagcaacattttcttcatcatgatccgctccggcgtgcagattttcattttcctggcggccctgcactccataccggaatccatgtacgaggcggccaacatggagggttccaccgcctgggagagcttctggaccatcacatttcccatgaccggtcctatcatcctggtcaactgcatttacaccattgtggattccttcggctcctttctcaacccggtggtcaactacatcaattccatttccttcagccaattcgaattcggctattcctcagcgctgtcctggatttatttcctatgtatcgcactgattatcgccgtgatttacctcctcttccgcaaaaagattttttatcaaacctgacgcccgaatcctgcgaaaggaatggtcaagcgcatgaagaacttcgccttaacagacaaaattgccgtcagcccccgggcggccgcacggacccggaagctggcgggaaagggtatacaggggatcgtcaaggctgtgtttctcctcggcttctg

SEQ ID NO: 550 - DNA, 29107 bp, Unknown
  16S sequences of unknown bacteria
atcccctatgcggaggccatcgtcaagaaccgctacgtcgggcgcacgttcatccaacccacgcaggagctgcgcaacatgggcatcaagctcaagctcaaccccatgcgcgcctcgctcgagggcaggcgcgtcgtcgtcatcgacgacagcatcgtgcgcggcaacacgtcaaagcagctcgtcaagatgctgcgcgacgcgggggcaacggaagtgcacctgcgcatcgtctcgccggaggtcaagtggccgtgcttctacggcatcgacaccgacacgcaagaccagctcatctcggcaaacaagaccacggaggaaatctgcgagttcaccggcgcggattccctggcgtttctgagcctgggcggtctcgtcaagaccatcggcatgcacagcggcaccgacggccgcgtgctcgaccccggcacgatcgggattcccgtgcacgagtgcaagcgcgcggactgcgccgacgccgagttctgcacggcgtgtttcaacggcgtgtacccggtcgagattcccgagaagttctcgcggggcagcttcctcgaaggaaacgagcccctggtcaacggcgatgccggcattcccgacacgtcgcttcgaagcatcgactaacaactaggcagcgaggaaaccatggctgaacagatcacctacaaagacgccggcgtcgacatcgacgagggggcgcgcgcggtcgacggcatccgcgccgcggtcaagtcaacctaccgtcccgaggtcatcggcgacatcggcggctttggcgggatgttctccgccgctgccctcaagaagatggacgacccgatcctcgtgagcggcaccgacggcgtgggcacgaagctgcgcctcgcccaaatggcagacaagcacgacacggtgggcatcgacctcgtcgcgatgtgcgtcaacgacgtgctggcctgcggtgccgagccgctcttcttcctcgattacatcgccatcggcaagctgcgcgcagagcatgtggagcaggtcgtcggcggcattgcggagggctgccgccaggcaggctgcgcgctcgtcggcggcgagatggcagagcatcccggcgtcatggacccgaacgactacgacctgtccggcttttgcgtgggcgtggtcgaccgccccaagatgctcgacccgaaaaacgtcgcggaaggcgacgtcattttgggcctcgcctcgacgggcgtccattccaacggcttttcgctggtgcgccgcgcggtcaccgacgcgatgagcgaagaagagcttgccgagcccaaagaggagcttgcgggcaagtcggtgctcgaggcgcttctcgccccgacgcgcatctacgtcaagtcgatcttgaacctgctcggcaagggcatggacgtgcacgcggttgcccatatcacgggtggcggcatcacggaaaacctcaaccgcgccctccccaagacgctcgacgcgcgcgtcgagctgggtacctgggacgttccgccgatcatctcctacgtcgtcgagaaagcgggcctttccgaagaggaggcgctcaagaccttcaacatgggcgtcggcatgtgcgttatctgcaagccggaagacgccgccgcgatgcgcaccgagctcgagtccacgggcgagacggtgttcaccatcggctctatcgtcaagggcgcgggcaacgtgacctacgcgtaaggagtgcgcatgaagatcgcagttctcatctcgggcaccggcacgaacatggtggcgatcatcaacgccatcagcaacggcgagctcgatgcgagcatcgaatacgtcgtctcctccaacagccacgcgaagggcatcgccaaggcccaggaagcgggcatcgacaccgtcgtcttcgagccggcggactacgccgaccccgaggcggtggaccgcaagatggtggagctgttcgaggcgcgcggcgtcgagtacgtcgtcatggcgggctacatgcgcaaggtgacgccggtgcttctcgacgcgtatcccaaccgcgtcgtcaacctgcatccggcgctgcttcccaagcaccgcggcgcgcatgcgattcaggacgcctacgacgcgggcgacgacgtgacgggcatcacgattcactttgccaacgaggagtacgacaagggccccatcatcttccagcacgaagtgcccatcgatcatgacgagccggtcgacgtcctcgaggcgcatatccacgaggcagagcacacgtattaccccaaagtgttgcagctcattgcgcaggggaaggtccacgtgacgggcacgacgtgccgcatcgacgaatagcccctcgccgcatcaacatttttttgagagacaggccgtcttcttcttcgcgaagagggcggctttttctgtgcggcgtgcttgtgggcgcagacgactcgagccccatgcttctcgctcgggcgtgctctgttccgggcactctacctgcggaggtcttgtccagctcttatcgagctcggattttgctctgaaaacgctccgagatggctcttgcccctgctcgtatccggctcggtgtttttcaggtggtctgctcagattcgcttgtcatcattgcagttgcggaaagccgagacggaaacgattggagcgcacgatggagcatatgcgaggcaggcacgcatcgcccaaaggcaccaccgaggaaagccggcaacgagaagtcctatcactcgaagcctgttccccccgtacagtcgttcaacggttcgttctctgtgtcctgctcttggcagtctctcttgtcgcgtggctcgcaagtgcccccggcgccctggcggccacctggcccctgtccgtctcgaggctttccccaagtgtccacttccacgatacctatacggccggtgataagagctatgcgcatagcggaatagacatacccgcatctgccggtttgcagatatcagccccactcgccggaaaggtgcgctacaccggcgccgtgccttccggcgattcccgtgtgggctcgagcgggtcggggcccacgatgcaggcggtctcgatcgagctttcagacggtcgcgtcgtcacgctcatgcccctggcgagctgctgcgtctcagaagggcagacggtgggggaggaccaggtggttggcgtgctcgccggcacgggcgacccctcctctcctggagcgcacctgcatatggggctcaagaaaggcgggagatactacgatcccatgacgttgttcggcgcggctcccctgagtgcgccagcacgcgactcgggtacagcccctgcggcagtgcccgacacatcagtccagcccagcgcgacggcaccggcgctctcaggcgaaggggccgtgatgcaaacgcagcaaggggcaccccaggagtctccgttgaccgagccatcctacgagccgggcatcattacatccggggaggcggcgatgcccgcgcccgaggaggaacaggggcttgtcgggagcgttcggggagcattcgaacctctggtacaagcgtgtctgctgcaggcgaggggtcttgtgtccgtcttcgaatctctgtcgcagctgactggtatacctatcgtgctgctcgcgacggctgcagtggtgatgggaatcggcgcggtcgcgctgctcatcatggcactcgtgcgtgtggcagtgccaaaagtacgcactttgtggagaaggaggatttcttccttgttaagtggaaaggcggatggtatcatgccgtagttatttcctgctccgggtccagccttcatatcccggagccgtttagcccggaggaggtgaccaaatgaaggcttacgaactgctgtttttcgtcgatccgtccattgacgaggagacccgtctcgctgctgagaagcgtatcgatacgactatcacttcgcagggtggcaaggtcagcaacgttgaggagtggggcaagcgcaagctcgcctacgagatcaacggtctcacggacggtgactacaccctcatcgatttcgaagccgagcctgctgcaatcgcagagctcgatcgcgtgctgcacatcatggacgctgtcgtccgctatatgattacgcgccgcgatgatcgtgctggttcggttgagaacgcgtagcgataactcgctaacgtccaactggaaggaacgtatgcaatgagcattaacaaggtaatgattaccggcaatctgacgcgtgacgccgagctgcgcaccactccgagcgggaccgccatcctcaatttgggggtcgccgtcaacgaccgccgtcgcaatccgcagacgggcgattgggaggactacgcaaacttcgtcgactgcacgatgttcggtaagcgtgccgaagcgctcaaccagtatctgaccaagggcacgaaggtggctattgaaggacggctgcactacagctcttgggaagaccgcaacactggtcagaagcgcagcaagctcgacgttaccatcgacgagatcgagttcatgtcgtctcgcaacggtggcaacggcggcggctacgacaacaggggctcctacggtggctcctatgccaacaacgcttctgcacaacgttcccagaccagctatccggagcctccggctccatcggcttacaacgacgaggacatccccttctagggcctcgtcttcgagtgaatttgtgaggaggaaagatggctgaatattcccatcagccgcgtcgcaagcactgccagttctgcaaggacgacgtcaagtacatcgactacaaggacacgcagacgcttcgccgctacatcaccgaccgaggcaagatcaagtctcgtcgtgtgaccggcgtctgcacgcagcatcagcatgagctcgcaaccgcaatcaagcgcgctcgcgagatggcccttctgccgtacgcagtcaagatcgtgtccggcaacggcggccgcaggaaccgcggctaaatgcccgatgtggcgtttcggggcatcgagcttgccgttctggcgctgacgtttctgtgggccgctcgccggcccaccatgacgaaggtcattacggcaatcgttgccctttctgctgcaggatttgcggcgatctgcgttgctgctgcacagcagggcacagatcccttccagtggtacgaggcgtttctcttggattcgctgagcacccttcctgcagataccggtgcggctcagcgtcagatgctcgaggacacggcacacacgtttgcactgtgtcttccggcactctgctttgttgagtctgcctcggaggtgtttttcgtcttctgcctgaggtggctgttcgagaaagccgcacgcaggcggacgtgggcaccgttttcgcaggtagacctgcccatttggacggtctatccgctcatcgccggcatcgtcttgtacgttgtcgcgattctgccaggcgtttcgtacgcaaacgtggttcatgtcatcgcgttcaacgtcttggtggcggctgttgttcccctcttcgtccagggagcggcggctggaaagggcatcctgaacaggattggcatgtcttttgggtggcaagtcgccttagggctcgtcggtattctgtccggtgctctgtttctcgtccttcccctgctggggttggtcgattactgggcgaatgttcgcaagctcaaacgtgacgacgatacgtcccgttcgagtttgcgacgttaggcgcgtacatatatgtaagcagctctgcgccatagcggagcgccccgcagatgcgggactagagaaagtttgaaacatgaaggttattctgcttaaagaactcaagggccgcggcggcgagggcgacgtcatcgacgttgctcagggcttcgccgtcaactacctgctgccgcagggcattgccatccaggcaaccaagggcgagctcaagcagctcgagcagcgtcgtcacaacatcgagaagcgcgagcttgctcgtacgaccgacgccaccaccctgaagaacgccctcgacggcaagtccctcagggttctcgcaaaggtcggcgaggagggccagctcttcggctccatcaccgccgccatcctttccgaggctatctccgagcagatcggcgtcaccatcgaccgcaagaagatcgatctgggcaaggccatcaagaccgccggcaagcacgaggtcaccatcacgatctaccgtgacatcaaggctgtcgtcgaggtcaacgtcgtctccgaagatgccgacctcgagattctcgacgagctcgaggcaaaagaggccgagcaggccgctgctgccgagggcgaggaagaggctgctgccgagtctggggagaccgaggctgctgccgagtagcgatactcaacgttcaaggaggggtgcattcaggcgcgagtctgaggcatcgtgttgaggaggggcccgtgcaatgcgggccctttcgcttatttgaggggcgcagcgcatcagccggcagcacgcgtcggtgctgaatcgaggacgagttcaaagaaagaggggcaacgcatgtttattggcacgagggaagtcgacgcgatcattttcgacttcgacggcacgctcgccgactccatgtgggtctggaacgaggtcgacctgcagttcttcgccaagcgcaatatccccttcgacagggagtacgtcgagtcgtttgccgtgctcgggtttgaggctggcgccgactttgccgtcgagaaattccacctcgacgagaaacccgaggacatcatcgcggagtggaaggctgccgctctcgacagctactcgacgcaggtcatgctcaagcccggcgcgcgcgaatacctcaagtactgcaagtcgtgcggcactccgctggctatcgcaacgtccctgcaacgcaaccttcttgtgcccgccctcaagaacaacgaggtccttggcatgttcgacacgctgtgcgtctgcgacgagctgcacacgggtggcaagtccaccccgaaggtgtacctggaggcggcgcgccgcctgaacgtcgacccggcgcggtgcgcgattttcgaggacgtcgtcacgccggcacaatctgccaagcagacgggtgcgtatgtggtgggcgtctacgacgagcacaagcagcaagccactgacgtgctcaagaccgtcgtcgaccgctttgtctacagctatcaagaactcctcgacgaggcggggcagcgcatctcataattcagcgcacgcttatcccgtctgcgctaccatgggcgtgtactcgatttctcggggaggtacgccatgcacatcgacaaaccgcagcatcgcccaccacgcgacatgatgtgtcccatgcttcaggtctcccgtggctgctcgcatgggaaatgccacttctgcgacatctacaacggcgtcgggttccagccctcgcccatgtccgagatcttggaggacatcgacgagctcgccgcaaaggcgacgaagctcgaccggcgtatctacctggtgggaggcaatcccttcgcgctctcgaatcgacgcctgcttgagatattcgatgcggttgaggcaaagatgccccaggtcagaagctatgggggattttgccgaatcacggacgtcgccgctaaaacagatgcagagctcgacgagctcgccgcgcgtggcgtgagcgacatctgcatcggtgccgaaagcggctatgaccccatcttgtccttcatggaaaaagggcagaccgctcacgaccttgtcgagcaaggggcgcggctgcacaaggcgggcatcacctcgacgtttttctacctggcggggcttgcgggtgcaggaaaggggcaggaaaacgctcttgcctcggcgcaggcgttcagcgctgcggctcccgagaccatcttgatcgtcacgctgaccccgacgcaggactggcggctcaaggaggacatcgcagccggcacctgggcgccagcgggtgaagtcgagaccgtcgaagagatccggaccttcatagccaacctgacctgcaagacgtcgatcatcagctcgcacgattcggatgtcgtgcgcttcaacggcatcatccccgaagagcaggggaagatgctgcagctgctcgaccattacattcccattgtcaacgagggcgcggcgcgcaagatgcgcgagatgatccacaaggcgacgttctagccggcattctcaagtttggcgctcagacgcatgggaaagggctcgccgcttccaaagacggggcctgccgcaatctgatacagcggttcggagacgcggtactgcgcgtcggctgccatttcccgaaacgccgcatagaagcccgggagctcgccgtagctcccaaagaagttcgcgcagagatacgccccctggggacgtacatgatatgagaaagaaccgagctctcgcggggagtcgaacacgcgaagcgccgcatacgaacccgccttcgcatccgtcgcttcctcgccaaagtgcagctcgctgatgagcggaacaaacgcgaggctctccgcatgcgcgaaatcaagcaggtccttgagctgccgggggaagcgcaccccgtcgtcgaaatgcgagaacggctcgggatgaacgagaaagccggctcgaggcatcttgcagacgaacaattcgccacgttcgtgcccgacccattctcccgtgagcctgtctacgacggtgatactggcgtgagcttgctggagcaggcggatgcgttgctccagctcgtcgagcgagcgggctacctgagcgtgataggcgtccacgtcgggtacggacatgaattcccgtatctcgtcgagcgtcatgtgggaaagtttcaaactctcgatgaggctggcggtgaagagctggtcgaacgtgtaataacggtacccatttgagcctaccttggcagggcgcagcagaccgatgcggtcgtagtagaggaccgtgtcctttgggagtccgcataatcttgcgaactcggcgactttgtagagtttcccgctggcctgcattgcgtagagaagcgcctcctgcatcttcgtcttttcagaaatcttgcccgaaaatggacgttgactcccgagttgctccgtagtttattctacagaacatctattcacgatacaagataatagtttggacaagaaaggacgaggagtagatgaagcgagttaccaggggagttgttgcagtaatggccgcctgcgcgctggcattggctatggtgggctgcgcggggggcggctcggggcagtcgtcctcgacgcgtaccgtgaccgcagccgatgggacgcaggtcgagatacccgcgcaggtcaccaaggtcgcccccaccatcggtgctctggcagaggtgacgatgatcgtatccaaaggagacccggtcatctccgcggcagcaacgcagcaaatcggcgacaagttcaagcagtacttcccgcgctattccgaggggaatccgaacgactattccgcccagtcggtcgagggcttgatcgcgtctggtacgcaggtggtctttggcgtccagagcatgtactccgacgaccagctcgaccagctcgagcaggcgggaatcgcgttcgtgccaatcaactcggtctcgaccgtggacgagctctgcgatgcgaccgagctcattggcgagattctcggcggggactaccagcagcaggcgcagaagttctccacgtattggaagcagcagctgtccgacgccaagaatgcgacggcaacggttggcgacaagcagacgattctcgaggcgatgtacaactcgggaagcttcacaacggtcaactcgagcgacatcatgaacgagtacttcgaggcggcggggctcagtaacgttgctgccgacctgcagaaatcttctgctggcagtaatgggcagagctcgggtagcaatgggcagaactcgggcaacaagagcggcggcggtgcccagggcattgccatcgacgccgagagcattgcgcagatgaatcccgaatggattatcaccaactcgcaggagggcaaagaggcgctcatgagcaaccctgcgctttcaaaggtgacggcaatcgccaacaatcatgtgctcgtctcgccgcagggcgcgtacctgtggattgtcaggtccggagaaggcgccatggtgccgatgtggctcgtgtcgcaggtttatcccgaccttgccggggactacgacgcaaagaccgccgtcaaggacttcttcaaggagttctacagctacgatctggacgatgctgccgtcgaggggatcctcgtgggacagtccagcgctgtaacgcgttagcctgcgaggctgatctgaatccatgaacgtatccgctcgcttgcgtggccgcatagtacgggcggccctgatcgccgtgctgatcgcatcggcgctgctgtcgctgggggtcgggcattatgcaatgcccctgcccgaggtgttctccgttttgtggggaactgccaccggcacgctcgacgcgagagggcagctctctcagtcgctgctgttccaggttcgtctgccgcgcatcgtcttggccatgctcgtcggggcagcgctttccgcatcgggggcatcctaccaggggattttgaagaatcccctggtgactcccgatatcctcggcgtctcgaacggcgcctcgctcggtgccgtcatcgcgatcttcttcgggctcggctcgattgccacccaggggctggcctttgcctttggcctgttgacggtcttcctggtcgttgtggcatccaagagcatcggcaggggaaatggcaccatcatcgtcatgattctgtgtggcgtcgtcatgtcctcgctattctcggcatttgtctcgcttctgacgtatctggcagattcggacacgcagctccctgagatcacgtactggatcatgggaagtttcgcccgcacgtcgtccccgcagtcgatcgccgtgctgtttctcatcttctgcatcggttcaatccccctgatgtgcgttcgctggcgtatcaacgcgctctcgtttggagacgaggaggcatcggcgatgggcatcaacgtcagacgggtacgcggcgtcatcgtctgctgcgccacgcttctgacctcggcaagcgtcagctactgcggcgtcgtcgggtgggtcgggctcatcatcccgcatatggtcaggctcctctccggaccggattaccagtcgctgcttcccaacgcgatgatcggaggggccgccttcatggtgctcgtcgacatctgcgcccgcgcctgccccaccgagctgccgctttcggtcgtgaccgcgattatcggcgctccgctgtttttgtgggtgctgttcaaggggaggaaggactggctgtgaggggtcccacaggtgagatggcaaagaccgcatcgtgtatgagcgtgcgcgatgcttcggtcggctatggttcgaagcgcgtgctcgagcacttcagcgtcgatatcgttccgggaagcgtggtgtgcctgctcggtcccaacggcgtcgggaagacgacgttgttcaagagcatcctggggctgcagccgatgttgggcggcaacgtgaccctcgatggcgaagacgccctgaagatgccccgccgcgactttgcgcgcaaagtcgcgtatgtgcctcaggcgcatcaggcgccgttcgcgttctacgtgcgagatgtcgtcgctgtggggcgctcctcgcacgttggcatgttctcacgtccgggtgctgccgactacgaaatcgtcgaagaggtgctggatgagctcgggattggcaagctcgcgggtcgtgtgtacacggagctttctggtggagaacgccagatggtcctcatcgcccgcgcgcttgcccagcagcccgagtatctcttcatggatgagccgacttcgaacctggactttggcaaccaggtctcgcttgttcggctggccaaagagctcgcacgcgatcgtggcctcggcgttgtcatgacgacgcacaatcccaaccacctgttcatgtgcgaaggcacgggcgtgcttatcttgccgcacagtcgctacctttacggcacggccgatgaaatcctcactgatgcgaatatgcgcgaggcgtacggcatccgcgtagacatcatggacgtcgatgcgggtgcggggtatgagaaaacctgcgttccggtgctgtgagacatctgtgtaaaagggaacgagaagatacgttcatctatatatcgtgttcactctcaatttacggcgactataattggagtcagagcagttcaaggctcaaaactacgcgagttggggtgagcatgatgggcgattcgaagactgttccagttgtcgttatgcagggcatgcgccatgtctactggctcaaatccgagggcgatcgcgtccacgaaggggaatccatcgcaagcatggaggcgggggacgagtcgaagttcatcaccgctcccgtcgacggcacgctcgagaagattctgatcggccagggaggtacgacaatctcaaacaagcccgtgtgctacatcaggccgtagattcgcatgccttctcttacgcggcgcgacgatgatggggcacgcggaatccgagggacaattcatcccagatggcgtgcccgagttctaaaataaacgttactcacgttcaatctgaaaggggaatgcgatgagcaagattgtcgttatcaaggggagcgaccgcaagggcggcaactccaacaccatggccgacgcctttatcgaggcagcgcgtgccaagggacacgaggtcaaggaattcaacgcggccaagatgaacctgaacgggtgccatggctgcatgacctgcttcaagacgggcaaggcctgcagtttcgacgacgacttcaacaagatcgccgatgacctgctcgaggcggaaggctgggtcttctcgttcccgatctactggtacagcattcctggccagacgaagtgcatcatcgacaacatcttctcgtttttcgtgggcggcaaggacttcaagggcaagaaggtggcacttatctcctgctgccaggaaagcgatatgacggtgttcgacggcgcggtcaagcccatcgagcgcggtgcgaagctctgcaaatgggacatggtcggaaacgttctcgtgcccggcgtagatgccatcggcgatatcgccaagacggatggctgcgcgcaggcagcagcgctggccgacaaattctaagcaaggcattgcgcgcaaattgcaaaaagcccgcagcggggtacacgccctgctgcgggctttttcattagcggtagcatttgtagaaaagaaaaaggccacccgaaggtggcctttcgattttgactggtgcggcatgagggattcgaacccccgacgtactgattcgtagtcagtccctctatccagctgaggtaatgccgcttaacacagctcgaatataataacactgtctcgaatcccgtcaacgcatattcgaagataatcgaaaacttttttcgaacttgccctcatcgagcctgctgcccttttgcgggattgtaacgtggggtgcaagagatggtgttactatcacgttgttacgactgaaagattagtgttacggcttatcaggccgtgtgaacatcgtgaagaggagacagcatgtgcgcgaatggcgttaatacccagcagctcaaagacacggttacccagatcgacgagacgattgccctgacgcgccgctggacgcaccgcatgtaccatctagcagatggcggcagcatggagcgttcggcaaagaagctccaagagattcagtccgcgctcgacgacgtgcgcgcactcctcgacgaggcgcaagacgcgatcgaccgcgacgacaaggacaacggcgtcaccgtcaccgccgtctagagcgagcggactgcaatatgtacggggcgctcgatgcgacgatgatggttctgacgagccgtccggtggaccaggccgttatcaatgcgctccaatcggcagcgaccgcactcggccacgagtcgggctgctcggtgctcactacaggcgaggccgcccaacgcggtggcctcgccttgcttattctggaggcggatccttggtcggtcgtcgcgatcgacgacgcggccatcgatgcgctgcgcgctgcgttcggcgcggaatcgggaagcctgcaaccgggaaagccgcttcaggcgggaggcggctacacgctggtagccgtcccgggctttgcggaatgcttggacgaccagggcaggaaacgcgtcgcgtgggggcagctcaaggcggcccgccatcccggcaacccgctcggctagacgcccgggcgcctaagcgtctaccctttccggcgcccgatcagcggctgcgccgtcacgaggacgatgcccgcgacgatgagcagtgcgcctgcagcttgccaagccgtgagcgtctctcccaaaatcaaaaacgcgaagaacaacgagaacggcgtctcgctgatgctgatgagagaggccatcgtcccgccgatgcgcttgatggcgacgatgtagaggacgatggggccaatcgtgttgaggagcgccatggcggcgcccagtgcccatgcctgccaggtcgaggtggcgacgagcgagggcagcgagggcgcgaacacgacgagcgaggcaagcgtgctcagcagcacgatggtaaacgtgacggtgaaggccccctcggggtgcttgttgcgttggatgaggatcgtgtagatggcaaacgacacgcacgacaggatgccaaagcagatgcctaaggcgttgagcgtgacggcgcctggaatgagagcgcccgatacgcagacggtgccgccgatggccaggacgagtgccaatgccgtcgtccacgagaacttctcgccgaacagcgttacgttcacgatagcgacgacggcgggaaagaggtagaagatgaccgtcgtcatgccggcggaggcaaggtactcgacggtgaggaagtaaaaccatgcgctcagaaagaagaacagcgcctggaacagcaccgatttgctgaacgtgacgagtttttccttgtgccagatgaccatgaacaggccgagcaacacgctggtggaaacgaatcgcaagaccatgacctgcgagctgtcaaagcccatcccgttgagcagcttgccaaaaatgcccatggtcgagtacatgactgcctgcaagacggcaaacagtatcccgaccgctcggccgttgtcgtgaaccacgattctcccctccgcacacgtaggtgacagtatacggcacgaaagaaaaagaataagttcccgcgtgtgcggtgcacagcgggcagttgttctgctagaatccttatctgcatctagcagcggagagatggccgagttggctgaaggcgctcgcctgctaagcgagtataggtaacataactcctatctggggttcgaatccccatctctccgccagatgccctttctttcacccgctttccccttatgctttcatagcgttctctgcggcgcatgtgtggcaatgccacgttttacgttcgtcttgcggcaaaagcgtggcagtgccacgtttctcgtgcggggatcacgtgatgagtggcagtgccacaactctcgtgcacattgcgccccttctgtggcagtgccacgattcccgtgcacggtggggaaggcactcgtgctaaagttctcgcatcgaagcaagaatggggaggaaggtcgttcgcatgcgttgttggaaagagctcggttgcagggggacgatggcggcaaactgcccgcatgacgcaagcggcatctgcccccgcacttgcatcaacaccatggtatgcgattatccccagtacgagcgcgcgagcggcatggagatgctcgatgccttcgacgtcgatttcaaggtggcccgcaaggaaaactgccagacctgcaggttcttcctgcaacacgcccccaagatcgcctagacgcgcgcctattgcgcggtgtagctgtagaccgatccgtcctgcgtgcgcttcacgtccacggttgcaacggtcgtgtcgccgagctgtaccgttgcggtgattcccgtattctgcattgtccccatcgcgtcgttgacgttgtcctgcgcctgtcggttgaggttttgccccagggtggcaaaggcggcaaacgcgagcatgatcacgacgatgatggcgaaggccacaatcgactcgacaagcgtctcgcctcgcgtgctgtggatgattctgtcgaagaacgttctcatggttttcagcctgccggatatgtgacggcgccgatgtgggcaccgttgctgtcggtcgtatgcgtggggaaggggctgccgtccgcgaagccaaacccgagcatcgaggccatcccgttggattgcgccgtcatcgtcgcgtagtcgagtgcggttccggcggctttgccttcccgtggggccttgaggtagtagcagttgctgttcgagcctgctccccagctgtccatgaatccgtagaagtcgttagcggtgctggtcgccgcgctgtagcagttctcgatggtgccgttgccgtggtttgcgcatgcgaatccgtaggcagagctccccgcgttctgctgtagcgtgcccgcgaagaaggaagcgcgtgtcgtggtgttctgcaggtagccggcaaaacccgccagtccatggttcgagctcgagctgagcgtgccgctggcaaagcagctgtcgagcgtacagccgttgctactgacgcccaaaaagcccgcgacgacgttcgccgcatcatagggctgctcgtaggcgatgcgggaattgagcacgaacgacgtgctcgccgagttgacgtagcagttcgagatgtccgagccgtccgcgaatccgattgctcctgctgcggagtttgtcttctgggtgtcctggctgtccaccttcgattcgaactgcagcttcgagccctgctgcgataccaagtgcagatgcgagatcgtgtcgttcgaagaggctccgaaaagaccgcccgtagcgctgctgccccagctcttcccatacgatgcgagggaaaggctccctcctcccgctacgtcaacaccgcattcgctgacgtcgagtctcgaggatttgccaatcagaccgccggctgccagagctgccgcctgtggagtctacgtcgacggtgccgttcaaagaggccttcagtccggcaactgtgctgtcgcttgcccagcccatggttgcgcccgcataagagttgccgttgctggcgtgtgcgctcaccgtgagcttgccgtttgccttataggtgttctgctccatgcgcccggcatcttccgcactgccaatgaagccgccggctattgcagaactatttgtgcacgtcgccgagatgtccgcctggcgcgaggtgagggagttgctcgtgagcgtgccgcaatcgagtgccctgccgataatcccgcccgcaaagctcgcgccgttctcgccgctcgcggcgatggtgaggctgtcacatgccgcatcgttcgccgagatgttgctcacgtgctgcagcatgcccgcgacagcgcccacagctccctgcgagcgcttattcgcgtcgaggtcgagggcgccgctcaccgtgaccttgttgttctcgaaatcgcgggagtctgccgtggcattgtcagagcccttgtaacccacgattccgccaaggtacgccatgccgctgtagctgttgttgaacgtcgaggcggagagtttggcggtcgtgccgcgggcaacggtgagcgtgcagttggagagcgccttgctggagccgtcgtagccgacgagcgcacccatgtagacgaccgagctgtccgagaggtcgcttttcgcgtcgatggaaagcggcttgctcacggtcacggtgcaggtgtctgcctgcgcatcatccgagatgctgccgatgaggccgcccatgtaacttacgcccgtccagtcgtcggcctcgtgcgtctgctcgatgctgaacgcggcgctcgtggtgagcgcgcagttgctggcgctgcccttcccgccgagctggcagatggcaagccccatgcgcgggcgcccgacctcgacggtcaggtcgtgcttgacgttgaggctgagatagctcaccgttccgctcacgtagccgaacactccgcagttcacgtagttgttgtccgacatgtaggcctgtcccctcggggcggtgtcatcggatgcgaactggaactgcggggcaaagtcgatctcgaagcccttggctttgctctgcgggggctgcaggttggcgtgatcgggcgtcgcggagcccttctggctgtagccgccgtagaaggcgccggtaaactgtggactgctgccatagaagttcgtcagcttctggctgcggctcccccggccaatgcccacccagtcgctcggcagctctatgtcgtgggtctggtagtacgtcccgtcgaggtagctcgcgtcgtagaagctgcccacccaggtgttgttgttcggcgtctgaagttgtccccaccaggcgttgttcgggtcgtacacgtagtcgagcggtttgccgatgtgctggagctgttcgccggtgcgcacctggaaggtcttgttgaacgggtttgcggtgccgggcgcgatggaggcggcaaagttcgggtcgaggaacaccgcgacgtttttgtactgagaagaggcctgcgcgttttcccagggcttccagacgccggcggatgaggtgcgcgtgatggtgttggcgctgtcttcgtacagcgtgctcgggtcgtattcgtagaaccagtacatgccgtcgcctgtcacggtgaggccctcgatgccaaggctcgcggcggagaccttctggacgcgcgcgttttcgaggatgtgcgagggcacgtcgttgcccgtgagctcggttgccgacaagatgccgtaggcggtcgacgtgatggtgttgttgtcggggaggttgtcgtggacctgggcggacacctcgccaaacttcgagatggtgtagccgtacgagccggtcagctggtcgccgttgaattcgaagtagccgatgaccaggtcgtcgagcgtctgctcgtgcacgaacgacttcatgggaccgccgccgtagtaggcgatctgcttgctggcaagtgcggcggagtcgttgcggttcgcgctcgcgaagctctggtacacctctggcgtgaagctggcggactcggagtagaacgcgccgtacacgtagccggtctgcgggttgagctcgaggtagtagacgcctttcgcatgaagcgctgcgccttggtcctcggtcgtgatgttcgtgccgaaaaagccgacgttcgagacctgcgtgtcgatgttcgggacgagcatgtcgagtgcggcggcatcgcccgagttgtagttggtcaggcagacgagcccttcgtccaccgtcgagccatcgtcgtttttcagcagcgcgggcgtggggtcggggctcgagatggtgctggccagcgtcgtgcgcgtcgttgcggtgacggcgcccgagctgccgttgccgagcgtgccgtttgccacgatcttggccatgttgttctcggcgaccgagtacacgagctcggcattgctctggcgctcggtggccttgtagctgttgtaccacgggatgagcgagggcacggcgagcgcggcgatgaccgccatgacggcgagcaccacgacgacttcgatgagggtgaagccctgcttgctggctgtgcgtgtgcaagacatcaggcaccgccccccagggtctcgacgttggacgtctgggtggagagcacgtcgccttgcgtgctcgtcacggtggtcgtgacctgcgtcgtcgctttgcccgcggctgcatctccagccgcgaacgtgacgctcacgcggtcgccgtcgacgtagacgccgctcggcaggaaggcgccggaatctccgctcgcatcggcaatctggagcgtgccgtctgccgcgggcaagatggtgtagctgcccttcgcgcgcgaggggctgacgaagtcctgcgtgaaggtgaccgagctgccgtcgacgccgatgacgggcgccgtgctcgacgtgcgcagcacgtcggagacgctcgtgttgacggttgaggcgagcgtgtcggcgttggcgatggcgcgctggctggccatgatgcgcgtgccaaacgaaagcgatgtcgcgatgcaggcgagcacgatggcgagcacgaccatgacgacgaccgactccacgagcgtgaagccgccgctggaacgcgcggtgtctttggggctcatgcgcatgtcagctcgccaccttcgtgatggggccgacgcttgccttgtcgcctaccagcgtgagggtgaactggagcgccgtcttgtccggtgcgtccgtctcgtacagcgcgacgttgtaggcgccctgtccgttcttcttgacgtcgacgctgatgttcgcgaactgcgcatcttgcgagctcgacacgctcaaggtgatggtcgcgggggtctggccagcggattcgcctgtcgcgacgatcttctggatccagtcggtgcccgcgggcgcgccgtcggccttgtcatgcagcagctgggtcgcgctcgagacgttttgataggtgcgctcggcggccatgtcgtcgagcgagcggtggtagttggcatagccaaacgacacgatgatgccgcccaagatgagcagcacgacgacgagcagcacggcaaagacgatgctcacgccctgctcgtttctgagtatgtcccgtgtccgcctgatcatgcgctaccccagcagctccgtgagctctctgcggtcgttgctgtactcgagcgcgctttgcgcggtgatgacgccggcgcggacctttgccatgaggtcggcgttgagggtgtgcatgccgagcgcgcggtttgactgcatgatggtgtcgagctggtagatcttgtcctcgcgtaccatgttgagcacggcgtcggtgcccacgagcacctccgtcgcggcacagcgtcccagcccgtcggctgtggggatcaggcactgcgtgatcacgccggcgagcacgccggacagctggctgcgcacctggttttgcgctccggcggggcaggcgtcgatgatgcggtcgacggtgagcgccgcgctcgtcgtgtgcagcgtcgacatgaccaggtgcccggtctcggcggcggtgagcgcggcggagatggtctcgtagtcgcgcatctcgccgacgaggatgatgtcggggtcttcgcgcagggccgagcgcaggctcgccgcgaagctcttggtgtcgtgccctacctcgcgctggtggatgagcgagcttttgtgcgtgtacacgtactcgatggggtcttcgatcgtgatgatgtgctcggcgcgcgtgcggttgatgtagtcgatcatcgcggcgagggtggtggacttgcccgagccggtggggccggttaccaggatgaggccgcgcttgcggtcggcgagctcgttgagcgtggacggcaggccgagctgttcgatggtgggaatatggtcgtcgagcaggcggatggtggcggcgatgtgaccgcgctggcggaacacgttgacgcgctggcgtagaccgtcgctcgacacgagcgcgaagtcgagatcgtcgccgtcggcgaaggcggcgagctgacgcttgtcgagcacctcttcgatcatggcctcgacctctttggccttgaagtcgtacggcgcctcgacgagcgtgccgttttggcggaagaacaccggctcgccggcggagatgtgcacgtcggaacagcccatgtcccgcgctttgagtatgatgccgtccaagttcatgtgctgcaccccctatacctggtagacgatcttgaggtattcctcgagagtcgtctttcccgcgacgactgcggccgacgccgcgtcggcgagcgttttcatgccctggttggcaacggcgtacgcctggacgtcatcgacgcttttcttgtcgttgatcatgcgcctgatggtgcggtcgacctggagtatctcgtggatggcgatacggtcacggtacccggtctggttgcagttgcggcagcccttgccctcggtgagcatcacctgcgtccccggggccagccccaagatctcgacctcgtgctcggtggcggggcgctgctcggcgcagtgcgggcacaccttgcgcatgaggcgctgcgccaccacgccggcaagcgacgacgacaccatgaacggctcgacgcccatgtcgatgaggcgcgcgatggaactcgcggcattgttggtgtgcagagtcgagaagacgaggtgcccggtgatggcggcgcgcacggcgatggcggccgtggtcgcgtcgcgcgtctcgcccaccatgatgatgtcgggatcttgccgcatgagcgagcgcaggcccacgtcgaaggtcaggccggccgcctcgttgacctgcatctgcgtgatgcgcgggatgttcttctccacggggtcttcgatggtggatatgttgacgagctcgttgctgagcgcctgcaggaccatgtagagcgtggtcgtcttgcccgagccggtggggccggtcaggtagatgatgccgttgggcacggccaggatcttgcagaacttctcgtagtcctcgtcgagcatgccgtaggtggtagtgtgctcgatcttcgtgttgttggacagcagacgcaacacggccttctcgccgtagacggtcgggatgacggagacgcgcacgttgacgtcctcgccggccaccatggtccggaagtgcccgtcttgcggcaggtagcgttcggcgatgtccatgttgctcacgatcttcacgcgtgcgagcagcgacgcgtgcacgctgcgcttgatggtgaggtagtcgttgatgacgccgtcgacgcggatgcggatattcgtgaagtcctggaacggctcgatgtggatatccgaggcgccggcgcggtacgcgtgctggatcaggctgttgagcaggttgacgatgggggcgtcgctcgcgtcggccgtcacgtcgatctgcgcgaggtctgaaagcgagttgaagtcgaggcttgcatcctctgcctccatgaaggggctgacctcggcgtagtagtactgctgggcgcgcacgatgggcgtgtgctttgcgagcttgacctcgacggaacgtcctgtcaactggcggatttcctcgattccgtagaagttgagcgggtcgtcggtcacgatggtgatggtggagtccgtcgccgcgatgggcagggtgctcgtctcctgcgcgatgttttcgggcacgaggcgcacggcgtcgatgtcaacgtccacagcgccgatgtcgaccagaggcacgtcgagacgcttcgagagcgcgtcgagcagctggtcttcggtgatgtagcccaggttgatgagcgtctgacccaggcgcacgccgcggtgctcgcgctggtaggcgagagcctcctcgagctcgtcgtcgttgatgtagtcgagctccttcaagacatcgccgatgcggatctttcgattttgctgaatgcttgccatcgtgctagtttcccttgtacgagtagacggccaggtttgccgtcatgcgccatccggcatcgccctgtccgttcgagtcttccttctcccacttgaagccctgcacgcgcatgccggggtaggcttgggcacaatcgtcggtaaagctcttgagctgcgcctcggtgccgctcacgacgatctgcacgttggtctggtagatgccggtgaggtcgcctttttctgcggcctgcgcgcccttcgagagcgcgacatcgggggccgaggcggtcgaggtccccgtcgtggcggtgcccgtgggcgcataggtggtggacggcgcgtacgtggtctcgtcttgcggcagcgcgaaggtcaagtcgacgacgcgcaggccgtgcgacttcgcgatcgtggtcatcaggttggtgacgctcgctgcatcgtgcgtggtgctaaagccctcgagcgcccccgtggcaagccccgtgcggatcagcgccgtgctgtcgacgaggtcttgcgtcatgctcgcgtcgcttgcctgctgtacgcgtgcctgctggacggcgaggtcgtcggcgagctgctggtgcgtctcccacagcgggcggatgcccacccagaacaagatgaagacgaccagaatcgagatgacgtacttgatgagcttgaggtcgcggtcggtgagcttggtctcgactttcatctagcgtccctccccttcctcgagcgagagcgtgacgtacagcgtccagtcgccttgtgtctttccgggggtcgaggtggtggtctcctggtaggcgtagccgctgttcgccacggtgaagcctcccgtctcgctcgccttcgcgccgaggcgctcgacgaacgtggagatgttgtcgttgttgccggccgtcgcctgaatcacgtactgtccggtggtctcgctgtagccgtacggcgtccaggtgacaaggccgctcgcacactcgtcgatagccgcctcgagttgcgagccaggcacgggatagctctgctgcacgtcggcgaggcgcgcggcggaatcctgcgtggcggctgccaggtcgttatcggacttggcggtgttgtaggcggaaatctgcttgagagcgtcgggcgtcatgagcgagttgcggatggaatccgcctggccgccggttgcggcattccacgcgagcagccccgccatggcggcgatgcaggcgagtgcgcagatgacgggaaccttgagcgcgccgatgaggtcgcctttgtcgctcgtggtcatgccggtgccggtgatcgtcttgtacgagtcgacgagcgcggtgccgttgtcgaaggccccgagtcccaagatggcgggcaggatgtcgacgacatcgtcgctggcgaggggctgggctgcggcgaagacctcgtcttcgcggacctcggctatcctgagcgtctggtcgtaggagcggatggctgcctcgacgacgtctgaggcgggcccggtcaagccgagcaggcagatcaggtcgaagcgttcggagatgtggtctgcctggatgaactgctcgatgccggtgatgctgcgcagaagctcgccgccaaagtcgggcgtgccgtaatcggtgaacaggtgctgctcggacgagtagcggtacaggccggccttgaagaggacggcgaccgaatggtcatggtcggaagtcaggaacaagacggtgtcgtcggtgcggtcgccgcgcatcctctcggtgaaggagatgacggaggtgtagggggtcgcgattgcggagatttcgacgccgatctgcttgaacgtgccgacgatgcgctctaccagcgatttgtccgccgtcgtgatgagcatgcgcgcggtgttggtggccgcatcggtcgagatggtgcggtactcgtaacatgggtcggaaaagcgcgactgcgtctggacctcgcgctgcatataggcacgtaggtcgcgctccttcttgaacacgggggcctcggtggtgcgcacggcgatgcgcttggtttccaccacgaccttgacgcgcttggtctcgagctggtgctctttccaaaacggctcgacgagcgacctgaaggcctccgggtcgatgatgacgccgtcgcggatgatgccacgaaggccatcgaggcggtagcagccgtcgactgccgcggggatcccggacttgccgaccacgacgctcagcgatgtgtcctgtagatatgcgacgagcataacaatcccttcgtgatgctagtagctggtcgtcccggcgccgatggtcgagtacgagttgtagatgggtacgatgacggcgatgatgacgaacccgacgatgatcgccatgagcacgatcatcgcgggctcgaggtagccgaccatgcgctgcatggcctgctcggcctcgaagtcgagggtgtcggcggtggaggtgagcatgtcctccaggctgccagactcctcgcccacgcgcacgctggcgacgaacttgctgatgaagccgtccactgtgccaaacgcctcggacagggtgtgtccggtgcggaccatgtcgatgacgtctccgaactggctttggatgtaggcgttgccgatggtgttgctcgcgatctcgagcgcagtgatcgcgttgatgcccgagttgtacagcgacgagaacgtgcgcgcgaaccgcgccgtggccaccgtgcggttctgcttgcccacgactgggagcttgagcttgatccggtcgatctgcagtctgacagcgggcacgcgcgacagaaacatccacagcaaggcgacggctatgaccgccacgatgagctgcagccaataggtgctgacgaagcccgagatgccgagcaagatgaccgtgggcagcggcagctcgcccatcttgtcgaacatatcctggaactgcgggagcacgaagcccacgatgatggcgacgaccacgacgatgagcacggagaggatcttcgggtacagcgtcgcggcgtggatcttcgcgttgaagcggtgctccttctcgtaatgggccgacatccggcgaaagacctctgccaggttgcccgcctgctcggcggaggcgaccatgttgacgagcagcgcgggaaacgcgccgcgtgcttcgtccatcgcctgcgagagctggctgcccttcttgatggacgtgatgaggccggagtagacggcggcctcggcgggcttgatcgactcttcctcggagacgatcgtgagcgtgcggatgagcgggacgcccgcggccagaagctccgaaaccttcaggcagaacgcggcgagcgcctggggcttgagctcgcgggcagtcttcaggctgctgcgaggctcggtggcagacaggagcgcgaggccttcgtctttgagcgcgaggtgcaactcgagctcgtcgtctgcctcgcgcttgccgcggaccgtcttgccgctgacatcttgcgctctgtatgaaaattcgggcatggaactcctccgtcggctcgggcgtctatcccagtccaaaaaggccgaggtaggaatgtatgagaccgttgccatacgcactcgagattatggcacaaaggcacaggaacgggccgaatgcgaacgcatcttttgcgcctgcccgcttggaaacgagcaggcagatggcgtagatgccgcccagcaatatgcccccgaagagcgtgagcagcgttaacttccagccgagcgccaaaccgagtgccgccatgagcttgatgtcgcctccgccaaagcctccggtgagcaaggcgacgagcagcagcggcacgctcgcggcaaagacgccgatgacgcggtcgagccaggtgacgtccgctccggggaacacggcgccgggcaggatgctcggcgtggcgaggccggcgacgagcgcgagcacgccgagcacggcggtggcgatgacgagcccgttggggatttctcgcgtgtcatggtcgatgaaggcgaccgtcgtcatgagcgcgcacagcgcaaagccgaagccggctgtcagcgtgggtccccagacgaacaggcaaaacagcgcgcatgcggcgccgagaagctcgacggcggtgtagcgtgcccggatgggggaaccgcagtagcggcactttccgcgcagcagcaaccacgagaacaccgggacgaggtccttgggggcaagggcatgctcgcattgtgggcacatgctgcgtcccgagacccagttgagcttgcgcggcacgcggtagataaggacgttcagaaacgagaacacgcaggcgccgaagacggcggcaaacgcgtagatgactatgtcggaaacgagcatcatgtaagtggaaccaccagaatgtggggggcgaacccgccaggggcggcggacggctgctagtacgttttcgtgacctgcggaaacaggtccgaggtgacggtccagggcgcgctttcggctgcgtcgtagctcacggtgtagcgtccgtcgtcgtagatgaggctcgtcgcctgcatctgctcgtagtcaaagccgtaaagcgcgacggtgccgctctcgtgcgcggcgtcgaggaccgcctgttgcgcctcggtgttgagcggtccgttcgtggagccggtctcgtacaggctcttgccgagcccatagtattgctcgccgatgcggctcgcggccatctggacgtgcacggcacgttgctgggctgcgcgcagcccagtccaggagttcagccagatggcataggcgccggcagccgcgatgagtgcgagcccgatgacgatcacgacgacgatctgccggtagaactgctgcttgggcatgtccttgacggggatgcgcctgaagctcgagctcatgggcgggggctgctttccttcttcgtgctccaggtgccgtcgggcttcaacgtgtagcgtgtgccgtcgatgacgacgtagttgtaggactgtgcccaggactcgtggatcttgtcgcttccgtcgctgttgctgtagaggaacctgaagtcctggacgccgtgcgggtcgtcgcgggggacgcctgccagttcgaacacctcgtcgacgtggtccttcttcgagttgcgcatgtcgaggaggtagttttcggtcttcgagccggtgtctttgtcggcgtacatctcgtcggcgaccgcgcgtgccgcctcgcgcaccgtctgcgccgtggcgtagttcttggaagagtttgcctggtcgatgtagccgatcagcgtcgggacgaggatggccgcgaggacggcgaggatgacgagcacgacgatgagctcgacgagcgtgaagcctccttgcttgcggatgcggtgcctggtgatgttcatggccacctcctcagtagccgaacgcctcccgcttctcgagaggagagagggaggcgtttcgagagcgtgctagttgtcgtgcggaatcaggctacttggtgggaaccgaccacttgttgtctttgctcaaagtgtagtcatgcccgttgatggtgacggtgccgtcggtgatggcatgagaggtcgaatcaacgttgaagcttgctttggagacttcgctgccgacgccggcgagatccttgaccgactgcccgttcgcggtcttggactcgagtgtcaccgtggcaaggtccttgccatcacggccgtagctatcgtcttccactgcctgcgcggcaacgcgcaccgtctgcgccgtggcgtagtccttctcggagttggcctggttgatgtagccgatcagcgtcgggacgaggatggccgcgagaatggcg

SEQ ID NO: 551 - DNA, 32047 bp, Unknown
  16S sequences of unknown bacteria
gtttctcttatggatcatttaggctccggcagggagtatgacttggcaagaaaaaacggcggcttgcgcattttcccgccttttgcggagtccggtatgcggtcctataagggcaaaatcgaagctttaaacaatattctgacatttattgacgaaaacggacgggacaccgtaatcttggccgacagcggtattgtaagctgtatagattataaagatgtccttgaaaaacactatgaaaaaggcgctcaaatcactgcgatatacaagacggaaaaaattacaacttgcagtgaaaaggataatgtgacctttgaaataggcgatgacgacagaataacaggggtgtatgtcaatgaaaaccggggcgttgtggcaaataacgccatgtgggcttatgttattgataaaaaacttttggttgagctggtacacgaatgctataaaaagggatttataaattttgagaatgatgttttgcagaaaaacacagaaaatttaaagatttacggttattcttacaccggatatttaagcagaatacaaagccttaaatgctattttgacgccaatatggatcttcttgacaaaagggttatggacagcttgttctcacagcatccggtttacacaaaaattcgtgatgacgcaccggcgagatatttgcggggaagctcggttaaaaacgatattgttgctgacggctgttgcatagagggatatgttgagcacagtgtgcttttcagaggcgtaaaaatcggcaaaggcgcaatagttacaaactgtgtgcttatgcaagatgccgttgttgaggacggcgcaatacttgaaaatgtaatctgcgataaaaaagccgttatcacaaaggataaaaggcttatcggggatgcaaatcaccctgtgtttgtaggcaaaaaagagatagtgtaagggggtaattctgtgaaggttctgttttgttcaagcgaatgtgttccctttgccgccagcggcggtttgggagatgtaaccggcagtttgccgaaagcccttgtaaaagaaggacttgatgtaagggtgattttgcccctttaccaaaagacaaaagataagtatatcgacgatttaaaatttataacaagtttttatgttccgtttggttggcgcaaccggtactgcggtttgtttacgctggaaaaggacggggtgacatactactttattgacaatgagtattatttttaccgcccgaatttgtacggctattatgacgacggggagagatttgcgtatttttcaaaggccattttggagagcttgcagtacatagatttcggccccgatgttatacatacaaacgattggcaaaccgcccttgtaaatttgtatataaacagctattacaggcacttggataagttttacggcataaaaaccgtttttaccatacacaacattcaatatcaggggcagtacggactaaatgttattgatgaagttgtaggtgtgccggacgcatggaagcaccttttggaatacaacggcgacgccaactatatgaaggctgccattgaggccgcggataaggttacaacggtttcgcccacttacgcagtgcaaattctcgacccttggtacgcctgcggtcttgacggaattttgcaggccagacagtttaaaattcagggaattctcaacggaattgattacgatgagtataatcctaagacggataagcttatagtaaagaattattacagcggtgcttttataaaaggcaaggcggcttgcaaaaatgatttgagagaatactttaatcttgaaaaagacgacagcccgataatttctattgtgtcaagacttgttgaccacaagggggttgacataataagggacagcgccgaaagacttgtaaatcggggttatcagcttgtttgccttggcagcggcgagtggcagtacgaagaatttttcagatacctggcaggcaaatatcccggcagggtaggggttgaaatcggttttgtaccggctttggcgcgcaaaatttacgcaggcagcgatatgtttttaatgcccagcaagtcggaaccatgcggtttaagccaaatgattgccctgcgctacggcacggtgcctatcgtaagggaaaccggcggacttaaagacagcgttaaagactcccttgacggagagggcaacggttttacattccggggttattccgccgacgaattgtacgattgctgtatgcgtgcttatgagggttatcaagataaaaagggttggaaaatccttgttaagcgagccatggagtgcgataacagttggaaaaacagcgcaaaagagtacattaaaatgtacgaaaattgccttacactttggtaaagatacagccgacagatttgtcggctgttttatttataataaagtctaaaaatatttacatcaggttaacaaataaaataatatccaatgataaaataaaattatacaaaaataaggagggcaacagtatgaaaatattaaaaaatttcccaaaattatatattgtaaacggtgtgttttgtttggcgtatatattgacatcgactttgcacggctatttaagaaacaaatccggctatcccattacctttgacaacggcggatactttgtgtggggtgcgctgatatttcttgcatttttggcatattccgctatcgggcttgccgtatattatgctatggaaaataaaaagctgtttaacataatttctgtggcatttttggcgttttccgtatatgcctgccggggcagttacaaggaattttataatcactacaaaaattcctatcttatgaaaaacgaaagatatgccattgtgaatatatcttacgatgacattgaaaatttaaaggacgataactatattatctatcttgccgacggcgaaaatcttgaaatagaggaaactttaagcagagtgtcaaccgaatggccggttaaaatttttcaatatgaaacaaatggcaaaatgaatgattttaccgacgaaagcggagtgaccgcattgccggcagtggttgttatggtaaaaggaaaaccggacaaaattttgaccggcgatgagataaatacccaaatgcgggacacactccgttactatacatgctataatacatatttcacttacgatatataataacaaagccgacctttcggggtcggctttatttatgtggtttttaaatattaaaatctctgtccagccggcggtactgcaccgcctccataatatgagaagaatctattatatcgcagtgatccaaatccgctatggttctggcaacttttagtattttatcataggaacgggcggaaaggctcattctgtcaaaaatctttttaagcacctcttgacctttggctgtaaccgggcagaattttgccatatatttcggcggtatgccgctgttggtctttatgtctgtgccggcaaagcgctttgtttgcaggcttctggcggcgataactcgttttaaaatttctgcggatggctcggatttttcttcgcctgtcaaatcctcccatttaacatcttcaagcttaacttgcaggtcaattctgtccagcatagggccgcttatgcggtttatataccgccgcctttttgtggcagagcaggtgcaaacatgattttcacagccgaaataaccgcagggacaagggttcatggcggcaacaagcattatgtcgcttgggtatgtccgactgtaatttacccttgaaattgtgacaacgccgtcttcaataggggcacggagtgattctaaaacatcacgctgaaaatatgggaattcgtccaaaaacagaacgccgttattggcgagagaaatttccccggggcgggggttgctgccgccgccggttaaagccggcgcagacacagtgtgatgagggctgcggaaaggtcttttggtaataagcccttcttctttacctataagaccgcttattgagtaaagttttgtggtttgcattgcctccgcttttgaaaggggaggtaaaatcgagggcagccttttggcaagcatacttttaccggaaccgggaggaccgctcattaaaagattgtgtccccctgcggcggcaatttccaaggctcgttttgcccgactttgccctttgacatcccgaaagtccaaaagttcttcttccttttcaatctcggtgtatgtgtggggtgtaaggcggatttcccctttgaaaaaagatactatttcgtttacgctttcaatgccgaaaacaagcagaccgtcaaccacgctggcctcgttggcattgtcttttgaaacaaacaggcaggtaaaaccttcctcttttgcttttatcgccatgggcaaaatgccggaaacaccccttaaagtgccgtcaagagacagctgtgccgcaaaagaatattttgggtttatagggggaatatccccttttgccgctaaaataccaagcaggacaggcaggtcgtaaaccgcaccgctttttttaatttcgcttggggctaagtttacggttattcggctggcagggtaggtgaggccgctgttttttattgcgctgcgaacacgctcttttgcctcttttaccgcattgtccggcagacccacaatttcaaaacccggcaaaccgccggaaatatgggtttctaccgttacaacatagccgtctatgcccataacgccgaaactgtatgttttgctgaacattaaaatcaccttaccttttggcattttatctatatgatacagtataaaaataataatttcaacacaaaaagcggcaaaagttttgccgcctgcattttacaataagattgtctttgaaagatttacgccggaatcaagcaacatacaaatttcgtaataaatctcgcttatttcttccggtgtgcagtcaaatccgtttttccaccagcgctcagccaaacgataagccgtcatataacggcgcattaaaaaccaatgaagatattcgtttttaaccggattttcttcttcatagtgaatgtactccccgatggcgtctgcaactcttttggcaatatacctttcggtggagtttattaaaaggtcgttgaaaatacagctgaatatatttcttttttcatacacacgtgagaagaattcacagccgcttactatgaagttttccggcgtggcctcaccgcagagtataaggtcgttcattctttttatacattcaatgtacaaatccgtttcgtaatccactataaatttgccaaaggcatttttatcctcgtagttttggtaaaagcacatagtggtatagccggcttttttgcaaatatcgcttacataaattttgtcgctacacccgcttgtaagcaaatcggcatatgcgtttataaacgctttgtcactgcgctttaacttaactgcacataaactctccatattaaattaacatctccctatgtggtgtattgtacaccaatacgacaataaaatcaatgtgacgacataaatttctacaaattcaaatataaaaagtttataattttggttaatatgtaaacttttttacgaaatttaaaattctataaattgaaaatgtgaataaattgttataacattattacaaatcaagaggcaaggtgattgccttacgggtgtaattattgtaaaaggagaaaaattatggctaatactaataccactaaggatcttaacaggacccttaaaaaaggcgatttgatgtctatcgctgttggtcagattatcggcgccggcgttatggttatgtccattgcagccttgggtatgacgggtcgttccgttaatatcgctttcgttgttgccgctgttttgacttgtttcggctctttgccgtcaatcttcatgggctccaccattcgtgttatgggtggtttctattcacaggccgctatctttgtaggcgaccagtttgcaggttactattctgttattcggatattctcaagtatgtcacaggctatgtttgcaacaggtcttgtttcttacttgggttctcttattccggttatttacgaacatgagttggtattcgcggttatattatatatggcgttctttgtacttaactggttcggtacagattggatggctaaggtacagactttcatgttctacctgcttattatcgctcttgtaatgtttactgtattcggtgttccgaaggtacagtgggcaggttacttcggcaatgaacttttcggcgaacctttgttcacaaacggcgtttcaggtttgcttgaagctgcttcttatcttacattcgcaacaggcggcgctacggttatcgtttcattctcagccgaagccgttaacccgacaaaagatattcctattgttattatcttatctacattaggcgttgctactttgtacgcattcatgtcatcatgtatcggcggtatcttgccggcatctgaagttatggcagcaggtaacctttcagttatcgctaagatgattatgcctacaccttgctactacttctttatcatttgcggcgcttgcttcgcacttggtacaacacttaactctacaattgcatcatctgttaaatcggtgttcgccgctgcggctgacggttggttcccaccggtatttgcaagacttaataaacataaagttccttatgcttggcttatagtatttgcggttgttaacgtagctgcaatcgtatcaggtatgaatatctcaatgctgggtaaacttgttctctttatcgaaaacattaacaacgtgttccttatcgttggcgttatgaagttgcctaaactcttccctgaaccatgggaaagatcaccgttccatgtatctaatacaatgctttatgtattgttgtccttgtcagttgcagtaacgcttatgcaggcttacatgaactgccagaaccaggcaccttgggttatctattctaatataggcatgttcatattcgcatttgtttacgcaaagattatgcttaagagcggtaaagttaaggtttccgctaactacgagttgttgtaataaaaatcttgaatttattacaattttaaaaagtaattacacgatttgggcttagaatattgcgcagtgcaggaagcctaaaaagcatcacccgaaaaggggctgcgaaagcagcctctttttcgtgggcaaattttaattgcatttttgagataaattttaaaattttttgcgaatataattgaacgaaagtcgtttatgtgttattcttattacataaaatactcgtattaaataacggaggcaacagtatatgtacaaagacgaatatcggcgttggtgccggcaggttaaagaagattatcttcttgaagaacttaatgctattaaagataacgaccgggaaattgaggacagatttttattgaaccttgaattcggcacagccggtttgagaggcgttttgggcgcaggcacaaacagaatgaatatttacaccgttgcaaaggcgacacagggcttggctaactatcttttgtctgaggaagaacacccaaaggtggccatttcttacgattcaagaaatcgcagccgggaatttgccaagataagcgcacgggtgcttgcggcaaacggcattaaagtatatatctattcaactcttatgccggtgcctatgctttcctttgcggttagaaacacaggatcttcggcaggtattatggtaactgccagccacaacccggccaaatacaacggctacaaagtttacggcccggatggctgccaaatgacaagcgaaagcgcagacaaggttttaggcgagataaacaaacttgatatttttaaagatattaaaaaagttgattttgaaaaggctttggaagaaaaaaccatcgaatatactccggacagcgttataaatgcctattatgaatggtgtttgggacagatgatgagaaaagatattttcaaaaaagaacctttgcagttggtttacacaccacttaacggcgcaggtaacctgccggttcgccatgtgcttaaaacggcgggacttgaaaatatttccgtggtaaaagaacaggaaatgccaaacggtaacttccccacatgcccttatccgaacccggaaatcaaagaggcaatggccttgggacttgaacaggcaaagagggagaaagccgatattttaattgccaccgacccggattgcgaccgtgtgggtattgcggtaaaagaagccggggattatattatgctcacaggcaatcaggtgggtattttgcttgtggactacatagcaaaaacaagaaaagaacttggtacattgcctgaaaatccgattttggttaagtcgatagttacatccagccttgcggatcgggttgcaaaaagtcacggggttgaaacggtaaatgttctcaccggtttcaaatacataggcgatacaatcaaaaaactggaagaaaaaggcgaaaaggacagatttatccttggatttgaggagagctacggctatcttgtaggcacagaggtaagagataaagacgctgttgtggctacccttgttatttgcgaaatggccgcttattacagaagtataggttcttccgtttacaaggcattgcaggaaatttatcaaaaattcggttactatctcaacaaggttgattcatacacatttgaaggtctgcggggcatggacaaaatgaaagaaattatgtccgcattgcgtgcaaatccgcttacgaagttgggagactacgaagttgaggcaagagaggactacaaaactcttgttcacaaagacgaaaagaccggccgggtaacggatattaaattgccaagctcaaatattttggtttatatgttgcagggcggaaaccaggttattattcgtccttccggcacagagcctaaaattaaggtttactattcgataaaaggcaaggatcggcgggaagctgatatgatcaaggccgatattgacaagacgataaaatctgtattggcataattttgaaaatttgataaaaacacttgaaaaattttaaattgtgtgttatcatctttgagtaactatgggacagaggacggaaacccctgtcgatttgaaattgaggtgaataaaatgagagacatccatccaaagtacgaagaagctacaatcacttgtgcttgcggtaacgttattaaaacacgctccacaaagaaaaacatttctgttgatgtttgcgctaagtgccacccattctatacaggtaaacagaaagttgtagattcaggcggtcgtgttgacagattcaagaagagattcggtatcacagactaatgataaaaattcaagggcggtattttttaccgccctgttttttcgtttttaaaagaggttattttggcagattacaaaaccgttggacaggtttattctcggtcgatagaagaaaaaaagagcgagtttatccggtatatttcccacataaaggacgaggcggacgccgcaaactttttaaataaaataagaaaaaaacactatgacgcaaggcaccggtgttatgcctatattttaaaagagggcggtgtacagcgccaaagtgatgacggcgagccgcaaaaaaccgcaggtatgcctattttagaggttttgcgacattccgggctggaagatgttatcatagttgttgtaaggtatttcggcggtacgcttttgggtaccggcggccttgtccgtgcttatacggctgcggctcaaagtgctttaagcggtgcggaaatactttcttacagtttgtgtgtggatttggaaataaatatcgactatccgctgtatgacagggttgcggctttgtgccggagcgacggcggcaaggttatagataccgtatatgcggagaatgtaaaacttaaagtgagaatggtaagcggaacacagcaaaagttgatagacgaccttatgcctttgacaaaggggaaaatcccccatgtgagcgatgaattttatgaaattttttaagaatttttaaaaataaaggtttttttcaaaaaaaacggtatatagataataggagggatatttatgagagatacccacgggggcgaaagcccggtgtttgaaagtttctttcatcttatacatatccctctttaagatctttaaaatactgcttgattttaataggacaagcagtaaggcgtagcggtaaatattttactcgattataattgcggaaaggagagaattatggcaatacctcaatcatacatacaggaattgacggcgagaaacgacatatatgacacgatttccaaaagcgtgcaacttaaaagagccggcagattgtacaaaggactttgcccttttcactccgagcgcagcccgtcttttacggtgtacccggaaacacaaagttactactgcttcggctgcggtgccggcggcgatgtaattaaatttaccatggagataaattctttgtcctacatagaggctgtgagatttttggctcagggctgcggcatgagtatgcccgatgaggacgacggccgggcgagagttaaaagccgcattttacaaatgaacaaagatgcggccaggtatttttacgcaaaactcaacagcgaccggggcagagaggccagaaagtacctgcgcaacaggcagctttccgataaaactatcgtaaacttcggtctgggatattcaggcacggcagacgactggaacggacttataaattttttgcagtcaaagggttatactataagggagatgcaaagcgcatttttggccgcgcccaataaaagcggaaagggatttcacgatactttccacaacagaataatgtttccgattataaatttgcagggaaatgttattgctttcggcggcagaagaatgggtgaagaaggcggccctaagtacctaaacagctcggatactccggtttttaaaaagagcaacggactttttgcgttgaatttggcgaaaaaatccggcaaggattattttattctctgcgagggatatatggatgttatctccatgcaccaagccggtttcaacagcgccgtggcgtctttgggcacggctctcacacagcagcaggcaaggcttataggggattacaccaaaaaggttgtgcttgcgtacgattccgacgaggcggggcagaaagctacaaggcgagccatggaactttttgccaacgaagatgtgacggttcaggttttgcagatgaaaggtgcaaaggacccggatgagtttataaaaaaattcggagccgaaaaatttgaaatgcttatagcgggggcaagttccgctttggatttcaccttgtcgaagctgaaaaatcaatatgatatttcaaataccgaacaaagggtgcaatatcttaccaaggcctgcgatgtgttggcggaattgcacaaccctatacggcaggacgtttacagccggcgattggcacaggaaaccgccaccgacaaaagcgccatacttgaaatgataaaccgcaaagcacgcagtttgaggcgtaaagaagataaaaagcgggagagagaaatattaaattccggcgtaggcgcaaaaataaaggtggattacaggcaaaagggcaacacaatgccgaaagtctatgcgcaacagcagataatatgcggcatagtaaaagacaataccctttacccgacgattgcccaaagattaaagccggaaaatttcacggatacggccatgagaaacgcttatagtgaaatagaaaagatgatggcggaaaatttgcctgtgacatattcgtctttggcttacaggctgtccgatgaggacggcggcgtactgcctggaatttttgccagaaacgccgacaacagcccgacggtaaaggatatggaaagatttgccgacgaccttttgacggcaaaattgacccgggcagaggcaggcgagcggacggtggacgatttggcacagcgttttgccgcacttagggaaaagaaaaaataggttaaacgttttgtcttacaaagacaaggcttttaatatatggcgattagcttggcaaatcgccacaatgtaaggagaatgtatatgagcgcaaaagaaaagaaaattacaacaatagatgacttgttggaaacaggcaaaaaggccggcaagctcaccagcagtgagataaaccggtttcttgaaagcacggatttcggcgacgaagagatagataaaatctatgaaaacatcgagagcaagggcatcgaagttgtggacaccgacagtgaggaaatactcaccgaaagcaatatagaaaaatatcagaaagaacttgccaaagagggcgtaagcattgacgacccggttaaagtttatcttaaagagataggttctttccctcttctttctcttgatgaggaaattgagcttgcacaaaaaatcgaagaaggcgatgtaaaggctaaaaagagacttaccgagtgcaacctgcgtttggttgtttccatagctaagagatatgtaggcagaggcatgctgttcttggaccttatccaagagggcaatatcggccttatcaaagccgttgataaattcgattacaacaagggctataagttttcaacatatgccacatggtggatcagacaggctataacaagagccattgccgaccaggccagaacaataagaattcctgtgcatatggttgagacaatcaacaaagttaaaaaagtacaaagccggcttttgcacaaaaacggacaggaacctaccgttgaagagcttgcccacgaacttgatatgccggtggacaaggtgtccgaaattttaaagataggtcaggacccattgagccttgaaaacccggtaggcgaggaagaggacagccatttaggagattttttgcctgaccatgacacacctacaccggagagcaccgttgaatctatgcagcttaaagaacgggtacaggaagtgcttaaaactcttaccccccgtgaggctcttgttttgacattgcgtttcggccttgaagacggcagacggagaacccttgaagaagtaggccagactttgggtgtaacaagagagagagtaagacagattgaggcaaaggctttgagaaagatacaccacccaagcagaggcaagctgcttaaaggctttgcagacagccagtgatttaccgggcggccgcaataaaggccgggtaagttttacaaaatctttacttttataaatttgacatattgacaaaataagtgtaaaatatacttgttatgtagatttaaaaaacggaggtgcgcctatatgcacattacacgggaaactgattacgctataagaattgtttattgccttgcaaacacacggggcagaaaagatgccggtaccatcagtgaggaaatgggagttacactccgcttttctcttaaaattttacataaattggttaagtgcggccttgtaaagtcgtataaaggggccaagggcggatatgagctttcaaggccggcaagcgaaataaaccttaaacaggttattgaggccaccgaaggcacatataaaattgttaaatgtatcgaccctaactatgtgtgtcaatggaaaaagacaccggggctttgctctttcaggcgtgaattttcaagaataagcgaacaggtaaacgacgaacttgaaaaagtaacttttgatatgctttaataatttttagaatttaaacagacggtgattttaccgtctgttttgatttgtttgcaaaatgtttacaaaatgtttaaggaaaatttttagacaataaaggataatactgtacaatataagtaataaattagaataaatttaaaaattaaacaattggggttgtaactttcacgaaaggggctgttcaatatgagaaaatataatatttcaaagataacaatgtttaatcttatttggattttggcaggtattctgcttttgattgcggtttggattctcgataaaaacaatattgacggcgccggctctgtaatgacgaaaatttcgatattttatgttcagtttgcgcttgtggttgatcttgtatattgggtgtataaaagaattaaaagcataaagaccaaaacaaagaataaataaaaagaatgggttttgcgctgtgcagaacccattctctgttataaattattttacttgctttcgataacacggtatgatggagcttttatgttgttttccgacataatttccgttatctgctggtttaagtcatagaaaaccgtccagtaattttcctgcaatgtccacgctcttacggtaaaggcgaggctctgatctgtgccgccggaaagtcttgcaaagggaagtttgccttcctcttttataatcatagggtgtttttcaagaacagatataagcagattttgaattttaacagggtcttcgtcccaatcgtaggagaaaaccatatccacacggcggtatttttccgcagagtagtttacaacattggcgttcatcaagctgccgtttggcacggtgatgtgtttgttgtcggcggtgcaaagcaaggtgtagaaaagagaaatttcttttaccgtaccgcttacgccggcggcgtcgataaagtcgccccgtttaaatgggtgaaaagccataagcattataccgcctgccaaattttgcagcgcaccctgcaaagccatgcccacagccaagccgcaagaggccaaaacggttataattgaggccataggcacacccaacatatttattatggaaatacccaaaagcacatacaaaccgatttttacggtgctgagtatataattctttgcggtaacctctaacttgccgatgagtttgccgccatccagtaattttgttattttgtttatcgcccatttgcctacaaaaaacaaaataacggcaaaaacaatgtttgaacaggcttttacaatcgtttgaataacggcgtcaagtgttggattcattatataaaacctccgatttttcatttttttcatattatcacaagaaagtgaacattgcaatagcgcacaaaaaacattttgtgaatttatttaattttaccgttgacatattgacatagatgttatataattctatattgcacaataatgactaagtagacaaatttacgctatttttgtctaaaacgcagaaatttaaagcaaaaattctgctaaattcacaaatttgtgctatacggcaatacaaagtcttgtctgtaagttttttgtagtaattctgtgcaaagaagttgcaaacaagccatgcaaaaaccgacggttttgtattgggttaattccccggcaaaggcgcagtaattttgtgcgcacgggcaggtgggaaagcccgattgcctttgtaattatcatcacacaatatttatgaaggagtaaaataatggcaatagtaaaacctaccatgcttggcaccaccgagcgtatgaattttgccaaaatccatgaagttcaggaaatgccgaacctcatcgaagtgcaaaagtcctcataccagtggtttattgacgaaggtatcaaagaagttttcagagatacaggcgcaatcgaagaccatacaggcacccttgctttggagtttgttgactaccgtgttgaagaaaagacaaagtattcaataaaagaatgtaaagagcgtgatgtaacttatgcggcaccgcttaaagttacaatcagacttttgaacaaagagaccggtgaaatcaagcagcaggaaaaatacatgggcgatttgcctaagatgacagacagcggcacattcgttatcaacggtgcggagcgtgttatcgtatcacagcttgttcgttcacctggcgcatacttcaaactcgaccacgataaaacaggtaaagaattgtactccggtacagttattcctaaccgtggcgcttggcttgagtatgaaaccgatatgaacgatgttttctatgttcgtatagataagaacagaaaactgcctatcacatcattcttgcgtgctttgggtctttcttcaaacgaggacatcagagcagtattcggtgatgacgagataatcgaagcaacacttctcaaagacatcacatcaaacaaagaagaaggtttgttggaagtttacagaaaactccgtccgggcgaaccgcctacggttgaaaactcacagacacatattaacaaccttttcttcgacccgagaagatacgatctgtcaagattcggcagatataaatttaacaaaaagctctccattgcaaacagaattgcaggcgaagtttccgccgaaatggtagtttcacctctcacaggtgaagtactctgcaacgagggcgacaagataagcgaagaacttgcctatgtaatcgaaaacaacggtgtttccgtaatgcacgttaagaaagaggacggcacagttgtaagagtagtttcaaacggtatggttgactccaaggttatcacaggtttggaacttgacgaagaaggcattaacgaaaaagtttcctttgctgtattgaaagaacttttggatcaggccggcgacgacaaagatatgctcagagagcttatgattgccaaccgtgaaagacttattccgaaaaacattacaatagatgatatttttgcaacagtcagctacctgcttggccttgcccacggcgtaggtctttatgacgatatcgaccaccttggcaaccgtcgtatcagaagcgtaggcgaacttttgcagacacagttccgcacaggtattgttcgtatggaaagaacaatccgtgagagaatggatcagcaggacagggatacaatcacacctgaaagccttatcaacatcaaacctgtaacggctgttatcaaggagttcttcggctcttcacagctgtcacagttcatggatcagacaaaccctcttgccgagcttactcataagagaagactttcggccttgggtccaggcggtctttcaagagaccgtgccggatttgaagttcgtgacgtacattattctcactacggcagaatgtgtcctatcgaaactcctgaaggcccgaacatcggtttgatttcctacattgcaacttacgcaagaattaacgtttacggctttatcgaagcaccttacagaaaggtcgataaagagacaggcgttgttacaaacgaagttgtttacatgacagctgatgttgaggacagatatgttgttgcacaggctaacgaacctttggacgaaaacggacactttgtaaaggatcacgtagctgcccgttaccgtgaccagattcttgaagctccgagagacgaaatcgactatatggacgtttcgccgagaatgctggtttcagttgctacggctatgattccgttcttggaaaacgatgacgccaaccgtgcccttatgggtgccaacatgcagcgtcaggctgtgccgcttctccgcccggaagcacctattgttgcaacaggtatggaatacaaggcaggttacgactcaggcgttgttgtcatcgccaaaaacgacggtatcgtagagagagtaagcgctgataaaattaccattcgcacaggtaaaacaactaccgacgaatatgatattattaaatttatgcgctctaaccagggcacatgtataaatcaaagacctattgtttccgaaggcgaaacagttaaaaaaggtcaggttattgccgacggcccgtcaacagaccacggcgaaatttcactgggtaagaacgtacttgtaggttatacaacttgggaaggttacaactacgaagacgccgttctcatcagtgagagaattgtatcggaagatatttacacttcaatccatattgaagaatttgaaatcgaggccagagaaacaaagctcggaccggaagaaatcacaagagaaatcccgaatgtgggcgacgacgcacttaaaaacctggatgcaaacggtattatccgcataggctccgaggttacaagcggcgacatcttggtaggtaagatcacacctaagggtgagacagaacttacacctgaggaaaaacttttgaaggctattttcggcgaaaaagccggggatgtaagagatacatctttgaaagtacctcacggcgaatacggcacagttgttgatgttaagatattcacacctgaaaacagcgacgagatcaagcccggcgttttgaaggttgtaagagtttacatcgcacagaaacgtaagatttccgtaggtgataagatggccggtcgtcacggcaacaagggtgttgtttcaagaattttgccgagagaagatatgccgttccttgaagacggtacacctcttgaccttgttttgaacccgttgggcgttccttcacgtatgaacatcggtcagattttggaagttcatctcggttacgccgcaaaagctttgggctggaaggttatgacacctgtatttgacggcgctaaggaaacagacatttttgaactgttgaaagaagcgggattgtccgagacaggtaaggttaaactttacgacggcagaacaggcgaggcatttgacaaccctgttacggtaggttacacatacttccttaaattgcaccacttggttgacgataagatgcacgcccgttcaatcggtccgtactcacttgttactcagcagcctttgggcggtaaagctcagttcggcggccagagattcggtgaaatggaagtttgggctttggaagcttacggtgccgcttacaccttgcaggaaattttgactgttaagtcggacgatatggtaggtcgtgtaaagacatacgaggctatatttaagggtcaggaaataccgaaaccgggcattccggaatcattccgtgttcttatcaaggaaatgcagtcacttgctcttgatgttcgtgttcttgacaaggagggcaatgaagttgaccttagacagaattacgacgaggacgacggaaagatagaaacagcccttgaaataagcagtgagttcgacgagagcgaagctgctgtaagaaacggctacaatgtgggcgaaaacccggaggccgatttggactctgagttctcttcccgggcagaaactgttgcggatgagacagacgactcggattttgaataaataaaccgtttgtatcatcacagggcgtataacggttaggattacacgcccttcgtaacaattaagaaaggaagttttgcgaaatatgtcaaataatacttttgattctataaaaatcggcattgcctcccctgaaaaaatcagagaatggtctgctcagggcagagatttgaacgacccgagatttaaagatttcggcgaagttacaaagccggaaacaatcaactaccgtacattgaagcctgagagaggcggccttttctgcgaagttattttcggacctacaaaggactgggaatgccggtgcggtaaattgaacaagaaccgccacaagggtcaaatctgcgacaagtgcggcgttgaaagcacaagagccaaggttagaagagagagaatgggccgtattgaattggctgctcctgtttctcacatttggtacttgaaagccgttccgtcaagaataggccttatccttgacgttacacctaaggcacttgaaaaagttatttacttttcatcatatatagttttggacaagggcaatacggctcttgaagacaagcagcttttgagcgaaaacgaatacaaagacatggttgaacgctacggcgaagatatgttcagagccggcatgggcgcagaggcaattcttgaattgctgcaaaaaatcgaccttgatcagttgtccgctcagctcaataaagagcttgaaacagccagcggtcaaaagagagttaagctctacaagcgtcttgaagtttgcgagagcttccgtcggtcaggcaaccgcccggaatggatgattctcactgttttgccggttattccgccggatctccgtcctatggttcagcttgacggcggcagatttgccacatcagacttgaacgatttgtacagaagagttataaacagaaacaaccgtttgaagaaacttttggaactttccgctcctgacattattgtaagaaacgaaaagagaatgttgcaggaggctgttgacagccttatcgacaacggcagaagaggccgtgcaatcacaggcggcacttcaaacagacctcttaaatctttgtctgatatgctcaaaggtaagcagggtcgtttccgtcagaaccttttgggtaagcgtgttgactattcaggccgttcggttatcgttgtaggacctgaacttaaaatgtatcagtgcggtttgccaaaggaaatggcacttgaactctttaagccgtttgtaatgagagaattggttgaaaagggctatgccacaaacattaagaatgctaagaaagttgttgaaaaagccggctcggaagtttgggacgctttggaaacagttatcacagaccacccggtatttttaaaccgtgcccctacgcttcaccgtttgggtattcaggctttccagccggtgttggttgaaggccgtgcaatgaagttgcacccgttgacatgtacagctttcaacgccgacttcgacggcgaccagatggctgttcacgtacctctttcaaaagaggcacagaacgaggcaagaaaccttatgcttgcatcgggcaacttgcttaaattgtcagacggttcacctgttgccgttcctacacaggatatggttttgggttcatactatttgacaatggtaaacgataacgacaagggcgagggcatggtgttcagagatgaacaggaagctcttatggcttacgaaacaggtatcgttacacttcaggcaaaagttaaaataagaagattcttgaaggatgaagagggcaacaatgttcttgacgaacagggtcagccgatatcaagaattattgacacaaccgtaggtcgtcttatattcaacacacctatcccacaggatttgggctatgttgacagaagcaacccggataatttgcttaaacttgaaattgaattccaagttggcaaaaagcagttgggcgatattgttaagagatgtattgacatccacggcacaaagaaatcatctgttgttcttgacgctatcaaggcacagggttaccactactcaacaaagtcaggtattacggttgccgcttgtgacgctaccgttccgcctaagaagaaagaacttatcgccgaagcagaaaaggaaattgctcagacaagaaagctcttcaacaagggcttgctcagcgaagaacagagatataagagcgttatcgccacatggaacaagacaactgaccttgtttctaaggctcttgcagacaacatggaggcaagaaacccgatttggatgatggccgactcaggcgctcgtggttctatgaaccagattaaacagcttgccggtatgcgtggccttatcgcttctacatcaggtaagacaatcgaaattcctatcagagccaactaccgtgaaggccttaatatcttggaatacttcatttctgcccgtggtgcccgtaaaggtttggcggatactgctcttagaacagccgactcaggttaccttacacgtcgtttggttgacgtttctcacgatgttattatcagagaagaagattgcggtgccaaacatggtatttgggtaagcgaaattcgtgacggcaacagccttatcgaaccgcttgcagacagaattgtaggcagataccttgtaaacgacctggttgacgaaaagacaggtgaagttcttatttcaaaagacaagatgatggacaaggaagatgttgctatcatatccaaggcattgggcaaatacgacgaggaaacaggcaagtacgatttgagagatgttaaacttgaaatccgcagcgtgcttaactgtaaagcaaaaatcggcgtttgtgctaagtgctacggcgcttcccttgcaaactggcagcctgttccgataggcgaagttgtaggtatcatcgccgcacagtcaatcggtgaacctggtacacagcttacaatgcgtactttccacacaggcggtatcgcatctgcagcggatattacacaaggtttgccgcgtgttgaagaattgtttgaggcaagacgcccgaagatgatttcaattatgtccgaaattgcaggtcgtttgagaattgaccagacaaagaagggcacatatgcggttatcgaaggctttgacgacaacggtgctcctgttgaaaagagctaccttatcccatttgaccagcgtctttcatcttcaatttacgacggcgttgatgttgaaaaaggtgcttacctgacagagggttcagccgcacctgccgatattttggctatcaagggcagaacagctgttgaagattacattatctccgaagtacagaaggtttaccgtgtacaaggtgttgaaatcaacgataaacacgttgagatcatcgttcgccaaatgatgaagaaagttaaaatcgaggacggcggctcaacagacttgatgggcggttcacttgttgactataaagactttaaggctaaatatgaagaagttcgggaaagacttgcaaacggcgaggagggcttgagagagccttcggcaacagatatcgttctcggtatcacaaaggccgctttggcaacagagagcttcttgtcagccgcttcattccaggagacaacaaaggttctcacagacgccgctatccgtggcagagtagacaccctttccggtcttaaagaaaacgttattatcggtaaacttattcctgccggcgctacggttaacgagcgtgaaagagaagagatggaggaagatgtttctcctattgccggtaattaacttgcaaatttaaaaatattttgaatattttgaaaaatatttaaaattaactattgacattattgcgccgacagtgtacaattactttcggcgcaatttgttttgcgtttggtttttgtgtgtttcgcggcacacttaaatgataggaataattgtaataggaggaattttgcaatgccaacatttaaccaattggttcgtaaaggcagagaagtacaggttaaaaaatctacagctcctgctcttcagaagggttacaacagccataagaaggtagctacagatcagtcagcacctcagaagcgtggtgtatgtacagctgttagaacaatgacacctaagaagccaaactcagctttgagaaaagtagccagagttcgtctttcaaacggtatcgaagtaacatcttacatccctggtatcggtcataacttgcaggaacacagcgttgttctcgttcgtggcggccgtgttaaggaccttcctggtgttcgttaccacaccattcgtggtacattggatacacagggtgttgccaagagaatgcagagccgttcaaaatacggtgcaaagcgtcctaaggcaggcgcagctaaaaagtaatttagccgcaatttaattttagtaaaatgacatttttatgccaaataagggctttatatagataattccctttttgtgcggacagaagtttttttacacttttgagtaccaaagatatcataaatttaatgaaggagggaagaacggtgccaagaagaggtaatattgcaaagagagatgtacttgcagatccgatttacaattctaaattggttactaagctcgttaacagcatcatgcttgacggtaagaagggcgttgcccagaaaatcgtttacgatgcattcaatatcgtagctgaaaagacaggtaatgatcctctcgaaacatttgaaaaggcaatggaaaacattatgccattgcttgaagttaaagcacgccgtgtaggcggtgcaacataccaggttccgatggaagttagagctgaaagaagacagacactcggtttgcgttggctcacacagtattcaagaagcagaaacgagaagactatgcgtgagagacttgcaggcgagattatggacgctgctaacggcaacggcggagcttgcaaaaaacgtgaggatactcacaaaatggctgaagctaacaaggctttcgctcattacagatactaataaccacttgctttatgccggctgtatggccggctgaggcagtttgaacaatcaattaggaggaaaatatgccaagagacgtttcacttgaaatgaccagaaatatcggtattatggctcatatcgatgcaggtaaaacaactactacagagcgtattctctactacactggtgttaaccacaagatcggtgaaactcacgatggtgcatctacaatggactggatggttcaggaagcagaaagaggtattactatcacttctgctgcaacaacttgttactgggcacattcagattatacagatccggcactcatcaagaagaaccgtcacagaattaacatcatcgatactcctggccacgttgactttacagttgaagttcagcgttctttgagagttctcgacggctctgtttgcgttcttgacgcaaagggcggcgttgaacctcagacagaaacagtttggagacaggcagacgaatacaaagttcctagaatggctttcatcaacaagatggacattatgggtgctaacttctacaactctgtacagatgatgaaggacagacttaaatgtaatgctgttccgatcatgatcccaatgggttccgaagattcttatgttggtgaaatcgaccttatcaaaatggttgctatcacttacgataaaaacgacattcacaagctttacgaaaacgaaattcctgcagaatatgcagacaaggcagctgaaatgcacgatgctctcgttgagtcagttgccgaaacagacgaagagcttatgatgaagtatctcgaaggtgaagaactcaccgttgacgagattaagaaagctatccgcaaggctactattgaaaacacaatggttcctgttctctgcggcacagcttacagaaacaaaggcgttcagagacttctcgacgcagttgttgactatatgccggctcctacagatattccggccatcaaaggtatcaatcctgagacaggcgaggaagttgagagccactccgatgacaatgcaccattcgcagcattggcatttaagattgcaactgacccgttcgtaggtaagatttgctacttccgtgtttattccggtaaggttgacgcaggttcaactgtttacaactcagtaaaggataaaagcgaaagaatcggccgtattttgcagatgcacgctaaccaccgtcaggatattgacacatgttacgcaggcgatatcgccgcagctgtaggccttaaaaacacaacaacaggtgatacactttgtgatgaaaaacatccggttatcttggaatcaatgaacttccctgaacctgttattcgtgttgctattgaacctaagacaaaagcaggtcaggaaaagatgggtattgctcttgcaaaacttgcagaagaagacccgactttcaagacatatacagatgaagaaacaggccagacaattattgccggtatgggtgaattgcaccttgaaatcatcgttgaccgtcttctccgtgaatttaaggttgaagccaatgttggcgaacctcaggttgcttacagagagacagttaagggcaatgccgacgttgatatgaagtatgcaagacagtcaggtggtaaaggtcagtacggtcatgttaagatcaaacttgaacctaacgaacagggcaagggatatgaatttatcaatgctgttgtcggcggcgctattcctaaggaatttatcgaacctgtaaaccagggtattcagggcgctatgcaggcaggtgttcttgcaggttatccggtagttgacgtaaaggtaactctttacgatggttcttaccacgaagttgactcttcagaaatggcctttaagattgccggttctatggctttcaaggaagctatgagaaaggcaaatcctgtattgcttgaacctatcatgaaggttgcaacaattattcctgacgaatacttgggcgatgttatgggtgactttaacagccgtcgtggtatgattcagggtacggaagcaagaccgggtgcacagcaggtaaatgctcttgtaccgctttcaaatatgttcggttacgctacagacttgcgttcaaagacacagggtcgtggcaactatgtaatggaaccaagccactatgcagaggttccaaagtcaatcgctgagacaattatgtctaacagagctaaaaaagattgatttttcatagatttttgacagtttaattacaataatcccttgatttttcgagggattattgataaaatgattttagacatttttcatttaaaataggaggatttttcaaatggcaaaagcaaaatttgaaagaactaagccgcatgttaacattggtacaatcggccacgttgaccacggtaagacaactttgacagctgctatcactaaggttttggctatgaagggcgatgctgaatttacagactacgctaacatagataaggctcctgaagaaagagaacgtggtatcactatcaatacttcacacgttgaatacgaaacagacaaccgtcactatgctcacgttgactgcccaggccacgctgactatgttaagaacatgatcacaggtgctgctcagatggacggtgctatccttgttgtttctgctgctgatggcccaatgcctcagacaagagaacacatcttgctttcaagacaggttggcgttccttacatcgttgtattcatgaacaaggttgaccaggttgacgacccagaacttctcgaactcgttgaaatggaaattcgtgaccttcttaacgaatatgacttcccgggcgatgaaacacctatcatcaagggttcagctcttgcagttctcgaaagcacatctacagacatcaatgctcctgaatacgcttgcattcttgaattgatggatgctgttgataagtacatcccaactcctgaaagaacatctgatcttcctttcttgatgcctgttgaagacgtattcacaatcacaggtcgtggtacagttgctacaggtagagttgaaagaggtacaatcaaggttaacgaagaagttgaaatcgttggtctttctgacgaaaagaagaagactgttattacaggccttgaaatgttcagaaagttgcttgacttcgctgaagcaggcgacaacatcggtgctttgctccgtggtatccagagatctgaaatcgaaagaggtcaggttctctgcaaaccgggttcaattcacccacacacaaagtttgtaggtcaggtttacgttcttaagaaggacgaaggcggccgtcacacacctttctttaacaactaccgtcctcagttctatttcagaacaacagacgttacaggtgttatcgaacttcctgaaggcgttcagatgtgcatgcctggtgataacgttgaaatgactgttacacttatcacaacaatcgctatcgaagaaggtctccgtttcgctattcgtgaaggcggcagaacagttggttcaggcgttgttgtaaagattgttgaataatacaggctttaatttaagtctttatttaaaatctaaatagctctaagcccctttacacaagtaaaggggcttattgttatatggttttgtgcaaaaatgagaaagttgtaaaaaatcacaaaaaaggttgattatttgtcggttttgtcatataatagacaaaatatttaaaaaagctttgtaataaatttgttttattcggggtatgtggaatttatgcgttgtagtatagattccaatttttaaatatcttgctataaaattcctgtaaataggccgaaattcttatttacaagaactttatttaggtggcaaaaaccacaaaattgggggtttgccttatcacttacagttaatgaaaaaggggtaaaaaagatgagcaaaattttaaaagaagcacttacttttgatgatgttctgcttgttccgcagcattcaacagttgttccggcagatgtgtcaacagtaacaaaactcagcgacaaaatcacacttaacgttcctatgatgagcgcaagtatggatactgttacagagtcaagaatggctattgccatggcacgtgaaggcggtatcggtattattcataaaaatatgcctatcgaaagacaggcagccgaggtagataaggttaagagaagtgaacacggcgttataacagatccgttctaccttacagctgaccacacagttgcagacgcaaacgaacttatggccagatacagaatttcaggcgtgcctattgttgacgaaaacaaggttcttatcggtattatcacaaacagagatatgagatttgagcttgatatgtcaagaaaaatcggtgaggttatgacaaaggaaaatcttatcacagctaaaccgggaatttcacttgacgatgcagaattgatcttgaagaaacacaagattgaaaaacttcctttggttgacgataacggcgtccttaaaggccttatcacaattaaggatattgaaaagagagttctttaccccaagtcagcaaaagacgcaaacggcagacttttgtgtggtgcggcagtaggtatcactaacaacatggtagagagagcaacagcattggtaaatgcaggcgttgaccttttgtcaatagatactgctcacggtcacagcgaaaatgttcttaaagcagttaaaaagttgaaggaattgttccctgaagttacacttatggcaggcaatattgccacacctgaggcctgtgaggctttgattaaagccggtgcagatatcgttaaggttggtatcggcccaggttctatttgtacaacacgtattgttgcaggtatcggtgtaccgcagttgacagctgttatggactgtgccgaagtaggcgaaaaatacggtattcctgttattgccgacggcggtattaaattctccggcgatattacaaaggctatcgccgcaggcgcatctgccgttatgatcggttcattgtttgcaggtacagaggaaagccccggagaaacaacaatttacaaaggcagaaacttcaaagtttatcgtggtatgggttcttccgcagctatggcaaacggttcaaatgacagatacttccaggacggcaagtcaaaatttgttcctgaaggtgttgaaggcatggttccttatcgtggtcagttgaaagatattgtatatcagttggttggcggtttgcgttcaggtatgggctattgtggcactgcaacaattaaggatcttaacaagaacggcgtattcgtaagaattacaggtgccggtcttaaagagagccatcctcatgatattcttgttactaaggaagaaagcaactattcaataggcgattataacaagtaattttaagggcgacaccccatggtgtaaatatgaggtgttgccctataattatttattttacgatatttaattataaggagattttatgtcacaggaaatgatagtgattgtcgatttcggcggtcaatataatcagcttatagcaaggcgtgtgcgtgaaagtaatgtttactgcgttgtaaaaccttacaccacaccttttgaagaacttatggccttaaatcctaaaggatttatttttacaggcggcccggacagcgtttatttgccggattcaccgcacccggatacaagaattttcagtcggggtattccgattttgggtatttgctacggctgtcagttgttgagccatcaccttggcggtcttgtaacagaggcacaggacgcttccgcaagggaatatggcagcacagaaacatattttgatacatcttgcaagctctttaagggtatgccggaacagagcataacatggatgagccacggtgattacatggctaaagtaccggaaaattggaagcttgttgcccacagcgacaaatgtccaaatgtaggtatcgccaatgaggagttgggtttctacggcgtacagttccacccggaagttaaccacacggagtacggaaaaaatataatctctaacttcctttatgaagtttgccactgtgcaggcgattggaaaatgggcagttataaagatacggctatcaagcaaatcagagaaaaagtcggcaacggcaaggttttgcttgctctctcaggcggtgtggattcatctgttgcggcagctttgattgccgaggcagttggcaaccagcttacctgcgtattcgttgaccatggtcttatgagaaaaaatgagggtgacgaagttgaacaggctttctcaaaatgggatataaatttcgttcgtgtgaatgcggaagaaagatttttgactgctcttaaaggcgttacggaccctgagagaaagagaaagattatcggtgaagaatttatccgtgtttttgagattgagggaaagaaaatcggccaggttgactacctcgcccaaggcactatttaccctgatgttattgaatccggtttgggctctgccgatgtaatcaagagccaccacaatgtaggcggtttgccggattatgttgactttaaagaaatcatcgaacctttgagaatgctgtttaaggatgaagtaagacagcttggtcgtgagcttggcttgcctgaatatcttgtaatgcgccagccgttcccgggcccgggtctcggcatcagagttttaggtgaggttacaaaggaaaagctggatattctccgtgatgccgatgctattttccgtgaggaaatcgcaaacgcccaccttgaatacagcattaaccagtactttgcggttctcaccggaatgaagtcggtaggcgctatgggtgaccacagaacttacgagtacacattggctttgagaggtgttacaaccactgactttatgacggcagattgggcaagaataccatatgaagttttggataaggtttctataagaattgtaaacgaagttgcacatataaacagaattgtttatgatgttacatcaaaaccaccggcaactattgagtgggagtagttcccattggtttagatgtgccgaaaagcccagtatttatgcgggtttcgggacatggcacttttcgggcaaccgtttttgcaacacttttgcaacactttttttcaaaaacgtgttttcgggcagatgaaatagtcccccttggcttgcaactaaacctaaaaatcgcataatttttaaggcttttgccctgttttgggcagaagccttttttgtatatttgatagaatttcctctttaatatatcatcaaatcagataaaaacagcgtcagcgtgaaaaagcctatcgtgagaagcgaaaggaaaaaaatttgctgaaaacggtgacaaaatcgtcaaaacaaaagagtgtcctcattgtcagacagagtttacccctacaagcaatcgacagattttctgctcaaagaattgttgctatcaggcaaggcaggataagacgaaagccgacagagaagcggaaagttatatgaacactttgccgaaattgatacctcggttcgtgatatggcggaatatctgataaaggaaatggcaaagaagcagggtgtaacggaagaactgaaagcaacggatatgatgagatggataggattgatgaataacattcgagcctgtgccgatgagattgtattgaatgatattgtgtattcctaacggataccaaccgaagaagaactgctgtcagtcgatggcagtttttcttttttggcaagtattcaagaagtcattaagttgcgagtatagtcgaagtggtagaaaaatctataaagatatggtatgatacttttgattaaaaacaataaatgagaatttgttgagggaagccaaatgaaagaaaaaacttatcatactcgatgcggaacgattcactattgggcaagcgtgtcaaacccggatgaaattacccttgtttttctgcccggattgacggcagaccatagattgtttgataagcagattcagtatttcgagaacaggtataatgttatcgtctgggatgcaccggcacacgcttcctcatggc

SEQ ID NO: 552 - DNA, 32285 bp, Unknown
  16S sequences of unknown bacteria
atagtcaagctgttgctgaacggtgcaggtttgttcttttattaaaatccccgagaaaaaagtgaagaacccaaggattagcggggaacggggagcaaagagcggaggctgccgggcggccggaagggtgaaaaccggtggcgggaatgtgaagattttgctccccggaacgaagatataaggcttagcggggagaggagagcaaaccggccgccccaaggtgctgccggcccaacggttgtgcggtcgccggcaaccgacaatggaattatccccttgacatataccccgtgggggtatatgatgaagacgaagagataccccgagggggtattcagaaagggaaccaacatggacaacgaacacaacgaaatgatagagaaatccagggaacaatcctgcgagaaatcccgagaagaatcttgcaagaactccggcgagagctcctgctgctgcgggacgcggcacaagaaaaggacggaagcggagcagaaggcattgcttacccggctgcgtcgaatcgaaggacagattcggggcttggaaaagatggtagagaacgatgcctactgcccggatattttggtgcagtcttctgcggccaccagtgcattgaacagcttcaacaaggtgctcttgggatgtcatatccgaagttgcgtggccgaagacatccgttccggcaaggacgagactgtggatgaactgtgcgagctgcttcagcgcttgatgaagtagaataaggagggttatattttggaacaatatatcgtaacgggaatgacctgcgccgcctgccaggcccacgtggagaaagccgtgagcggcgtgccgggggtggaccgcgtgaacgtatcgctgctgacccattccatgacggtggaaggcgcagcaacgccggagtcagtaatttctgccgtacagaatgcgggctacgatgcggagcaaaaaaaagaatccgccgggcagggacgtccggggatgaccgagcgttttcaggccgaggaggatgccctccgggatcgggagaccccgaagctccttcgccggttaaaactttccatcggcgtgcttttggtgctcatgtacatcaccatgggccacaatatgctggactggccggtgccggaatttctgaaccacaaccacattgggcttggcatttttcagatgctgctggctctaatcatcatgaccatcaaccgggacttcttccgctccggcttcaaatccctgcggcacggagcgcccaacatggacactttggtggccctgggctccggcgtatcctttctatggtccctgttcatcctgctgaagatgacctatatggtcaccgacggcacggataacatggcactgatgccgctgtaccacaaccagctgtacttcgaatccgcggccatgattctggcccttatcactatcgggaagacgctagaatccatttccaaaggccgcactaccgatgccctgaagaacctgctgcagatggcgccaaagaccgcattgctggaacgaaacggcgagctgcaggaagtgccggtggattcggtacagatcggcgacatctacattgtaaaatccggcgacgccattccggtggacggagtggtgctggaaggtacggctgccgtagacgaatctccgctgacgggagaatccgtaccggtggacaaggcgccgggagattccacctccgccgccaccatcagccaatccggttatctccgctgccgggccacccgggtgggcgaggataccacttttgcccagattatccggctggtaagcgatgcggcgggcacgaaagccccgattgcccggattgcggataaagtctccggtattttcgtgccggcggtaatcggcatcgctgtcctggtcttcgctctttggatgctgcagggggcggcggtgtcccaggcactggaacacgccatcaccgttctggtaatctcctgcccttgcgctctgggtctggcaaccccggtggccatcatggtgggaagcggaatgggtgcccggaacggcatcctgttcaagacctcggagtctttagagaatgcgggtaaaatcaatatcatcgccctggacaagaccggtaccattacggaaggtcggcctagggtgacggatctccttccggcggaaggaatttcggaagaaacgcttttgaaatatgccgccgcgctggagcaccgcagcgagcatcctctgggaaaagccattgtggaatatgccggagaaaaggcgggggagacggaagtgaaagatttccgagtactcccgggaaacggcttgcaaggctccgtggatggcggtactatagtgggaggttcagagaaatttatccgaagccggacttccattccggaggaattcacgaaggcctccgcccggttggccgcctccggcaaaacgccgatttattttacccgggataatgagattctgggaattatcgccgtggcggatacggtgcgggaggattcccgggaagccattgcgcagctgcggaacatgggcgtggaagtggtcatgctcaccggggacaaccggaacacggcggaagccatcggccgagatgcgggcgtgaagcatgtcatcgccggggtgcttccggacggaaaggagcaggtgattcgccggcttcaggagcacggaaccgtggccatggtaggggacggaatcaacgatgcaccggccctgacccgagcggatatcggtatcgccatcggcgccggaacggatgtggcggtggactctgcggaagtggtattgatgaattcccgcctttccgacgtggcggcggccgttcggctgagccgggccacccttcggaacatccacgaaaacctgttctgggcctttgcctacaacatcctgctgattccaatggcagcggggctgtattccgggattagcttgaacccaatgtggggcgcggcggccatgtctctgtccagttttacggtgtgcatgaacgcccttcgcctgaaccgtttccggatgcaggataccggcaaggatcggccgcttcgaaaacaggcgacgtcgatggaagaaatcgaatatgaaatggaatcgttgttgaaatctaatgaaacagaggaggaaaagaagatgacaacagaagtaaagattaaaggaatgatgtgcccgcactgcgaggctcacgtgaagaaggcactggaggcactggatggcgtggagagcgcggcaccggataaggatgccggcaatgcggtgctgactctttccaaggatgtatccaccgatgcgatcaaagcagcggtcgaagatgcgggatacgaatttctgggaatgaccgaataagaggtgtaatcctgattctcatcggaatcgaaatttttgtaaccggaatattgataaacagaaaacggcgctcctgacgggttcaggagcgccggatgttttttgcgttcaatccggggatagggtataatggggcatagtttcgaaatcaggaggaatgggaaatgacgaatgatacaaaaaaagaatggacgccgggcaagcgaatccggcacggattgatatacgggttttgcacggcactgctggtgctggtgctggaaggcgcgctgcgggattacgtggtggaaggggccttccacctgaagctcgacaccacggccggtggcctgatgctgggcgtgctgatggcgacggtggaggaatttctctgctggtattttctgtgccgcagtgagaagcagccgggattcgaccggtatgccttccggagctatctccattcgggcttctggattaccctgggctttgtgggactgctctcggcactcaccactttgggcggaggtgcggttccggcggacgtgcgctggaacaccattttgagcccgttcttcaccatggtgatcatgagcttcctgttgtggaaggggtctcgggaaggcgcgatgattgttccgtggttcatccacgctttgtggctgtgcccgctgctgatggtgcttccgggaaatgaagttacatccgatatggaccggaccgtggtgaccttcgttcttgtttttaccccggtgttctacgtggcggcgctggttctttttataagaaaccgaaagaaggtgcgggacccgaaggagtacattccggcgggacatgccgtttcccggcggggcaagaagaagtcccgagaggaggaacagccggcgctgagccaggcgtttgcggaggaggcaccggcggaatctgcggaagaagcggaagcggaggacgtgccggatgttgcggaggcgacggaccggtatggggcagaaaaagtggaagatcactacctataatatagaagaaagggaatgcgtatgacgatgcaggagcatagagagttggaagtaaatgaggtgctgcacgggtttcgggtgcagcggcgggtgcctttggaggagttgcagggaaccctgattcagatggagcacgaagccaccgggctgaagctgatttggctggaccgggcggaggagaacaagacctttgggattgccttcaagacgctgccgtggaacgatacgggagtgttccacattctggaacattcagtgctgtgtggatcggaccggtatccggtgaaggagccctttgtggagctggtgaagaattccctgaacactttcctgaatgccatgacttttccggacaaaaccttgtatccggtggccagcaagaataacaaggatttcatcaatctgatgcgggtgtatatggatgcggtgctgcatccggccatctatcggaacccgaacattttccggcaggagggctggcactacgccttcgacgaagccgggacgccgtcttacaagggcgtagtgttcaacgaaatgaagggggccatggccaacgccgacgagctgctggaagatgccatgtgtcaggcgatgctgccggatacgccgtaccgattcaattccggcggcgatccgaaacacattccggatttgacctacgaggatttcatccacacccatcggaaattctatgcaccgtccaacgcctacatctgcctggacggaaatctggatatcgacgaagtgctgggcattctccagaacgaatacctgaaggattttggacggaccgagccggttcacttcccgccgaaacaggcgccggtggacggcggaagccgcagggttacctacgagattgcgccggatgaggagaacgaaccgcggatgcggattgcctggggcggcgtgatcggtgactacgatgaccgggagaagctggtggccatgcacgtgctgcacagcgtcatcgcccacaacaaccactccccgctggtaaaatgcattctggacagggggctggccgaggacgtaatcgtctccgtgatggattcggtgcggcagccctacgcccgtatcgaagtccggaattacgcaccggagaatacggatctcatccgcaccctgattcacgatgaactgaatcgtctggtaaaagaaggattggaccgggaggagttggattccgccctggccaatacggaattcatcatgcgggaacgggatttcggatcctacccatcgggcttaatctacagttttaatatcctggagagctggctgtacggcgggaagccggaagccaacctgcaggtgggagatattttcgagaagcttcgggagaaggccaatcaagggtatttcgaggaactccttcgggcggtttatctggataacgatcaccgctgtgaggttattatggaaccttcccgcagggcgggggaggaacggcgaaaggcagaggaacagcggcttcgggatgaggaagcatcctgggattcggcggagaaggaagcccttcagcgtcaggaaagagaactgcagaaatggcaagaggaaacggattcggaggaggatctgcaatgcctgccgcacctgactttagcggatattcaggatatgccggaggatataccgacggaagtgcgggatatggaaggcaccaaggtgttggtgcacgacatcccaaccggcggaatcctgtacgtaacggcgttcttcgacattacggaccggaccgaagaagagctgtctcgaatttccttcctgacggaaattctgggcaaaatcgccacccgacggtccaccccgacggatctgctgaaccggagccgtctgtactgcggaaatattgattttagcacggcaacattctcgaagaacaacgacggagaatcctataaagcgaagctggttgccacctttagcaccctgccgaagaatttggaagcggcggtggccttggtaacggaagtgctgagtgaaacgcagctgctggacgaagaggcggttcgaaatttgctgaaacaggaccgaggagatatgcagcagcagatggccatggcgggccattctctgggactgcgccgtctgacggccatgttcaccggcgccggtgtggtaaatgaatgcaccgacggactgacctattacgagtggatgaagaggcaggaagagaattgggactggacctccttccaaaacctcctgaccgaggaactgcaccgctgcgtgaacccgaacaaaatgatgctgagcatcaccgggggcacggagtccgacgttcagacgctggtgacggagttccggaacggcttgccggcagaggaattcgaaggggcttcgtcggaagcggaagggcagccggcggttcgtccgtggggcgcccggaaagagggcatcgtgattccggcggacatctccttcgccatccggggcggagatattaccaagttcggcgcacagtggaacggggagctttccctggcggcacggatcgtttcctacgcctacctctggaatatcatccgggtgcaaggcggcgcttacggaaccggcctgaccgccggcgtgtccgggctgacggcctgctactcctaccgggacccaaagggtgccgagtccttgaataaatacgaaaccgtgggaaccttcctgaaggagttcaccgacgccgatccggacctcaccggattcatcatcggggcggtgtccgagtcctctcgtgtactgacgccgcgcctcaaaggaaacggggcggatagcatgtacctcagcgggcggacctacgaggaccgctgcaccgagcggcggcgggtgctgaattccacaccggagaagctggcgaagtatgcggaacccctgacaaaagccatcgccgaagggggcatcgtgctggtgggcggaaagaaccagctggaagcctacggcgagctggaccgggtgattacggtatagaaaacatgaacggaatatcattgaagaaaagtggtaatgttaccactttttttcaatggtgtgggacttcgaaatgcgcgtctaggctttcgacaggtggaggaaacacacctgatggaaaataatcatcgtaaaagatgtgattaacgttagcagagatgaagatggaattacaatgatgagcatttacgattttcttttaaagggaaatagtttggagctctaaatcgagcgcatgaagattgaagaaagatggtaatattaccgcttttcttcaatgacgtggcttcgtaaaattccggcaaacaactcggcattgcggttgataaatgccgccggacatttataatagaaataagattgaaaagagagaaataaataagggggtatgaccatgagaaaaacgaaaataatctgcaccatcggaccggccagcgagtcggaagctgtttttacccagatgtgcaaagcgggactgaacgtggttcggctgaacttctcccacggaaatcacgaggaacatttgaagcggatccggacgattcggaaggttcgggaggagctgaagctgccgattccgatcatgctggacaccaagggcccggagtaccgcaccggcgtgttcaaggatcatcgggtcaccctggcggatgggcaggatttcaccttcaccacggaggatatcgaagggggtgagacccgtgtttccgtaagctacaagggattcgccaaagacctccggaagggcgatcgtgtgctggtgaacaacggcctggtggtgtgcacggtaaaagaaattaacggcaatgacgtgctgtgccgggtggatatcggcggcgagctgtccgaccgaaagagcatgaatttcccgggacggctgatgagcaatgcgttcctcagcgaacaggataagaaggatttgctgttcggcatcgagcaggacgtggattacgtggcggcgtcctttatgtccaccaaagaagatgcactggagatgcggaatttcctggatgagaacggcggtcaggacatcgacatcatcgcgaaaatcgagaaccggtccggcgtggacaatgtggaagcgatttcggaagtggtggacggcatcatggtggcccggggggatttgggtgtggagattcccttcgtggaagttccggcgattcagaagcaaatcgtctccaagtgccggatgctgggaaaaagagttatcgtggcaacggaaatgctggaatccatgattcacaacattcgtccgacccgggcggagatttccgatgtggccaacgcggtgtacgagggagcttcggcggtgatgctgtcgggagaaagtgccgccggaaaatatccggtggacgcagttcgcaccatggcggaagtggcggaatatacggaagaaaaaatcgattaccggaatcggttccgcaaaacggatttcaccacgaagaatattctggacgccatttcccactccgcctgccagatggccattgatgtggaagcgaagtgcgtgattgtcagctccgtcagcggacttaccgctcggatggtaagccgtttccgaaatgcggtgccaattatcggaaccaccattcgtccgaaggtataccggaagctggccctttcctggggcgtcattccggtgctctgtgaggaatacgaatccatggacgtgctgttcttccatgccatgaaggaagccacccggattctgaatctggaagtgggggacaacgtaatcatgatgggcggaaagctcagcggtatcaccggaaataccaatatgattaagttcgagaccattaagcggatctacgaatagaaaagctaaaaccctgcacggtcagcatcaagtgattgctgaccggtgcagggttttttattgaaggaagaatgcgggcggtcggctgttcggcgggtaaggttcgcgcccgcctgcccgcaaagtcaatgaactcggtttctgagcgcgaaccccagggcgggggtacccaagattctgttcttaagaaatcttaagaaactttttttgtatagcaatgttattttagtttctagatggtacaattatgaaaataaatgaaagacagtggtgttctgtgtataaagcggagggcggagcgatgagaagatatattgagaatattatcgggtttgtacttgttggaatttcgatgttggtgcaaatgcgatacattcaaaaaactcaatacttaatatatgcgttcttcatatttttcgctgtaggtatgattttgcatacaataaaagcagtggcaataaaaaaatatgatcgaaaaacctatgggaatacatatatcctactttgcataagtttgctttccgaacttccgataatttggatgtaccggaattctattgcggcaaatcaacaggaaatcacaggtgttgtccgtactcttatttttattttggttttgcaaacgcttcttagcgcagtactcagttttgcttatcgaaaaaagaagtaatcagttatttcagagaggattagaattgacgacgaaaaggagcagaggaagcattcgtcgtcaattctttctcctttgaaattatgatgagaagaagagatgcacgaaggggcgccacgccccttcgtgcatctcttttcatctgaacgcggcccggatgaggtgcgtcccgattcaattcgctcgtgtacttgggtgcaggctttgctgcgggttcggcgcacctctaattcgggccgcttgccgggaagtggaggaaaagtagaagaaatgaagtgtagaaatgattggagtgatgcatgagatgaaaaaaagagggttcatgcatcaacattgaaaatgaggttgatgcatggagtagaaaaacaggagctcatgcatcactttttaggaagcgccgggcgggcagggccccgcccaacttgccggagacccatccgaccccaaaggcgtggtgccccgcgacgaaggaacaagggttagcggggagtgaagcaccacgcccaacttgccggaggcccattcgaccccaaagacgtggtgccccgcgacgaaggaacaagggttagcggggagtgaagcaccacgcccaacttgccggaggcccattcgaccccaaagacgtggtgccccgcgacgaaggaacaagggttagcggggagtgaagcaccacgcccaacttgccggaggcccattcgaccccaaagacgtggtgccccgcgacgaaggaacaagggttagcggggagtgaagcaccacgcccaacttgccggaggcccaccgacgccccgctcccgcctggctacaatagcaaggccggtaaatcaaaaaacaggggctgcccgcgggcagctcctgtttttatcttcatctaggattccgtcccttcgtgaacctttattttaccagggtataggtaacttttacggtttcgccgtcgtccggaaggtttgccggcttgtattcgatcatcatcggggtgtcgaatccggaagtgattcccatgtagcatccgccgaagcaggtgatgcatccggtctttgcgctgcgctggttttccaggtttccggagaatcctatttcgtagcttccgtcatatgccttgcccttgtaggttggatcggtgatgacatccttcaggtcgtagtccttgccgccccaggaaacggtcaccttgaacttcgcgaaatcggagtggccggtgccttccttcagcaggtcctggatggactgatcttcgccgaactcggtatcggtgtcgttccaaaccttctcgccggcaacttctgtcagtgccttgtagaaatcatcggtggttacggcggtgttcagaatggacttctttgccatggagccgtccttgtttacgatgaaccagtgcttcgggctctttaccgcgccgtttaccacgcagtcgatggatacggttccggcatccttatcgacggtcgcctcggtgcttgctttctcggacgcttcctctgacttctcggacttgctgccgcaagcgctcagtgagaacattgcaatcagcgcgatgagaagaatcggtaaaaactttttcatctttttcatattatccctccaaagttattccttaaaagattcacagttaactttcatcaatataatataacgagagaaagaagtcaaggcgaccacccggcgaagggagaggagctgacgccatagaggcggatgaaccaattgacaacctttttggtatgtgataaatttaaagataacttaaaaaggttttacgcgattcaggtgccggccgtttccgatacaaatgggaaaccggggccggtgaaaagggaatccggtgagaatccggagcgaagccgtcactgtgttagggagtgaatccgcagcatcactggaaatgtccgggaagagcggaagagcgatgatcgaagtcaggagacctgcctgagtcggggatagggatttgcggtactcgaatccgattccgggcagaacagcgaagcactcttccaaagcagggactacaaacgctttgaagagcggctttttcggtatgttcttttggaaacgcccccggagacagaggagggaagggctgcatgttcggcagcctttttgtgtatccaaatcactgagggaaaaggagatttaagatgaaaaagaaaatgttgtgggtgcttctggccgcaataacctgtgcgctggcactgacgggatgcggaaaatccgatcaggacaaggcggatgaagtggcggagaaaatcgatgccatctatgtgcagaactggacggaagacacggaaaagcagtgcaaagaagccaaagatgcctgggatgcgctgactgaggatcagaagaaactggtgaagggcgagaatgcggatccggattattttggcaaggatacgggggatgcgtccaaggacaatccgctgaacgagaacaaaatcggcgacaaggaaatcctggtggtcagcttcggaacctcctttaacgacagccgtgccaaggatgtaggcggcgtggagaaggccattcagaaggcgtatccggactggtccgttcgccgggcgtttaccgcgcagattatcatcaaccacgtgctggccagagacggcgagagcatcgataacgtgaatcaggcgctggagcgggcggtacgaaacgatgtaaaggagctggtgattcagccgacccacctgatgcacggtgcggagtacgacgagctgatggattccgtgaaagagtataagggcaagatcaaatccatcaaggttgcggagccgcttctgggtgaagtgggcaaggatgcttccagcgtaaacgccgataaggccgccgttgcgcagtacattacggcggaggcggtaaaaaaagccggattcggaagcacggaggatgccgcagcgtccggcacggcgttcgtgttcatggggcacggaacctcccacaccgcaaagatttcctacagccagatgcagaagcagatggaggatctgggatattccaacgtatttatcggaacggtagaaggagaaccggaagatacatccgccgaagcggtaatcaaaaaggtgaagaaggccggatacaagaaggtcattctccgtccgctgatggtagtagccggcgatcacgccaacaacgatatggcgggtgaggaagaagattcctggaagagccaattcgatgcatccggtgcgttcaaatccgtcacctgtcagattgagggtctgggccggatcgacagcgtgcagcagctgtacgtgaaacatgtggcggaggccataaacaagtagcataaaccgtattgaaatttacaataattcacatgcgtcgaatcgaaaattagaatgaggagaaccatatattaatgaagagaattgaaatgacaaagaagagcaagttatggctgattgcagcgctgtccgccatcatgattttcaccctggcagcctgcggcggctccgacaagaattcctccggcttggaggacggtacctacaccgcggagttcaccacggacagccgtatgttccacgtaaatgagaccaaagacgacaagggcaccctgacggtaaaggacggaaagatgaccattcacgtgactctggcctccacccatatcgtgaacctgtatccgggaaccgcggcagaagccaagaagcaggataaggacgacctgctgcagccgacgacggagaaggtgaagtacgacgacggaaccaccgaggaagcctacgccttcgacgttccggtgccggaaatcgacaaggaattcgactgcgccctgatcggcacaaagggaaagtggtacgatcacaaggtaaaggtcaccaatccggtgaaagaagataaatagagatgaacaggatgcagttgagacgaggttttcccggaattcgggggctggttcttctgctgattcttgccgcaatgctttccggatgcagcttgtccggttccggcagcgagaaggcacaatcctgtgaagtgacgatgacagggggttccggacgcgccagcgtggaatcccctgctgacgttacggagaagaacggcgcgcaccgggtgagactggtgtggagcagctcctactacgactacatggtggtggacggtcggaagtatatgaacgaggcgaaggcgggggaaaattctgtttttaccatccccttcgaagaatacgatgaagcattcgaggtaatcggggacaccaccgccatgagcgagcctcacgagatcaaataccggattacggtgcacgctccgggaacgtcctccggcaaaaacaaatccgccgaggcaaagactgccggctccgaaggggtgaagcggggggacatcaccgaagcgccggaaatttccggcctgaagtaccggggccgggaaaagctggaagcggccaaggaatttaccctggaccggtacgaaaaggacggaaagacctacaccctgcttactttgggggccaaggatctgtttctcctgattccggaaggggcgaaggcgccgaagaatttgtccaagaacatcacgccgctgtcgctgccgctgcagaacacctatgtggtgtccacggcggccatggatcccatccgccaggttggcggattgaccggcgtagggtacacgggaacccgggcaaacggatggcacgtgaagggaatcgccaagatggtgcagtccgggaagattcaatatgccggccggtacagcgcgccggactacgaacttcttcggggaaagggatgcgatctggccatcgaaaataccatgatctaccattcgccggcggcgaaggagaagctggaatccctgggcattccggtgatggtggagcggtccagctacgagaagagcccgctgggccggctggaatgggtgaagctgtacggggcgttgtacggcaaatcccaagctgcggaagctttttttgaaaaggaagcggcccgcgtccgcaaggtgtcggagaaggagagcaccggcaaaaccgtggcggtgttcgccatgaactccggcgggagcgtaacggtacgagcatcgggggattacctctccgccatgatccgtcaatccggggggaaatacctggcggcggaaaaggcatcggaggagtccatgcggtccaccttgaacattcagatggaggatttttaccgcattgctaagagtgcggatgtgctgatctacaacagcaccatcgaagagcccatcggcaccgtggcgaagctgaagaagaaatccccgctgctgaagaagttcaaagcggttcgggaaggacgggtctactgcctgccgccgggattcttccagaacagcaccaaagccgcggattttatggaagatatgaaccgggtgctgaaggggaaggaccgttccctcaaggtgctgaagaaactgaagaaataacggaaaggagtctgcgtgaaaaggggtaaaacatccggaacgaggtacgtttcggctctggcgggattggccgttctgctgtttttactggcagtgctgaatctctgcctggggagcaccgccatctcccttcgggaaatcgggcatctcctaaggggaagcggggaaagcaccgcatatgacatcgtgtacaatattcgcctgccgcggattctcgccggaatcctgctgggaggcgccctttccatatccggatatctgctgcagatttttttcgccaaccccatcgccggtccctacgtgctgggcatttcctccggggcgaagctgacggtggcattggccatggtcttcctgctggggaagggcatcaccctcagcgctttgggaatgacgctgaccgcctttctgggatccctgctggtgatgggattcgtattgctgctttcgggaaaaataaagaacatgtccctgctggtggtggccggggtaatggtgggttacatctgctccgcggtgacggatttcgtggttacctttgcggacgattccaacatcgtgaacctgcataactggtctatgggcagcctgtcgggcatccagtggtccggcgtgcgcttgtctgccaccttgattatgctgggagttctttcggccttcttcctgtccaagcccatgggagcctaccggctgggggaaacctacgcccggagcatgggagtgaacatccgggggctgcgcatcgccctaattctgatttccagcctgctctccggagtggtgactgcctttgcgggtcccatttcctttgtgggaatcgcggtgccccacttgattcggggatggatccgttccgacgagcccatccggatgattcccgcctgcttcctgggaggcagcgtggtgactctgatgtgcgacggcatcgcccgcaccctgttcgcacccacggagctgagcatcagctcggtgacggccgtattcctggtgccggtggtactcaccatgatggtacggcgaaaggggggacgcccatgagtacggagctgaagacccgcattctggatgcgggatacgacgggaaggtcgtcgtggaaaatgtaaaccttcaggtaaagcccggagaagtactggcactgatcggccccaacggggcgggaaaatccaccctgcttcgcacggtgacttcccagcttccggaaattcacggcggggtgtttctcagtgagaagcgaattcaggaaatcgaacgggaagaactggcccggaagatggcgctggttaccacggagcggcctcggccggaatggatgacttgccgggagatggtggctgcgggacgctacccgtacaccgggaagctgggcatcctttcggacgccgattggcagattgcggaggaagcccttcggaccgtgcaaggggaagcctttggggatgcggattacaaccgaatcagcgacgggcagcggcagcggattatgctggcccgggccctgtgccaggagccggaagttctggttctggatgaacccacatcctttctggacatccagttcaagatggatcttctctcggtgattcggcgaattgcgaagcataagaagatcggggtgattctctccatgcacgagctggagttcgttccggccgtggcggaccgagtggcatgcatcggcagcggccgggtggcctgcctcgggacaccggaagaggtgattaccgggaggaatctggaacagttctttgggctgcaaaaggatgccggggaagaagtggcccggggaattcacgaatacgcacaagcacttcggaaatggattagatagatggcaaaagtaattatggtacagggcaccatgtccaatgcggggaaaagcctgctggccggcggactgtgccgggtattccgacaggacggctttcgggtggcgccttttaaatcccagaatatggcgttgaactcctttgtgacgaaggagggcctggagatgggacgggctcaggtgatgcaggcggaatgcgccggcatcgagccttcggtatacatgaatcccattttgttaaaacccaccaatgacatcggctctcaggttatcgtcaacggggaggtgcttcgggacatgccggcccgggaatattttcgctacaaaacccgtctcattccggacatccggaaggcctttcaaaagctggcagaggagaacgacatcatcgtcatcgagggcgccggaagcccggcggaaatcaacctcaaggaaaacgatatcgtgaacatgggactggcggaaatggtggacgcaccggtaatcctggtgggagatatcgaccggggcggcgtgttcgcccagctttacggaacggtgatgctgctgtcgccgcaggaacagcagcgaatcaaaggcatggttatcaacaaattccgaggggatgtgactcttctggattccggcatccaaatgctggaggagaagacgggcatcccggtaatcggtacggtgccctaccgccccctgaacatcgacgacgaggacagccttagcacccgattccagggaacggcgccgagcttggtgaacatcggggttcttcgactgccgcgcatttctaattttacggatatatcgccttttgaaatggtgccgggggtaggcattcgctacattacgcggccggaagagctggcgggatcggacatggtgatcctgcccggaaccaagaacaccatcggggatctgcgctggctttgggagacggggctggcggaggccgttcaacggatggcggcgcgggtgccggtgttcggcatttgcggcggatatcagatgctggggcggatggtttcggacccggattcggtggaagagggcggaagtctaaagggactgggccttctccccggggagacggtactgaaacggcagaagaaccggcggcaggtgaggggacgactttcccttcgcaccggaattctgggcatgccggaggatacggaataccggggatacgagattcacatgggggagacccgaaacgagggcggcgaggtgctgacctgccgggcggacggtgaagcgaacggccttcagcagggaaatgtgtacggcacctacgtccatggaattttcgataccggcaatgtggcggagcagatctgccggacgttggcggcaaaaaaaggcgtggttttaccggagaattccggggagagctttcggcagcgtcgggagaaggagtacgaccgactggcggacctggtgcgggaaagcctggatatggagaggatttacggcatgctgtgggaggcggcgtggcgtgacgaataggaaggaaacgggagagatgaaggagattcagttggaatacgtgcttccggggaatatcgagaagcggagttttgagattatccgagaggagcttcgggagcggggcatttgtcttcccgcggatcaggatccggtgacgcgacgggtgattcacactacggcggatttcgactacgcggagaccatgacctactctccggatgcgctggagaccgcctaccgggtgctgcggtccggcggggatatcgtgacggataccaatatgacccggtcgggcatcaacaagaaatttctccgcacgctgggaggcgaagtgcactgttttatggcggagccggatgtggcggcgaaagccaaggagcgaggtgtgacccgggcgacagtgagcatggagcgtgcctcgaagctgaccaagcccctgatcgtggcggtgggaaatgcgcccacggcgctggtgtccctgcatgaaatcatggagaacacgggctggcggccggagctgattatcggcgtgccggtgggtttcgtgaacgtggtgccggccaaggagctgattctccggtccggcgtgccctgcatcatcaatcggggccggaaggggggcagcaatgtggcggcggccatctgcaatgctctgctgtatcagattcgagacggaaaagtgccggaaaggaaatagaccatggattcaaagaaggagcttcgaaaggggtttaccaccgggagctgcggagccgcggcggcaaaagcggcgctgtacatgcttctcaccggcagcgtgaaggacgaaattgaaatcatcacccccggaggcgcggtgttccggaccgaggtaaaagatatttttcgggaagaaaaccgggtgcggtgcgccgtggtaaaggacggcggagacgatccggatgtgaccacgggacttcacgtgacggcggaggtgcgtgccgaagagcggaccgacggaaccttggaaatccagattgagggcggaccgggcgtgggccgggtgaccctgcccggtctggatcagcccgtaggcaatgcggccatcaaccgggtgcctcggcagatgattgaaaaggagctttcggaagtggcggagctgctggattttcggggccggatccgggtgattctctccgtgcccggcggcgaggcggccgcggaacggaccttcaacccgcggctgggcatcgaaggcggaatctccatcctgggcactacgggaattgtggaacccatgagcacacgggcgattctggataccattcgggtggagctgaaccagcggaaggcgctgggcgaccggattgccgccgtctctccgggaaattacggattgaatttcatgaaggagacctacggctacgacctgaaccgcagcgtgaagtgcagcaactacgtgggggatacggtggacatggtccgggagatggactttcggggcatgctcctcaccggccacatcggcaagctgattaaggtgagcggaggcatcatgaatacccattccaaggaaggggatgcccggatggagctgctggccgccggagtgattcgagccggcggaagcatggacactttgcggggcattctgaactgccgggtgacggaggaggcactgggcatcattcaggcggaatcgtcggcgctgcttcggacgagcatggaatcggtgatggaccggattctgtactatctgaggaaacgggccggagaggaacttccggtggagtgcatactgtattccaatgaattcggtttgctggcggcgtcgccgggagcgatggatatgctggagaaattaaggaaaggataagggagcgatggtatatttcgtaggtgtcggctgcggtgcggcggatttgataacggtgcggggaatgcggctgattcagcgggcggatgtgctgatttacgccgggtcgctggtgaatccggagcttctggaatatgcgaattccggctgtgagatccacaacagcgccgagatgaccttggatgacatcatttcggtgatggcgcaggcagaggaagcgggaaagacggtggtgcggctgcataccggagaacccagcatttacggcgcggtgcaggagcagatgcggcagctggatgcccggaacatccggtacgaaagctgtcccggcgtcagcgcctgcttcggggcggcggcatctctgaacctggaatacactcagccggaggtgtcccagtccctgatcatcacccggatggaggggcggaccaaggtgccggaaagggaacagatcgaatcctttgcggcccaccgcaccagcatggccatctacctcagcaccggaatgatggcggaactgtcccggcggctgatggcgggcggatatccgaaggacacgccggcggccatcgtgtacaaagccacctggccggaggaagagaagtacatctgcaccgtggagaccctggcaaagaccgccgaggaacacggcatccgaaacctggcggtggtcctggtgggcgatgcgattgccaaaagcggctatgcggattcccggctgtacgctccggaattcgaaactgcctaccggaaggcggtgcagccatgatgggaaagcgatatattcgaatcgcctgctttacccctcgggggcgggagctggcggaacgcttgatggcgaattggacggagtacatccccctctggcgccgccgggaggaatccccggaagaatgggcggcggagggctttcgcatgcatcagcccctgctcttcgtgggggcggcggggattgccttccgcacggtggcgcccctggtgaaggataagctgcaggacagtccggtgctggtgatggacgaggggggccggcacatcataccgcttctgtccgggcacatgggcggcgccaacgccctggcccgggacatcggggcgcgcatcggggcggatccggccatcaccaccgcaacggacgtgaacggatgttttgccatcgatgatttcgcccggcggaacgggcttcgcatcgggaaccgggaagccatccgccgggtgtccgggaagctgctgtcgggcaaaaaaatccttcttcgaagtaccgtgccggcggaattttccgggagggtgccggaaaacgtggtgcttcggcaacggagcgacggggcggccgaagataccagcatcccggatgggattatcggctttccggagacggaggcgccgaaagaatgtctgaccctgatcccccggaacctggtggttggaatgggctgccgaaaaggggtgccctttgagaagctgaaggagttcttggaacgtgtgctggaagaagaaggactgcagccggaagacattcgttgcatcgcctccgtggaccggaaagccggggaacccgggctgattcagcttgcgcagtattgccgggttccctaccgcttattcaccccggcggagctggagcgggtctccggcgaattcccggagtcggaattcgtccggagaaccgtcggcacggggaacgtgtgtcaccgtgccgcggccgccgcggccggcggcggccgggtgcggcgggggaagacggcgatggatgggatgaccctgtgcatcgtggagcaggaaaaatggcattttcagtggcaggcggaaaggaatgagatgtgaaggggcatatttatgtaatcggaatgggaccgggaaaacgagccggcatgacggcggaagccgcagaggcggtgagcgcctgtgatgtcatcgtgggctacacggtctacgtggagctgattcggacgtcctggccggagaaagatttttttaccacccccatgagacaggaaatcgcccggtgccgaaagtgctatgagctggcggaagcgggaaaaaccgtggggctggtgtgcagcggggatgcgggcatttacggaatggcggcgcccatgttggagctgcagcgggaataccccgaagcggaagtgacggtgattccgggcaccacggcggccaacagcggggcggcggtgctgggggcgcccttgaaccacgatttctgcgtgatttccctcagcgacctgctgaccccgtgggcggtcatcgaacggcggattcgctgcggtgtgcagggggattttgtcatggtcatctacaatccctccagccgaaagcgggcggactacctgcggaaggcggcggatatcatgctggcggccggagcggaaccgaaccgggcctgcggttacgtggagaacatcggccgggagggaacccgggcggtgacctgcacgctggcggagcttcgggaggcgaaggtgaacatgttcaccacggtgtacgtggggaattcccggagttttattcgaggtggaaagctgattacccctagggggtatgagttgtaaggagtgaagatgaagagagtgctgatctacggcggtaccacggagggacggcggctggcggaaaagctggcggaagcggggattccttccctggtgctggtggcaacggaatacggggagcagatgatggcgccgggggagaagtccggccggattcaggtgctgcaggggcgtctgacggcggcggagatggcagcgctgtatgagcgggaacagccggcggtcatcgtggatgccacccatccctatgcggaggcggtgaaaaaaaatattcgggaaagccgggagggtttccggcaaatcccgtactatcgggtctgccgaaatccggaggtgccggaggaacgggaagatgccaggtattttgattccaccgcggactgcgtccgggcactgcggtctgctgccggaaacattctcctcaccaccggaagcaaaaccctttcggaattctgccggtatccggatcttcgggagcggctgtacgtccgggtgctgcccagcgtggaaagcttggaaatctgtggggaacagggaattcggggggaccggatcatcgccatgcagggtcccttctccgaggaaatgaatcgacagatgctgcaggagacgcattccgaaatcctggtgatgaaggaaagcggccgaaacggcggagaagccgctcgaattcaggcggcggagaaggcgggggcgacgtgctttatcattcgccggcctcgtgccgtagaggaaggactttccttggagcgggtgttctcggaaattcgagaacggttcccatgggaagacattgcccgggatgcgggtgacgaaggggttgacaaaacccgattgaaggtggtgctggtgggcatcggcatgaacggagaacgccatctcacgccggaggcccggcgggcgctggaccgggcgcaggtgcttttcggggcgccccgtatgctggaatcctttgccggaaattacaaaaagtatcccttctatacgagggaccgcattctgccgattctttcggagcttcaggagacgtctcgggaagagacggtttgtgcgggaatcctcttttccggggatacgggattctacagcggctgccgcaacctggttccggcattaaagaagctggacggagcggaggtacaagtgcttccgggcatttcttctgtctccgccttagcggcggcggtgggaatctgctggcaggacggaaagattctcagcacccatggaattccagaagaagactggataccggaattcctggatgctgcagcacaccgagagaaaaccttcctgattacttccggtgcgaaggacgtacagcggatgggacagctgctggcggagcggcatcgggaaaactgcatctgccacattggatgcaatttgggaatggcgcaggaacagattttccgactacctccggaggcgtgcaagaatttcgaagaatcggggttgtgcacggtgctggtggagaatccggaaccgcagcctcgccggctcaccccgggaatgggggatgatgtttttatccgggagaaggtgcctatgaccaaggaagaggtacgagcgctgtccatttgcaaactgcacctcaccgcaccggcggtggtgtacgatatcggcagcggcagcggttcggtgtcggtggagctggccgggctggatccgtcggtgaaggtgtacagcatcgaggtgaaggaagatgcgtacaatctgacctgccggaatattgagaaatttggttttgccaacgtaacagcggttcggggagtcgccccggaatgcctggaatccctgccggatcccacccacgtctttatcggcggcagcggtgggcacctggaggagattctggtgcacctgatgaatcgaaagagaacgattcgggtggtgctgaacaccgttacgctggaaaccctggcggaggcttcccggctgatggaaaagtacgagctggagggggaaatctgtcaggtgcaggtgagccgaagccggaaggcgggagcgtatcacttgatgcaagggcaaaatccggtgaatatcatttcctttgatcttctgccgggggataagaactgagattgcaaaaggggaaaaaccatgaaatatccaagaattgtcatcgctgccaccggcagcgggaacggaaagacgacggtgacctgcagtctgcttcgggcattgcagcagcggggcgtgtcggtatgttcctttaagtgcgggccggattacatcgatcccctgtaccatcgaaacgtcatcggggtaccgacgggaaatctggacctgttttttacggatgaaaagcggacgcggagtattttttgccgggaattcgccggggagatggcggtcgtggaaggcgtgatgggcctgtacgacgggctggccggaataaaaagagaggcgtccacgtatcatatggcggaggcgttggacgcgccgattatcctggtagtaaacggctacggaaaaggacgttctgttattgcggaattgaaaggatttctggattttgaccggagcaaacgaatcgccggcgtgattctgaaccgagtatccgccgcatttggcgagattctcgtgccggctatcgaagaagagctgggaattccggtgctgggctgcctgcccaaccggaaagacgatttcttccggagccgatacctggggctggtgcttcccgatgaggtgaaggactttcgagagcagctgcagacccaggcaaggcttttccagcaacacgtggatgtgggccggattctggaaattgcccggggagcgaaagaatttccgaaagaagaggggtctatggatatccaaatcggagaagagctgtgccgagaacggtggaaacccctccgaatcggcgtggctcgagatgaagccttctgcttctattaccgggaaaaccaagagatgctgcaggaactgggtgcggaattggtggaattctccccgatggtggatgaacacctgccgaaggatatttgcggactgtggttcggcggcggttacccggaactgcacctggcggcgctcagcggaaaccgccgcttaatggatgagatacgagcattggcccggaaggggattcccatccgcggggagtgtggcggctttatgtacctgggggactctatcgaagacgcgtcggggcgggtctggcctatggcgggcattcaccccggacggagctttcacagcgagggtcgccgccggttcgggtatgtgacgctgacctctcatgagaccggtgcggtcatccgaggccacgaataccactattacgactgcgacgagaacggaaccgcctacacggcggagaagccggtgacgggcaaacagtggaagtgcatcgtggagaacggtgcccagcagatgggcttcccacatttgtactacccgtccaacccggaatttgcgaaagccttcgtccgggaatgccgccggtgggcagaggagcgtgagcagaaatgaaaaattccttttattacttcgaaaaccgggactgccaatactatccctgccacaaggaaatggcggaaatgaactgcctgttctgctactgcccactgtatttccttccggattgtcccggaaagcgggtacagattgaacgggacgggaaggtgattctgagctgcatggactgcgattacccgcaccgcccggaaaattacggcgagatgatgaagctccttcagaaagccattcgggagcgatagagagaaatgaaggggaggacgatggagattcataaaaaaaatatttccgccgcggcagtattgtccggccaaattaccgttccaaaggtgtcgcaggagtggcgcaaggagattcaaggggaatgggaccgaattgcgaagcccctgggcagcttcggcaagctggagaaaattcacaacgccatcggtgccatccagcagcgccgggtgccggacctggagcgtatggaactgttggtgtgctgcggcgaccacggaattgtggaagaaggggtgagccagtccgggcaagaagtgacggccatctgcgcagaaaacatcggaaagggccaaagctgtgccggcatattggcggcagcggctcatgcaaaaattcgagccatcgatgtgggcattcatggcccgggaccggtgccgggaacggagttccggcgggtggccgatggaacgaagaatttcctgaaggaaccggccatgagccgggcacagttccgcaccgcgctgcagctgggactgaatctggcggcggagtgccgggaagccggcgtacgggtgctgggcgtgggcgagatgggcatcggaaataccacttctgcggcggtgctggccggaagaatgttgggactttcggcggagacggtaaccgggcgcggggccgggctggatggggccggactgcagcgcaagagaaaggttattgcggcggcactgaaaatgcccgacgtgggctcggacgtggaagccatatggtgccggtttggcggtctggagctgacggcgatgatgggcatcatcctggggggcggccttcatggcattccggtggtgctggacggactgctgagcctggtatctgcggaagccgcggaacgattggttccgggaattcgggaatacatgattccctcccatatcagccgggaaccggcggctcgacttctgacggagagtctgggactggaaccggtgctggatgcgggcatgggtgccggagaaggtgtcggtgcggtgatgatgatgtccctgcttcgggatgtgaaccgggtgtaccgggaggcgaagcggttcgacggatacggcatggaaccctatacccgctatgaagagtaagagattcgcaaggaggacggaaggatgatggtattggtaaccggcggcagcggcagcggaaaatctgcttttgcggaggagcgggctctttcctttggaaatccccatgcctattacgccgccaccatggaggtgatggatggagaatctgttcgccgggtggagcggcatcggcagatgcgggaaggaaaggggtggattaccctggagcagccgcgggacattgaagacatcaccggacgcattcggagctacgattctgtggttttagtggaatgcctcaccaacctggtggccaacgaaatgtattggggggacgaagagtgtgaaaatctgaaggaatgcatcgaaaaaatcaccggggagattgccgctgtggcggattcggtggaaaatctggtggcggtcaccggagatgtttttgacgatggagtatccgctgcaccggcgcttcggaactatctgcaggtcctgggcaatgtgaaccgggagctggccgcaatggcggacgaagtggtggaagtggtggtgggaattcccgtctatttgaaaggagatagcgcgcgtgaaaatagcatctgtttttaaatccgtgacggtggctttttccatgtattcccggattcccatgccccggtttcgctgggaaacggaggatatgcggtaccacctgtgcttctttccctgggtgggaggcgtgatcggcatcctggaatacctgtggtttctcggagtcgtgcgctttgaaatcggtccggcggcggccacactcatcgcactgagcattcccatcctggtgaccggcggcttccacctggatgggttcatggacacttgcgatgccctgtcctcctggcgcacccgggaagagcggctgaatattctgtcggatcctcacatcggagctttcgcagcgattcggctggcattgtttggactgatctacggagcggcgctgtcggaactgacggcggaaggccgaattctgtggatggggtcctttttcctctctcgctgcctcagcgggtacacggtggtcgcctttccgaaagcgaagaaaaccgggctggcccgaacggaatcggataccgcggctcgaagaactgcgtgcatccttctgctgcaaggagggctttgcatcgcctggatgatgtggcggtctccggcggccggcggcacgttgctggcgattgccctgctgggaacccttcattaccgtcgcttctgcggcactaaattcggcggcatcaccggtgatttggcgggctggtttctgtgccgcatggaactggccatggtgctgggcctttgggcggtcggcatccttaccggaattttctaaggagagtgaaacatgaaactgattatcggcggatacgcccaaggtaaaagcaaatacggggaagcccgctttcccggctacattctttatgacgaggcgaatttctcgctgctgtaccgggaagcgctcggcaccggaatccggattaatcacctgcaccggatcatccgggagaagctggaggcgggacaaacggaagaagaaattctccgggaagtggaaggaatcgcccggaaccatccggactgcgtatttatttccgacgaaatcggcagcggcatcgtgcccatggatcccctggaccgccggtggcgggaagtgaccggtcggattctcatccgaattgcggcggaatccgacgaagtgattcggctgttttgcggaattcctcaggtgattaagaaagaacttcctgcggtgcgtcacatcttcctgattcgccacggggccaccccgggaaatctggagcatcgatacatcggaagaaccgacgaatccctgtcggaaacggggcggcgggaaattgaaaggcactgctatccaatctgcgatgcggtgttctgcagtcccatgcggcgctgccgggagaccgccgagttaatccatccggcgcgaataccggtggaagtggcggatttccgggagacggatttcggtcgctttgaggggcatacctaccaagagctgcaggacgatcccgcatatcggcactggcttcggacagagggggccattcccttccccgacggggaaagccgggagaaggtccgggaacgggtgatggaaggctggcaaaaaatgctgcaggaagccgcggaccgggaaaacatcgccctggtgattcacggcggcaccatcatgaccctcctgtcggaactcttcggcggaaactattacgactatcaggttagaaacggagaaggatattcatttgatgtatcacgggacggcatttgcagcgggcttcgtgctcgatcttattctgggggatccggagacatggaaccatccggtgcggcgaatcggtaacctcattcagaaattaacggatttttttctgaagcgaggagacgggatttccgattcggcggtccgggctcgggtaaaaagaaaatacggacgactcctggtggcggcggttctcctgatcagcggcggggggacggccttgcttctggtgggcgcgtacacgctgcatccttgggcgggctgcgccctggagggctggctcacctaccgattgctggcggcccggaatctccgggatgcgtccatgcgggtataccgcgcccttcaatccggttcgctggaggattcccggtatgcggtctccatgattgtgggccgggacaccaccgtgctggatgaaaccggtgtgaccaaagccgcggtggaaaccgtggcggagaacacctccgacggggtcatcgccccgatgctgtacatggccctgggaggaccggtgctgggcatgatgtacaaagccgtcaataccatggattccatggtgggctatcgaaacgacaaatacatggatttcggaagagccgccgcccggctggacgatggggtgaatttcattcccgcccgaatcagcggcctgctgatggtggcggtggcgtttctgatgggattttgggatcggcttcgcggcttcgaacaaatatacagcggccgccgggccttccgaatcttccttcgggatcgacgaaagcatgccagccccaatgcggcgcataccgaagctgcctgcgccggcgcgctgggtgttcagctggcgggaaatgcccggtacttcggccgggtggtggaaaaaccaaccttgggagagaatctgcggccggtggtgccggcggatattctccgggcgaacctgctgatgctgggtacggcggtgctgtgtgaatgcatctgcctgggaacgataggactgttactttaaacaaaggagagattcgtgcacggaggaaatatatacgggaatgaaattgaatatgatttttcggtaaatctgaatccattgggaccgccggaatcggtgcgagacgctctggcggcggcgctgaatcacgtggaggaatacccggatccggagtaccgggagcttcgccggggattggcgaattactggcagttggcggaggaagaactcgtgccgggcaacggcgcatcggagctgattcccggcatcatccgaaccctttccccgaaaaactgcatggtgacggcgccttgctattccggctacgaaaccgcgctgaacgtcgcggctccgtcctgccggattcaccggattcctttgcgggcggaagatgattttaccttgccggaaaatatctgccaagagattgcccgtgtaaaaccgaatctgctgattctcaccaaccccaacaaccccaacgggaagcgaatctcggcgaatcgcctccgggaaattgtcgatgcctgccggacggcgggaacggtgctgctggtggacgaatgctttctggcactgagcggcggggatgaggattccctgatccattgcatccgcagagaggcactgccggcggtggtgctccgggcgtttaccaaaacattcgccattcccggggtgcgcctggggtatgccgtctgctccgctcccatggcggaaagaatccgacgggaactgccggaatggaatctctccgtcttcgcccagtacgccggaagggcggccttggaggccgcggccggtggaacctccggttatttggcggccgccggaggaactccggcaccggaaacctcagccggtggaacctccggttatttgacagcctcggtggagatgattgcccgggaacgggaatttctctcggcggagcttgaaaaattagggctccgagtattcccgtccgatgccaattacattctctttcagtcccgggaccgggaactgcaccaaaagctgttggataagggaattctgattcgggactgccgggattaccacgggctgaccgccgggttctatcggacggcagtgcggactcgccgggaaaatgcggcgcttcttcgatgcttgagaaacattaaatagttggaagagatgcacggagggcggaagtcgcctttcgtgcatctcttttcatcttacctgggtgccggtttgcgtacgaaaaccgaaatcaatgggtttcaggggagtcgtacgcaaaccgggccggccgccggtgccggccaactccgtt

SEQ ID NO: 553 - DNA, 1853 bp, Unknown
  16S sequences of unknown bacteria
gagccgaatctggccggcgcgctcgtctatcgtcgtggtggggacggcgcagccgataacccagctcgtctcgtcgtagggcgcgttcgaactgtagtttttgagcgggatggtgtcgacgtagttgctggtgcggtcgatcttcacgttgctgccggcgcccgtcgcggtctgatgcctcatcattcccgtggacacgcagctctcgagcgcgtctgcgtcgtcgggggaggtgacgcccacaaagtacgagccggtcgcctccttggcaagctcgcctgccggtacgcatcggtgatgtcgatgccgagcacgccgtacaccgtgccgtccgagagcatgagtgggacggagtaggtgatcgctgggcggttctcctcgaagatgcccgcagaagagctccagtagccgaggtcgctccacgtgtacgagccgtttgcgtggagcgccttctcgaacggctcgtacaggaacgggtagtagggcgtgtcggcggtggagaagtcaaagcgcgagttccaccctcggtccgtcgtgatgccgagcttctcgacgaccgtggcgggggagcgctcgatgaggatgtcggagtcgctgtccgcaggctttgagagggggtcgaggtcgcggaggtagactccgggcaggttgcgccgctgcccgctttggttcgtctcgtcgaggtcttgggtgttgaggacgaggtaggcgccggtcgagcaactcacgcgcatcatgttgagcgtcgtctgcgacagcttggcgagcagggcatcgttggcggcattgtcctgcccgagctcgtcttcgcgtatgccgccgctttcaatctgctcttcgacgatcttgtttgacctgtcgacgtactgcccgatgttcatccagtcgttggccatggtggactgcaggtacgtggcgcgcgcggcgagcttgccgctcacgatgtcgcgcgtgttctgggaagaatcggcggcgacgttggtgagcgcgacggtgcacagcatgatgacgacctcgatggcgacgagggccatgagcgggacgaggaccctgagaaagatggaatgctcgctgtcgtgcgcgtgcagtttagccttcatgtgccgccgcctcgagctttgcgagcgtgtcggcgtaccaggcctcgaagttcgcatcggttgcgtattttgcgacggcatcggagcggcgcgtcccgccggccatcagttcgacgaccgccttgcggtctgccgctgccttgtcggagagcgcggactccagcacgtgcctgatcgacgtgccgttgacgacggggcgcggtgtgtacatcgagctgccgttgacggtgctaatcgccgcagagagcgcctgccttgcggcctcggtggtgttcccatcgtcggcatgcgagacgatctcgtccaggtcgttggcggatttcttgacgggcaggtagctcgtgtcaagcgcgaacttgctgttgtgctcgggctgcgtgaaccacttgaggaactcgactgccgcctcgacccgcctgtcatcggacttcgtcaccaccatgcccgcgccctgctgcacggcgacgcttttcccgccctcgaactcgggcgcgggaagcgtctgcgtctcctgcgggtgacaccgccgcgggcgtgaacgaggcgcttgccgaggagcccacgtaggcgatgatggtgccggtcttcatgtcgtcgctgcggaagcgcccgatggcggagtagtagccgttgaggtaggggatgtagtagttgtcccagagcctgcgcgcgaccgccttgtcgaagtcgagggcggccgttccgtccgcattgcgcccgatgagctcgggaccgagctgttgcgagccgatg

SEQ ID NO: 554 - DNA, 21760 bp, Unknown
  16S sequences of unknown bacteria
aaagaaggattttcttctcgggcacaaaatcgcgctgtgcttcatgtgagatcgagggggctgcggattcgagcatacgcggcgcggtgccgaacgatctttcgatcatactctcgcactgccgcataacaaagatattcacaaacggcactgcggcgcacacgatgtaccgcaggtatcagcttgagaaaaccggaatcgatgatatacgcctgccgtcaacaagtccggcgaatgcgtcatggagcctcgaccgactgcgcatggaatggaaaaaccgtattttcggatagtcgctcctcccgtcagggcggcatttcaaacaaaggctgtgacccccgtaaccgatgcgcaactcactgcaacatcttttttcgcagcttgtgcttcagataaaaactccccggagcatttctgctccggggagtttttatcgattaagatgcagcgatcggcgccgccgaatcagggaattgtaccaaatattcgaagatgcgtccggtatttcggatatgtccgagcagctgtgttttcggcaagcgtcttattcgagttccagcccgcctgtataaagctgatagtactttccgtgctctccgataagcttttcgtggtttccgcgctcgattatccgtccgtgctcaagcaccatgatcacgtcggaattgcggaccgtcgagagcctgtgcgcgataacgaaaaccgttctgccgtgcatcagcttatccatgccgtgctgaacaagcgcctcagtgcgtgtatctatcgacgaggtcgcttcatcgagtatcataacgggcggatcagccaccgcggcgcgggctatcgagataagctgacgctgcccctgcgagagatttgcgccgttgcccgtgagcatcgtattgtatccctcgggcagtcttcttatgaagtcgtccgcgttggcaagacgcgccgccgcgtacacctcttcatccgtcgcgtcaagctttccgtagcgtatattctccatcaccgttccggtaaacagattcgtatcctgaaggacgatgccgagcgatcggcgaagatcgtccttctttattttgtttatattgataccgtcgtagcgtatctttccgtcggcaatatcgtagaatctgtttataaggttcgttatcgtggttttgcccgcgcccgtcgcgccgacaaaagcgaccttctcgccgggattcgcgtacagcgtgatattgtgaagaacgtccttcccttcctcgtaggcaaaatcgacattgtccattgtgacggcaccctcgacctttgtataggtgatgctgccgtcgccgtggggatgcttccacgcccacacgcccgtgcgctccggagtctcggttatattgccgtcgccgtccgttttcgcattcacgagagttacatatccgccatccttctcaggctcggtatccataagatcgaatatgcgtcccgcgcccgcaagcgccattgcgatcgagcttacctgctgcgaaagctgtgtgatcggctgcgtgaagcttctcgaaagctgaaggaacgaaactatcgcgccgagtgtcagtccgccgatacccgagatcgcaagcgcgccgcccgagatcgcaagtattacatactgaaggtgggacatatttcccatgatcggcatgaggatattcgcgtatttattcgcggcgaaagcattttcgtaaaggtcgccgttgagcttatcgaaatcctcttttgcgtgttcctcgtggcaaaagaccttgacgaccttctgtcccgcgatcatttcctcaatatatccgttgaccgcgccgagcgaggtctgctgcttcatgaagtactttccgctcgaagccgcaatgttcttcgtcgagaagattataagtgctacggtgactattgcgataagagtgaggatcggactgagcgagatcattgcgcagaacaccgtcacaagagtgataagagacgagaacgtctggataaggctctgcgagatcatctgtctgagcgtatcggtatcgttcgtatatcggctcattatatcgccgtgcgcgttggtgtcgaaatatttgatcggcagatgctgcattttttcgaacatttcgtctctgatatcgcggagaacgccctgcgacacaacgaccattatctgagaatgaaccgcggtcgaaattataccgataaggtatattccgcccattattagcacagcgcggagaagcggcgcaaagtcgggtgagctctgagatgtcatcggaacgatgtagtcgtcgatcagcgtctcgagaaacatcgagccggcgacggcggtaacgctcgacagcatcacgcacacgagaactataaacatgactgttttatgatggcggaaaatatagccgagaagacgtccgaccgttttcgggtcgatcgacttgaccgccgccatgccgcgcggtccgccctgaccgtggtgtccgggtcccctcatcggtccgccgggtcccttcatgggtctgcccttattcatcgtccccgcctcccttcgtctgagactcgtacacttcgcggtatattccgctgcgtgcgacaagctcgtcatgcgtgcctacatcggacacacgtccgccgtcgagaacgattatctgatcagcatgctgcaccgacgatatacgctgcgcaatgattatctttgtagtatccgggatatcttcggcgaacgcacggcgtatcgccgcatcggtggcggtatccaccgcgctcgtcgagtcgtcgagaataagtatcttcggctttttcagtatcgcgcgtgcgatgcacaaacgctgcttctgtcccccggaaacattggttccgccctgttctatataagtgtcatatccgtcggggaaatctcggataaaggaatccgcctgcgcgagtcggcatgccgcgacaagttcctcatccgttgcgttttcgttgccccagcgaagattgtcctttatcgtgccggagaaaagctcgtttttctgaagcaccattgcgacgctgtcacgaagcgtctttatatcgtaatcgcgcacgtcgcatccgccgaccgaaagcgtgcctccggtcacgtcatagagtctcgggatgagctgaacgagcgtcgtctttgacgatcccgtaccgcctatgataccgaccgtctgacccgaggcaatgtcaaggctgacatccgaaaggcacgcggtgcctttccttcccgcatacgaaaacgatacatttttgaagctgaccgagccgtccctcacctctgttacggggtcggcagggctcttaatcgtgctctcctcatcgaggacctcgactatacgctctgcggaggctctcgatatcgttatcattacaagcaccatcgacaccatcatgaggctcatgagtatctgcgaggcatatgagatcatgctcgtaagctgtcccgttgtcatcgcgccctcggcgccctgcccctttattataaggttggctccgaaccacgatatcaaaagtatcgagccgtacacggcaagctgcatgagcggtccgttgaaagcgagtatcctctcggcgagagtgaattcgcggtagatatcctccgatgcgtccttgaactttgcggtttcgtgatcctcgcggacaaacgcttttacgacacggattccgcggagattttcctgaacgatgcggttcaggttatcgtactttttaaacacgcggttgaacaccgggaacgcgctcttcatcattataaacagtccgataccgaggatcggcgtggtaacaagaaacacaagcgcaagctcggcattcacgctgaacgccataacgagagcaaagatcagcattgcgggacagcgcaccgctatgcggatgatcatctgaaaagcgttctgcacgttggtgacgtcggtcgtcatacgggtgattatgctcgacgcggaaaatttgtctatattcgcaaacgaataatcctgaacccgataaaacatatcgtgacgcaggtttttcgcaaatcccgcaccggccttcgcgcagaatccgcccgacagcgctccgcaaaggagcgacaccacgcagcatcccacaagcagcgctccggttttcagtatgtcgggcagacttccgcggttgattccgcggtcgataagcactgccatgagcatcggtattattacctcaagtattacctctaatgtaacggttatcggtgtaagtatcgcggcagccttgtattcccgtatacatccggcaagcttctttatcattttttcttccccttccccaaacagctcggaccatccccgggccccatctcgccgtcgcatttttcaagattttgcttcattcgctccgcaacggaaataaacatcgcaagctcctcctccggtatcccgtcggttatcagcttttccgtttcgactctgtcgttttccattttctcgagaagctcgagcgatttctcggtaagcgtcagctttttcagccttgcatcgcattcgacgctttccctctttataagtcccttcttttccataagcgaaagaatattcgaaaccgtggaacgtctgacgttgaatcgctcctcgagatcgcgctggaacacgtcgcggtcgctgttatgggcaaggtaaactatcacccagccgttcattccggtcacgctttccgtctccgtgtgagatgccgaattattgatatgacgccttatcagattcgaaagtatccgtatttcaaatccgatcgactttttttcgttactgttcaagaaaataagccttctttcccggttttatgttagggtgctaactgtaagcgtgcttacattatatcgaatcagaagagaggtttggttaatttccgtgatatattttccgaacaatttatgaattatcgggaaagagtttccggtacatcgataccatttccgaacggctgatgacatacggggaattcgcgtagttcgccgcgttctccgtgcgcgaaacaaaatcggcgatctcgtcatcggtgagctcaaaatgcacctctgccatctcggggattctctttatcatctcctccgcggatgcgccggccgcgcagaaaagtcgttcaagcttttttgccccctccggaatgcttatgttaaggcggatatactccccctcaaaggcaccgcaggcgcgtccgtgcggcacgcccttctccattgtaaggttgtacccgagcggatgcgggaatcccgttcccgtcactgcgatcgcgcatcctgcaagattcgacgctctcatgaggcgttcccgctgaatttccgtgaaaccgccgacatcggtttctccttcgccgtcctcgccgcaaaacagcaccttccatatctccgatgcggcttcgagcgctgcgtcctcgctgtacggcgtggatttcggactgagaaacgactcgatcccgtgagcaagcgcgtcaagcgcacagcttacagaataatctctgccgagcgattcggtataacgataatcgacaaacgccgaaatcggatagctgtagggtgatttgaaggtacgcttcttccttgcggaatccacgctgagtatcgaatacggattcgcttcactgcccgttccggcggtcgtgggtactgcaatcacgggcagaggcagattcacgcatagcgcaggatcgaatatatcctcggggaatgcaagttcattttctgcaaacgccgcgatcgcctttgcagcatcgatcgcgctgcccccgccgatgccgatcacggtatccgcgccgaaggcgcgggcttcgtttccggcgaggtatgcgctcccgacagaaggattttccgtaactccgtcgaacaccgaatacggaatcccggcaccgtcaagcaccgccgtcacatccgaaagcgcacctgatgccttcgctccgtgctttcccgtcacgataaacgcgcgctttgccgcggtcaggtgctcgggattttcggcaattgcattttttgagatatacatctcggtaggaatatttttcggcatatcgcaccctccgaatccatatatgtattttaaattacaaaaaccgcccgtatgaaacgggcggttttttcagcctcagataagctctttgactttggagctcttgccgactctgtcacgcagatagtaaagcttcgcacgtcttaccttaccgtgacggactacttcaacactgtccacgcggggagagtgtatcgggaaagtcttttcaactccgcagccgtaagctacatgacgaacggtaaaggattccgagatcccgccgccgtgctttgaaataaccgtaccctcgaaaatctgaattctctctctcgttccctcgataatcttgttgtacaccttaacggtatcaccgatctcgaaagccggaacggtctctttgagctgttcgcttgtaaaagcagtaagcttgtccattacacaaaactcctttcttttagtcatagagcattcatgcacagctgcagcggactgctccgttcccgcgctttatacgcaagcctaaagattataccatattcaagcggaaaatgcaagtgctttcccgaaatttcccggaggaattttgcgcgtcgcaaacggtgcggcaaaaaaagttcaaaaacatcgaaatctccccaaatgaaaggcaaaactgccaaaagccgtggcgcttaggcagacggcatttcgtgatctgcccgcgcagtcgcaacagaaacggcgccgggagaatctcccgacgccgcgtttcttttgatttttacttcattctctcttcgagagcttttctgccttcctcatatccgggctttccgagaagcgcaaacatattcttcttgtacgcctcgactccgggctgatcgaacggatttacaccgagcatatatccggaaaccgcacatgcgaactcaaaaaagaacacaagatttccgaaggtcttttcactgcggtccgggatctcgataacggtgttcggcactccgccgtcgttgtgggcaaagagagttccgagcattgcggtacggttgatatcgtggatctgcgtacccgaaagaaagttgagtccgtcaacgtttgcctcgtcgttcggaacctcaacgttatccaccgcattctgaacatcgataactgtctcaaagagatttctcacgccgtcctgtatgtactgaccgagagaatgaaggtcggtcgagaagataacggacgccgggaagattcccttgttgtccttgccctcgctctcgccgtagagctgcttccaccactcgcagaacatctgcgctgcaggctcgtaagccgcaaggatctcggtagttttgccctttctgtaaaggatgttgcggatcgccgcataacggagcgaagcgttgtctgcaagaggtgcgctgaggtacttcccgcgtgcctcggcagcgcccgccatcatagcgtcgatgtcgcatccggcaactgcgatcgggagaagtccgacagcggtaagaacggaataacgtccgccgatatcgtccggaacaacgaaggtctcatatcccatctcgtcggagaaagccttgagcgttccgcgtgcacggtcggtcgtcacgaaaatgcgctcgcgtgcgccgtccttgccgtacttcttctcgagaagctcacggaagatgcggaaggtgatcgcaggctcggtggtcgtgccggatttcgagatgacgttgatgcacacgtcgcgtccctcgcagatgcggagaaggtctgcaagtgcggatgcgcttatggagtttccggagaagtaaacgtcgggggtgtccttctttaagttattgtacaccggagactttacgaattcgattgcggcgcgcgcaccgagataagaaccgccgataccgatgacaacgagaacgtcgcagctcttctgaatctttgcggctgcggtctttatgcgggcaaactcttccttatcgtaatcgacgggaagatcaagccagccgagaaaatcggagccggctccgctcttgtccataacggtttttcttgccgcctcaagctccgcttccatctgagcgacctcgttcgcgcgaacaaagggagagagaaatttttcgttaagtttgatcatttgaaaattccattccttttcaattttgttattgaaacaatgatactacaaaatccgttttttttcaatatcccccgccgaatttttttctaaataagaagaaaagatcgaattatcctcatgagtataccgccgtagcttatcttggcgacgccctcggcggcgaatattccgccctctccgacggtttcatctccgcatttatagataaccctgccgacgcactccccttcggcgatcggcgcggcaagctcctccggaagctccgtttcaaccgtaatcctgccgcgcttcgacgattcgagaagtgcgctgaattcgccgtatctgcacgcgcacgtttcgctcactccgcccgtgacgcggacattccccgcatcggctccgccgtcgctgaagacgaaatagtttgcaaagccccaatcgagcagagtttttgccgcctcgttccgcacgtctctcgtcggagcgcccattatgaccgcgatcaggtgcatgccgtctcgctccgccgttgcgcttatacagaatttcgccttcgaggtcgatccggttttcagtcccgttgcgccgctgtaaaagcggatgagcctgttcgtgttcgtaagtccgaatgcgccgtcgcgtatcgtatccatccatatcgaggtgtattcgagtatcttcttgtgcttcaaaagctcgcgcgacatcagcgctatgtcatacgcgctcgtcacatggttcgtcacgttatcgtcaagcccggtcggattttcaaagctgctcgactccatgccgagctccttcgccctctcgttcatgcggacgacaaacgcctgcacgctgcccgacacgcgctccgcaagagtgaccgccgcatcgttcgcggaggcgataataacgctcttcagaaggtcctcgcacttcatctcctcgcccggctcgagatagacctgcgaaccgcccatcgacgcggcgtattcgctcacctgcactttatcctcgagagaaagctgccccgagtctatcgcctccatgacgagaagcagcgtcattatcttcgtaaccgatgccggaggcagggcttcggctgcgttttttgcatagagcacctctccggtcgccgaatccataagaagtgccgacagcgcgtccacgtcaaacggcgctttatcctcaacggcagctgccgacgacgttgcgggcagcgaaagaagcaccgttatcacgcacagaagaagcgatatgcttttcaataaagttttcatacatgccgtcctttacctgataaattcggtacattatattcggacgcgctgtcttatagaacggcaaaggaaaaggaccggcgcggagaatgtctctccgatgccgatccttcggactcctttattaccgatcagtgggcaagatgcctctcgagccagatcatgccgatctcgaaagcatcggccaatcccgatttcatatcctgcttaacgattctctccgttgccggaagtgtcgtatcgttattcactatctgtatcagtatcttgtcgggaacttcttttccgttatattctttggcagtcatcaccgtcatacggagcgtgtatgcttcttcaatgcatccgtagcaaatcatgtttccctcacgcacgagcggacgtcccttataaacaaggtattccccgtcagcaacggcaatgggcgcagtattatcagccatgtcttgtcctccccattaacagtattatatatcattgtatattatactacaaaatccggtgaatgtcaagaagttgtttgaacgccgcacaagcgctccgtttccgcagcgcagtaaaggcgaaaaaagccgtcaggatatgaaatcggtgcggtttgatctgtcattctcgggcacggaaataccgctttccttccccgcttcgatacagcgcagcagccacgccatattatgcgcaagattccgcattgtctggagtccctcgaggtcccgtctcacgtcatccggagtgcttccgtgcaccatgttccaatacgaggacgaaacgacgggcatttcggctatcgtaaaatacttgttgagaacatcgacggatgcggtcgttcccgcgcggcgcgccgaggctatcgccgcaccgggcttgtgcgcaaaaaccttccgcgatgagtagaacgcgcggtcgaggaacgagagaatacggccggacgggtgggcatagtacacgggcgtaccgaaaacgaatccgtccgcatcggcggcacgggcggtgaattcatttaccccgtcgtccccgtatatgcactttccgagatgcgcgcacgctccgcagcccgtgcaatcgcagatcgcgtcggtgcctatatgaaatatttccgccgaaattccttcgctctcaagtacagacgcgatctcggaaagagcctcatttgtacatccgtttcttttcgcacttccgttcaaaagcaatactttcatcaataaaacccgcccttcataatattcgccgcgatacggcgtagtatgtacggtcacaaaaaaggcacgcgcggcgtgcctcagcgggcgcagtgcgcaccgcagaaaacccttttcgaattctccgggaaaccctctaccactttatgccgagagccttctccgcatgacgctttattgcagcaaaagtttcatcgctgagatgatgctcgatcttgcatgcgtcggcatccgccgtctcctcgttgactccgagcgcaacaaggcagcgcgtaagcacgagatgacgctcgtatatcttacccgcaagatattttccctcgtcggtgaggaaaagatgaccctcgccgtccgccgttatatatccgccgtttttcagaagtccgatcgcgcggctcacgctcggcttggagaatcccatatattctccgacatctatcgcccggacatacggacttttctgcgaaaggatcagtatcgtttcaagatacatctcacccgattcctgcaaatgcattaaaaaactcccctgatcattgagatataaacagcataacacaactttctcgatttttcaagccgaaaatataaactattttcccgcacccgaaataaaggacatgccgagaggactttcccggtattcttcgacagagccgaagaagacgtcacggctcccgagatgaagtatatgacgcgcgtactgcacggcggcggatatatcgtgagagatcattatgaccgtcacgccgtcgtccttgttgagcgaatctatcagatcatacatccgtgcgctcaccttcggatcaagcccggaaacaggctcatcgaggagcagcatcttgtcggctgcgcagagcgctcttgcgagaagcgcgcgctgcttctgcccgcccgaaaggcggcagaaggattcatccgcgatatccgatatccccattcgcgccatgctgtcggctgcacgcattttctgcgctttggtataaaacggccggtacggcgcacccgcgacgcatcccgactgcacaacctcccgcaccgaagccgggaagtcacggcgcgaaagctcctgctgcggaagatatcctatcgaattctttccgagtccctcgccgaatacgatctctcccgcaagaggagggatcagtccgagcagggttttcataagcgtggactttccggagccgttctctccgacaatacagaggtaatcccccgcctccacgctgaaatcgagtccttcaagcacggtctttccctcatatccgagcgtaagaccgcggcaaacaagctgcggcatctgtcttttcctttcgcaaagtcaaggcttttcggaatcggctcaaatcatcaatatgaaccgaagcagcgccgctgaagtgcggcgctgctttaattatatccccgaacaaaccttttgtcaacttatttatcgagaagcgcggcgatctcctctttttctcttccgccgaccgcctttgtgataacctcgtttccgcggacaacgatgagagtcggaatgctcagtatgccgaagcgctccgcaaggctcccctcttcatcgacatttatttttccgaccgcctttgtcccgtcgttgagctcgtcggcgacttcatcgacaagcggcgacaccatacggcacggaccgcaccacggcgcccagaaatcgagaagaaaggtcttaccggaattcaccacttcgctttcgaaattttcggatgtgatcttaattgcaggcattttcgtgttctccttttttcttatattatttccgcatcaggcggcataatacgttttcaaagaaagtcaaaaggccgccgtgcaatgcgcggcagccttttttcgttttgtaatatgtgctcgggaatccgccgcggcaaaatcccggcacaaaatcttcacttacgccttcggatgaagagtaccgcggataatacggcagccgtgagcaggaacgccggggttgaactcgcgggtgatgttctcccacttctgaccgtcgataacatcctcgaaatcgaatgcgtatccggtgtcgagagtgatgccgaacttgaagaagtcgcagcatactgcgcggtaggactcgccgaagttgatgaatgcgaaggagtaggtgccgttgtcaagatgcttcaggaagcagtaagtatcatcgccgggattgccgatgagggcgggagttctcgcctcggtatcctggttgattctgataagctccttgttggtgagggtcttgagagtagcgtcgctcatgttgcggatatcgcagccgatcataagaggagatgcgaagtagcaccagagagcgaagtgtgtaagatactcttcgtctgtgcatccggaaaccgcaacatttcccttaccgtacataccggtgatgagcatatcgatatcgttgaagcactgcggaccgctgaagggccagttatcggtctggctgagaacgagattctttacgctgccgaagctgtcgttgatatcgccggtggaacggaagatgtgcgcgccggtggagcggatccatctgtgaacgttctctgcgccccagttgcatgcggagaagagaatgtcgcgtccggtggacttgagagccatggacattctgttgtagaggaagtatccgtcgtgctcgggcttgtagcagttgtcgtacttgaggaagtcaacgccccaatcagcgaaggtctgagcgtcgatgaactcattgttgtagcttcccggatagcctgcgcaggtgagaggaccgtcgcaggagtacataccgaacttgagccccttggagtgaacgtaatcagcaagagccttcattccgctcgggaacttctcgggatcgggaacgatgcgtccgtccgctccgcgctcacggagagaccagcagtcgtcgataacaacgtagttatagcctgcggcagcaagacccgtgtccaccattgcatctgcggtttccttgatgaggtcctcggaaatgttcgtaccgaaggtgttccatgagttccagcccatcggaggtgtgttaactaacataattgtctccttaagatatgtaatttcaatttatttgtccgggacgatcccggtcggaatttatgttagcatatccggaaaccaatgtcaagtaaaaatcatttttttacgaaaaaacttcggtttgccgattattactgtcattttttacgaaaacggcgtttcggggcgtgttcaggctcaaaaaagcgactgcggaacaacgtcacggcagaagaaggtgcgacaaatccgccgttttcgtcggtgaaaggttttaatattttatatattgaaaaaaatcgtccgacgtggtatactttatattgcgttatactctatattaatggtgagtttccgcaaaatcaaatgattccgcgaggacgcggataataaacattacccggagaaaaccttgaaaaaattcagagaagcagaaaacaaagtacgtcttttcgggagagatattctttcctcgcccggaatgcagaaagaaaaagtatatatacagcacggcagattcagcgtatacgcgcactccttccttgtggcatcgctctgcgtctacatagccgaaaggctctccctcaggcatgacacacgctccctcgtcagaggcgcgcttcttcacgactatttcctgtacgattggcacacgcccgacaaatcccacagacttcacgctttttcccacgccggacgcgcgcttgaaaacgcgcggcgggattttcgtctgaacaggatagagagaaacatgatccgctcgcatatgttcccgctcaacaaatccgtaccgaaataccgcgagagcataatcctgtgcgccgctgacaagctgtgcgcggtcgccgaaaccctgcgcgctctgtttccgccgaaaagcaaagcttaaagccgccgtgcggctcaaatgaataaacccgaaaggaacgcggtaaaatgaaagtacttattctgagctgtgacaccgggcagggacacaacagtgcggcacgcgccgtgtttgaagccttcgatcgccgcgggaatgtatgcgaaatgttcgatccgcttactctcggacgaaagaaatccgcacatatcgtctcggctacctacagcggaatgttgcggaaagcgccggcggtgttcggtgtgctctaccgtgccggggacatatacagctcaaccggaataacatcaccgatataccgcgcgaatacgcattacgcagacagcctgcgagagtacatcacgtcgaactcctttgacgcggtcgttagcactcacctcttttcaatggaggcgctgaccgcgatccgccgcaagccggattttcatgtaccgtgcttcggcgtgctcaccgattacacgcgcataccgtttttcgccgagaccgatctcgacgggtatttcatcccgcacgacgatctcatggacgagatgaccgtcaagggaatgccggaagagcgtatttttgcaacgggcatcccggtcagtgcaaggtttgcaaatcacacggacaaagacgaagcccgcgagattctcggcataccgcatgacattccggcaattctcgtcatgagcggaggagtgggatgcggacacattgtcaatctctgccgagaatttctgaaaaagaacgacaccgattttgtgctgcgggttctgaccggaaagaacaccgcgatgaaaaaggagatagacgaaaccttcggcggcgacggtcggatacagaccgtgcccttcaccgaacgtgtaaatctgtacatgaacgcatcggacgtcatgatatccaagccgggcggacttacgagcaccgaagccgcggttgcgaacatcccgctcgtccatctgcttgcgtacaccggatgcgagacgaaaaacatcgagttcttttccgaaagggggatctcgctccgtgcgggcaatgtaaaggatgcggttcactgcgcgtggaatctgatagatgacaaaagccttgcggacagtatgcgcgagatgcagagaaaatatatcgcgcccgatgccgccgaccggatcgtatcaaaggtgatatcgtatgtctgaaaacgaaacgctgctgtggataatatggataggcggaggctttctcctcgggagtgtgatgttcagccgtctgatgccccgcctgatcctgaaaaaggacatcgccgcactcgggcgggatcacaatcccggagcgtcgaacgtattcgtaaactgcggtattccgatggggtttctttgcctgacgctcgacatgttcaagggattttttccggtgtacatggcgtgcaggacggtcgacatccgtgaaatatactttgctgcggtgatagtcgcgcccgtgctcgggcatgcaatcgctccgctgaacggatttcacggcggaaaatgcatatcaacggctttcggtgtgatgatcgcgctgataccgatcacgccgatcgggttcgtgcttgcgtttctgtatattttcttctcggtcatcgtaaagataaatccggtaagataccgcagcatcctcacgtttgcgcttttcggcgttatctcggtcatatggctgagcgaggtcggaaagttcccgatcgccgtcggatgcggtgcggtatctgcgacggcgcttctgcgccacacgaaatttttcagcgttgtgcccgaggaaagccgcgaaaagcttcccgaagcctcttcgactgaaaatcagctctgaggcgttcataaagattccgtcacggcggcgcaccgatgtgcgccgccgtattgttatgctttcgtaatgcccatatcggagatttattcggagcttcgtcaaagccggaaagtccgcgatctgccgtgagagggcgaaagattccctctcgggtacgcagaaatgccgccgcggaatttttcctaacgggtacacaaaaacgccgccgctgttttcacagcggcggcgatttatttcattttgaaaggaagcgtgcaagaaagtcgcgcgttttcggatccgacggattctcaaagatatccttcggtgcgccctcctcacagataagtccgtccgccataaacaccacgtttgtggagacatcgcgcgcaaacgccatctcgtgagtcacgacgatcatcgtaagtccttccgacgcgagattacgcattacctcgagaacctcgccgaccatctgcggatcgagcgcgctcgtcggctcgtcgaacagcagtacctccggctccatcgcaagcgcacgggcaatcgccacgcgctgcttctgtccgccggaaagctgagcgggcttcgcattgatatacggctccatgccgacctttctgaggtacttcatcgcaacctcttcggcttcgctccggctgcgcttcagcacggacacctgaccggttatgcagttgttcagcgccgtcatgttattgaacagattgaagctctggaaaaccattccgaccttcgtgcggtatttcgttatgtgaaagtcgggggatgttatgtccttgccgtgaaacattatctgtccggaggtcggagtttcaaggagatttatgcatctcagcatcgtgcttttgcccgatccggaagcaccgattatgctgaggacctcgcctttttttacactgaggttgatatcgtgcagtacggcatgatcgccgaactgcttctgaagatgtataagctcgattacattttcgctcatggctcagtcctccgtctttatatgtatctcggctgccgaatcactctgcgatccgaaaatcgtgtaattatccttgccatcgagacgcttttcaacatagcgcagcaggcgcgtgatcgaaaacgtaagtataaagtacagcacacatataacaaagtacgtttggaacgtctgaaaattctgcctctttattatgccggcaaaatagtagagctccgttactccgataacattaagcaccgatgtatccttaatatttataacgaactcgttgctgacagacggaagaatattgcgtataacctgaggaagtattaccttgatcatcgtctgcgaatgggtcattccgatcgacattgcgccctcaaactgacccttgtctatcgaaatgattcctccgcgcacgatctccgccatatatgcaccggtatttatcgaaacgatgagtattcccgaggggataagcggaagcgtcttcccctctgtagcaaatgcatacccccaatagataaccatcgcctgaaccatcatcggcgttccgcgaaaaatttcaacatacaccgcaataattccgttcagtatcttatggagggttcgcgtaaccggattttttgataaaggtgccgtacgtaccattccggtgagaagccctaccgcaagtcccgcaaccgtgcctacaagcgaaagaatcagagtgttcttgattccggaaagaaggaacggataatacttcaggaaaatgttgactacatcattcagaaaactcattataaactccgtttatgatctaaaaaatcactttttgataataacaacaaggtttgattcataatacgtatcggtaaaatctacctgtgctgcgcgttctgccgtcgggcttatgcctgctataattgcatcaatcgcaccggaatcgatagcggggataagcgaattccactcaattgcgtaaatctcaagtctgagattgagacggtctgcgatatatttggcgatctgaacgtcatatccgtttgcccaaagattttcctttccctctccgcttatcggaatgcatccaaaggtcttcccttccatatcggtccaattgtaaggctcataagcgcattccattccgatcttgagtgttccgacaggttccgcgggagtttcactgcttatcgcaaactgatcaacagtctttcccgaggatatggcaactatctgctccataagctgtttcttctgatcatcggtaatctctgcaagaatcgaattcatcctctcgcgaagatccgaaccctttttcaagccgactgcaattccgacatcggcgggggtagccgtgaatccggtatcgttgttcttcaggggaatgtaggtaagagtatcgtccgatccgcaaacggcaagtgcggtgggctcctctgctacgtatccgtcgattgcaccgctcttaagagcggcgagaaggtcggaaaactcagggtaggttgaagactgtacatcctcaatctgtgagagtgcatctgcgtggaaggttgccgcctgcgccgcaatctttgcacctttaagatcggcaaggttctttgcgtttcttatgtcattgctttccttttttgcagagcacgacgcaaagcaagcaacgcacattaccgctgcgagtatcgacgagactgttcttgtgattccgttcatggtttttctctcctatgaatttgtattaaaacacataaaaagcctgcgacccgaaaggtaatcgcaggctttagttaaattacggaatcaaaagccgttgatagctctccacataaatgtgacagtaccgtgtcttttaaacacgatcccaacaatcctgcggcggcaaccgcaaaaccgtttcggcggaacagcctttcccctgccgccgtttgccgtcgtgtgcaacagagtacttatcatatccgcaacctctatcaggtgccgaattatttatgtattttgatcgtattataaaccacgcaaagtactttgtcaacagtttttttgaattttgtatataggcatacaaatcagagtgcgaatcatgtcggaattgtgcaaaatgcatccgcgtttttcgtttttccggagttcacgagcgtttttaccgagaatgacgtttccgaaagtccggtcggcacttaagaaaggcagacaaaataaagcctcggtcgatgtgccgggcgtcggaaattacaaaaaatcaaatgccgaaacacgggttccgagccatgcggaatacggattctgcggcttaggaaatacggtctccgcagcttattaaatacaaacgccgcatcttacacaacagagaaacagcccccgccggggctgtttccgttggttgattccgtattgattccgtacttgcggtaaatgatttcgcataccgcgagaatccgcattacctttcgcgccgtcctctgtcgaattcggggttccagccgtagaagttgcttgaatccatgcggtcctgcgatattcttagagcatcaccgaagcgctgatagtgtacaagctcgcgctctctgaggaagcggagcgtgtcgcatacatcgggatcgtccatctgacgcagcagattatcatagcatacacgagccttttgctctgctgcaatcatataagaacaactttacattaaaagttccagtggatttcaatgggaacgtcccttgtccccggaatacgcttaccgacggatatataatcaatcagcgtttccacaatttcgcgggtgagatgttccaagttggtgtatttttcaattagttcacggcgattgtcgcccgccgcgatcttttcgtcgagttcggctaactgcttttcaccgtctgcgattacacgctctaaacggtcgcgctcggtagaaaatccctttgacatatcgataaagtcgctttcagaaatcaacccttttaccttatccatgtataagtcccgaatccctttggagtattccagggccttttttcgataggtagcaaggtcggcactcaaacggtctttttgcccctgcaagtttccacaaaactctatgttctgctctaactcgtccttgtcaaggtattcagccgataatcggtttaactcgtcaatgacaagccgttccaatctgtcaactgaaataaaagaaccgatacaagcgtcctttgcaacatggcggttggagcattgtaaataatgcttgccgccgcgccccggagaagttttagacgagcgcattgtataaccgcagttcgcacaacgggcttttcttgcgaataaaccgattgtgccaacgtcaaagggctttgccctttgtgcaactaacgcttgcactctgtcccataactcccgatcaataatcggttcatgcgtcccctcgacaatataccactcacttttggggcgtggcttgttttgctttgtcttataggatacgcttccgtatttgccttgtaccatgttgccgatatagatttcatttgtgagcatatcggaaatagcaaagtatttccaaagggtgctgtttttcatcttcggctgttggtatcgtaagccatgcagacgcttatactctgttggatttggtatgcccctgtcgttaagcatacgggcgattgcagtttttccgtaaccctgtgcgaacaaggtaaaaacttctcgaacaacggcggcggcttcctcgtcaattatcaaatgccctttttggtctgggtctttcttgtaaccgtaaagggcaaacgcgccgatatggaacccgtttttccgtctgttggttagaacgctgcggatattgtcggacatatcctctaagtaccattcattgacaagcccgttgatttgacgggattttttatttcccttgttcgcggtatctgcattatcaacaatgctgatgaaacgaataccccaaatggggaatagcccatgtatgtacttttcgacaagttccaattcgcgggtaaaccgcgattgtgtcttgcataaaacaatgtcaaatctccgctgttcagcgtcttttagcaaacggttaaactccgggcgtcgtcgatctgacccggtatagtcgtcgtcgctgtaaatgttgtaaagttcccacccctgttccatagcgtattgcagcagcatagctttttggttctgtatgctgcccgagtcatctgtttcaaattgcttgtttctatcttcttcggataagcggcaataaatagctaccttcatgttcatatctccttagagataggaacaagctgttttctgtatttattataccatacagaaagcagcttgtcattaccgcttggcaagagttacactcttgtccctttcaattttattgattaactcaatccatttttgggtgagttcttttttggaagtagtgctttcgccgcttttgaaaacactcttacaaatggtctttggctgctcttttcgctccaatgattagccccctttcgagaaatggctaatacactatatgaatagcggcaagtccactattacaacaaaaatctaaatgaaaaggctgaaacgggcggttgttagctgcaacctcacgggagtttcaccccggcccatgctt

SEQ ID NO: 555 - DNA, 8493 bp, Unknown
  16S sequences of unknown bacteria
catcctttaccttcacctgataccacatcgttccgctgctgtcgtttcttctgccgagcacggaaacatgcgtaaatttcttcaggcgctccagcaggtactgttcgtccccgtccggatagcgctggaacgcagccgtgtccgtcacgaccatcgatgcagcctgtaccgggcggtaaacggaggtcccgatcgttgtcagtccgtccattctggtcaggccgtttcctgcaaagccggagatggttccgagatgaaagtcgccattgtccaccagattacagcggttcggcgtgccgcccggctccagctgtgccatatcgccgtaaaagcttcctttgatgtgacgggaaaacaggtaaacacggagcacatcagtcttcgcatcctccggtactgtcaccgtcgccaccagtctgacaaatccggaggtggctactgtcagatgctcactgtcggtattgaccgcatttccatccttgtcctcatagcgcacgcgcaggcaggcaaatccatcgtctgccatatccgttttatccaaccgggtatgcatcgagaaggtataggactgccctttctttactgtgacatcctggtaccacatgccgaccgcagtcttgtcgctgcctgtcacacacagggagcgggtgcccgtctttacgtaatcagcatttgtattgactgtcattttcatcacatcatgatcagtcgcactgcttttccatccacaggtcgcagcctggatgatcggatccttcagcagctgtacgatgttgctctgcagtttcgtcgtgttttcaaggcagttcacatggttgccgctgctgataaaccttgcaccgagcgcatggccgtagccgtcatggatatggagcagatgtccgctgttattaaagcggtaaatctccgaccggtttttattgtccgtaaactttgtgctgttatagccgtaggtaagcgacaaactctttccggccgtctccccggcatactccgcgatcttcttcacgcggtacgggctccttgtgtcgtaggtgtaacgcagctcatagccgtcgaaatttttcacggaggtgagcagctttttgctgtcataagcatatgtgctcttttttccgtccgggtcggtgaccgtcgtcagttttccgtccgtatacgcaaagctccataccctgccatccggtgcagtcagcgtcttcacccgcgttctcttcccatccgcatcggtaaagtattccaactttgcgacgcggcccacgccgtcggtcactgcaatgatctttccgtcatcttttccaaacgtcacggtgatctggtttccattctggtcgatgatatggatcagatggcccgccttgccgaataccatgcggctgtggtttttgctctcaatcacgtacggctctttgctcgcatcgccgtttactttcagcgtcagctccttgccaagctcgtccttccactcttttttctcactgtcataacggaagtaacatcttgtgccgtccgcatcgatatacttataataatccgtacctccgattgcttccttcttgagcatctgatcgtaattcaggcggaaaccataaccgcaatccatctcatcttcccggtcatttgtgttgtacacatgggcaatcgacatcggcatgcggcttccgctggtcgacatgtcatcgcggatcaggatcaggtttccattgtaatcattgacatgcacctcacctgcacggcccgcgtcctggctgtggtagctccagtaatcctccagaccggaattgtttacgtaggaaatccggatctgcgggcgcatttctttaaatgcattgtcgcagtcggaagcaaggtactcggtataaccggaaagttcataggcatccttcaccatcaggccataattttccccacctatgtaccagcttttcaccaggttcgtgatatccaggctgatatactgctgtttgtcatctgtataggtcagctggtcttcgatcagctcatcgtataccgggcggttgttccagtccagtgttgcagaagaccatggctgttttacacggtgtacctcgacagtatgcgtttttttctggtcctggagggataccagcgaaaggtatgcacccgtcaccatatccccgatcttcagcgtcggaagcttgaactttaaaaagctgcgctggatgttgtccccgcccattgttttcagcagcatgcttttgcggtaattggtttcgaaattgaagttgtccacatgtgcatcctcaatctcattcacctcaagtgaagaggttgtgagcgggtctaccgtcaccggataaacgcgtgctgcatcgcgcagccaggagtggtccggcatcagtgtgatgcgccatgtatctttctcttctgtatcctcctccaatgccactttcagctgttccgactttgccccggaggcgtccttcatcagaggcgcgctcatgcagaacacctctgtttcggtttcgtccgtaaagaggacacggtttcctttctgcactgcctgtaatccttctgcatggtacacaaaagtaaagtcttccggcacctgcgccgcacctttcaggatcaggttctcctttactgcctgtcctgcggtgtggtattctgcgtcgatccccggcaggatttccggatagaccagcacctgcgcgtctttgcggcacgcctccgacggcgctgcctgctccagatgccaggagacggtgtggtcgccgtccttgattgtaatggctgactcgctgtctgcggatgctgcgaaggaggcctgccagcgacccttgcggttcacgaatgccgtggctgacggtgcagcattttctttcttatccggcgtatttttttcaggctgtgactccacatctgccgtctcatcgactgctccacttaacgcgactgcctgtgctctaaaactgccgtgtgtatctgcggtctctttctgtacattctctgcgccattttccgcttcctccggtgtctccaccgcctccagcgtgtcatccatctcctcccagcttccgtcctccgcctggtaatggaccggtgaaaggtaaatctctgtcgtaaatgaatggtcgctgttttcaaatgtctttgtgctgccggtacggcggctctttaattctcttcttgtcatttctccgttgtccggattctgtgttttattctggttcatgtctttctcctcctgttctctcgctttttctgtctcttttgtttcttctgtcttctctgctgccttttttgccatgtctgtatacatggcatcttttctgttttccatttttgtgttctccttgtctcgttgtcttttttctgtgtcattgttctttctctttctgttttcagccgcacactcccatgctatccgtcatccccgctgccatcatccttttccgggctgattcgactcctgatataccggatatccttcttcatctcgtcaaggatctcaaacttcgccatcagctccatgagcagtgtctgataacgagcttcccgctcgctctgtctctggtccgccttctcgttttccttcatcatcgagatcagcagaaacacggccagtgccgcccagatcccctgcgacagcgcagtctcaagaatcgttgcctccatcgaatccctcctttctgttccgtctttttctttcgcacaggcatcaaatttttctctttttcgcacccttttgtcttttcctcactggcttatccggtctcctgtcaactccgacagcagccttttccaatccgctcatagctgttttaagaacatatgttcttgcaaaaagtcaaaaaaaacaggaaccccctcaaacaatccagtccgtcccaaaagcctggacctgcacacattctgcatacatgtctctgcttttgtttctgtctgttttgtttgtgggattcctgatgatgctctgtcatacattttttgtatgactgtcaaattcaatcctgctctttgtgtaaccgaaatgtcgatcgcttgtttgtgaacttctgttcgtttacagccctgagtatatatcagaacttttgttctgtcaagataattttttaattttatttttttaccgtatcaagcagcgaagcggatcgctatagttcccctctactcttcctcgccgctcagctttgtgcggtactggaaaatccatacgccaaacagtaccatccagccgatctggccggctgcgctgatgatcgtgccgatttccgcatttacaataccggaaagcaggctgatgatgccaagcaggcccgcgatgatatgaatcactgccacatacccggaagcagtaccgtaaacttcaccgttcgcatttttgcggaaggttttcagtgtcgcaaggtagctgaaatagtacatgacaaccagcatggtcactacgatcagaagaatcagaacgattaccgacactgcgattacgctctttgtaccggctacccatgcagaaacaacgattgccacgctgataataagtccgcccagaagtgcaagacatgcaccgatcattccgatgatcacatatgccttccacaggccgagtcccgtgccggacattttttctttcttcgtgcgtgctgcgatcacggtcatccacaggccgaggcaaagcagcagctccggaatgcgcggaatcaggttcgccacgatcgcgccgcttcccagcctggaaataacattaagcacactgttcatataaccggccatctgtgccgggaagtttacgtttgagagaagtcttgcagcctgtgaaaagtccacctgtttcaaaaagaccgccatcaccgcccccgcaagatataccgtctgcagcaatgccacgaggatcagcagcggagacttcaagacacctcttgccgtcatggcaagccgctgtgccgcataattgaccggacgggctgcatttacataagcgcctgccggacggttctgcatgttgaccggaccgccctgtacgttgaccggccggaccgccgccggaccgcggttcgcagctccctgactgccatttggactgcccgctgctctgcgtacatactctgcaccatttgtctgcaccggacgtctgccgtttgctgcctgcatcggacgaccggcgtttccctccattgcctgcggtgcacgtccgccatttcctgttcccgcctgcaccgggcgtctgccatttcccgcttcactctgacgtctctgcataccggccatatcctccggacgagcctgttcagctgcatttcttccttccggacgccctgcccgctgtgctcttcctgacatctgtgccggtttgcggacatccgccggtctggccgcccctcttgccggagcatcggcccgcgagccttcatatgcacgccccatctctcttcggatcgcaccggatgtcatccgctgctttcctgaacggtcaacatcgccctgtccgtaaatatgcggttcaccacgaagcggagccgcctgttttgtccctgtttccgcatccggattcggtacagcctcttcttccggtgcctcctgcatgcgcggcacctcatacagtcccgcatcatccggttcgtccgcttttcgctgcggcacatacgccagatcctcttcttctgatgcttcaaatgcatcaagcggctcatattctgcctcggcagtatgatcttccgcatttacattttctgtctgagtgctctcttttgccgtttcctgcacaaaatccgtgccagcatcttcctgttcgtcatttcccgctttatatgtatcttcaacagctgctgcatcctcttcatatacaacatctgcgtcatccatctgttcgtcttcttctgtactgtaatccgattcccggatgtccaggtacggattgccacatacttcgcagaccgtgctgtcatcactgcccacatgtccgcagataatacaccgcttcattctcgatcctcctatcctttcgcatgctcttcgccgcaaaaacaaaaaaccattacatttaattataccttatatcagatatctgagcaagcaaaaaagaaagggaacggtaaattccgtccctttcgcttttatcgcctctgtcagttattcttctccaagcagcttctctgcagaagcaagctttacacagattacaaacagctccgctgcctttccgagctcttcgagtgtcgggaaagacggagcaatacggatgttgcagtccttcggatcctttccatacgggtaagtcgctccggctcctgtcagcacaaggcctgcttcctttgccattgacacaatccgctttgcacatccatccagagaatcgaaggagataaaatagccgcccttcggctttgtccagctaccaatctccagtccgccaaggccttcctccagcgtcttctgtaccagttcaaactttggacgcaggattgccgcatgctttctcatatgctcatgcatgccgtccatatctttgaagaaacgcacatgacgcagctggttaagcttgtcgtggccgatcgtctgataatgcatccactttcttgcatcattcaggttcgcttctgatgctgccattgccgcaataccggaacccggaaaacttacctttgaagtggagataaatttgtataccatatcctccgtgccgactttttcacactctgtgagcagctccggaatcacatcctgatcatcgtcatacagatgatggatggaatatgcgttgtcccagaaaatacggaaatccggggcagccggcttcagtcttgcaaaccgttttaccgtctcgtcggaataggaaattccggtcgggtttgagtacttcggcacacaccagattcccttgactgactcatcttctgataccagcttctctaccatatccatatccggaccggtcggcagaagcggaacgttgatcatctcaattccgaaaaactctgtgatgccaaaatggcggtcatagcccggtaccgggcagaggaattttaccttatcaagtttgccccacggcgtatgtccgcagacacccattgtcatcgcacgggcaaccgtatcaaacattacattcaaactggagttgccgtagatctggatatttttctccggcacttcggacatgtctgccagcagctgtcttgcctccggaataccatccatgattccgtagtttctgcagtccacacctgcctcacataccatatctgaactgctgttcagtacgtccatcattccattggaaaggtcaagctgtgccttggacggctttcctctcgacatatcaagcttcattcccctgtcctgaaactctttgtattttgcttcaagcgccgccttttcctgcagcagttcttcacgggtcatttctttgtatggcttcatagtccgtctcctccagtatttttcattctcctcagtgtcttttatacacgtacaattgtcgcgtctaaaaactcactttccctattttagtacctgccccgtcattcgtcaagtcttttcctgcctcttttttgccttgtactgcgaaacattcaccgcatcctcgatctcaagatcccgctctcccgccaacgactccagatgatgacggaattcatgcagcaggactttgcggatctgtacctggatctcctcctcgctgcaggtaccatagcactgtgcaaacgaaccgtaatacagcacaataaaccgcccgagataccggtcaatgtgatactcgcctaaaataaaaaggtcatgatcctccgcagccgggtgcagcgggcttccggctctgaccatgactcctccattcagtttccggaagaacacttccgggaacgaatctgctgtttccattgtatactcttcaaatacttccagtgaaatcataaaccgttactgaaaacttataaaaagttataaacttctatgtttcattcctacttcaacgagtatgcttttgatgatataaatatcaatctactcacaagttcctgtactctccataggcgtaaattccggactaacgtatccgtacctatttgcatcaacatttcagtgttaacttgcaaatctttctccataagccttgagatttatagatgcctggaaatccctgtctatgatattcccacactcacatctataaattctgtctgataacttcaaatcttttttgatgttcccacaacagctgcaaagctttgatgatggataaaaccggtcagccacaataagcggaatccctttatcattgcacttatattcaagctgtttccgaaacaaaaaaatccctgttcctggactgctttggataaatgtctgtttttcatcattccactgacattcagatcttcaatacatataaatcttggttttcgatttacgatttccgatatggtctgattcaaatagtttttacggatgtttgttaatctgtgatttcgttttaataaaagcttttcctttttgattacattatttgttttacagtaactttcccctttcttatttttc

SEQ ID NO: 556 - DNA, 22539 bp, Unknown
  16S sequences of unknown bacteria
gacagctggtcggctacacgaacgagggctttctccgcgcgataaacgaggactgcgacgctttcggcgagctcccgatagagtacggcaaggcgcgcacgctccagaacacctatgtcgacgcgtactcccaccttgtcgacgtcggaaagtacctgaaatgctactattcgacaaatccctcgaacgagggcgtagacctctcgcagtacgacctcaagatatcaatgaagctctcgaccgacgaaacatcgatcggcgagccgttctatcaccgcaatctctgtatgctccagtacgacaccttgcagatgctcaaaaaggcgatcgagaagttccgcgccgacggctacacgatagtcatatacgacgcttatcgtcctacaagtgtacaacagcgttggtttgacgttatccgcgtacataaatgggtagccgacccgtcgcgcggctacggcggagttcatgaccgcggcgtcgctattgatatgtcactcatcgacagggacggaaacgagctcgagatgccgaccccgatgcacaccttcaccgacgagtcggcgagaagcagcgagaccatgaccgaggaagccagaaagaacatggattacatgacatatataatgcagagctgcggcttcagctacataaactccgagtggtggcatttccaggacaagaacgtcgcgtactaccttccgaccgaccatccgatagacgatataccgctcgtaccctcagaaccgctcagataatactgaaaaatccatcacgaaaggattaacagatgaacgagcttcgaaacagcatagaattcgacgtgccgaagctgtccggcgggcgggcgtcccccgcgtcggtggagtcggtcacactttataaaagctcggacaccgaggcgaagatgcggataaccatccgccgtatcctcagtgtgccgctcgagagcttcaccttcatgttcagattctcgaccctggcgctcgacgagcttgattcgagacatccgtatcacaaatacgtctacacagacgacgacatgaactcgagctcgcttctcaccttcaacggcgccgtgccctcgaagatgaagctgaccggctgtcaggcgttcgtgtcggaggtcaggctcgcggacgggcgggttctcagctacaagccgtccgactaccgcgacgacgacgacgagctgatcgaggacctgataaaccgcggcgcgccgataatggacgtaccggaagctccggctccgaccgaagctcccccgccccccgcgccggaaccgattgttccccccgccccggcgaaaccaaagaagatcagccgcacgaagctctcagtaatcctgactgtgctgttcttctcgataatagtcgaggtcatcgccggagcgtacatattccgctacagcgacgtgaagcacgccgccgaaacgctgacaagtgaggcgaggtacaacgaggcgtacaagctcgtctccgaccacggctacaagggtcttctctctaaggtctgcgccgaggcgtctgtccactacgcggagaacgacgacctgatgcaggcgtatgtctacgccgccgccgcgccggagaagttcaccgacaagataatcgatctcgcagccgcgaaggtcgtcgaccccgccaccggggaaatcaacgaaaacgcctaccgcgtcgcgaagatggctgacgaggacggcaagttcgactcgatcgtcaaatccatcgtgaacgtcctgacgtcaaaggaggactacgcgaacgccctcagagtcgccagcgagatgcgcggcgagaacgagcgctcaaagaccgagaacgacattttcaaaaccgcgatagaccgcttcatgtcgaagcatgagttcgagaagctgatttccttcgcgggtgagcttgacagcgtcacgggcttcggcgcggacgagaaaaccgtcgcggatgcgattgtcgactgggcgaagagctccggcgacagctcgggacttatatatttctcgacgaagtacccggatttcatcgaccgcgacacggcgggcgtcacagtgaagccggacgacagcggcatccgcgcggcgctcgacgtcgtctggccgcttctcacgacctcgcagaaacggacatatctcagccgctcgctatcggtctacaaggaactgttcaggataagaaacggcgcgatatccggcaccgacataaaggacgcggtctcggtcgacacctatgagtaccacacgatagtcctgcacaaaaacggctcggtcagcgctattccgaacggaaagcacaacatgagcgagaccttccctgtgacaaacgacgtcatcgcgatagcggcggggctcgagcactcggtgatgctccacgcggacggaaccgtgtcggcggtcggaagcaacgcctacggacagtgcaacgtctcaggctggacagatatagtacagatcgcggcgggacagtcattcacgctcggtctgaaggtcgacggaaccgtcgtcgcggtcggctcggatctctccgggcagtgcggcgtctcgggctaccggaatgtctgcgcgatcgcctgcggcagtcagtcgtcggtgatgctcttcaaggacggaaccgtgcggatacagggctacaagtcgctcgggctctcgggcgcggagaagatgacaggcgtcagctcggtacgggcggcgggcacatcggtgctgatgaagctcgacgacggcacgttcaggctgttcgacggctcggacagcggctcctgcggcgacccgtcgggctggcacgacattgtcgagtacgacgtcggctcggtctgcatagcggcggtcaactcgtccggctcgctttacaagtccggagacaacgcgccgaagtaatgaaaaatcataattccagaaaggaactcccatacagatgaacgacgaccactcacggacggaaagcgcggacgacagcgcgcctcagacagaaaacaccgccggaatcccggaaccatccggcgaagaaccggaaaacaacgccggaacgacaaccgacggcgccgcgccggaaccaaccgatgaaaagcccgacgatacggctgaaagcccgaaaccacctgagccggaaacaccaaaaaaacgccgcagacccggaaaaaagcgaattccagtcggagtgcgcgtcatactgacgatattcatcatcctcgcgctgattatcggcggagcggcggcgttcgcgtctgtgcctgtgtatatcgagcttggcgatgaaccgtcgctcggcgtgttctggaaggacagtgtcatcggcgcggtctgcgagcctgagacggatatatcggcgctcgacacgtcgacgctttcgcggaatcaggttccggtgagattcttcggtttccttccgtggaagctgaacgtcgtcgtcagggacacgacgccgccggaggtcacagcgagacagctctccgtgatgaacggaatagagccggacccgtccgagttcgtgctctcctgcgccgacatgacgccggtcacgtttgagttcgcgtccgctccggacttctcgacggacggagaacacacggcgactctctcggcttccgacacgagcggaaacaagacggacgttacggtcaattacacggtgacgtcagaaaccgcgggactgcgctatgagctcgggacgacgacggacgagatgctgtccgaccttaaggcaaagttcccggatataggcgaagtaacggtggattcgctcgacgacacggtctgcggcgactacatctcccgcgccgaaaatgatggtgtcctgtcgctcttccggataacgatctccgacaccctgccgccggacgcgactgctaaggacaccgagctggtagtcggcgacgtcatcgaggcggcgtccttcctctcggctctgaccgaccagtcggaggtcagcgtcacgaccgacgaggcaatagacttcgacacccccggttcaggaacagcgaagctgcgcgcgaccgacgcgtggggcaactcgaccgacgtcgaggcggcgtaccacattcattccgccgtccgcgacgtcacaatagaagccggaacgaccgccgatcagctgacggcgatgctcttccccgatccggacgaaggactcccgactccgacgcccgagaacccggatatggttccgcgtctgccggtcggtgagaacaccgtcatatatgtctgcgagctcgataagataccgttcacggtcaatgtgatcgacacggttccgccggtgctcgaggttaaggacaccgagctgacaaagggcgtgaccgccgacccgtccgcgttcgtcgtctcctgcatagacgcgaccgacgtgaccttctcgttcgagaccatgccggacacttccgtgaccggtgagagcgccgtcacgatcatcgcgacagacggcggcgggaaccggacgagcgccaccgcgaagctgactgtcatctacgacacgataccgcccgtcatcagcggcgtcaaagacctctattcctacgaaggcgacacgatcgcctaccgcgccggtgtctccgccgtcgacgaggcagacggaaaggtcagcttctacgtcgacacgtcggctgtgaagccctacacggcgggaaaataccggataacctacacggcggtagactcgcacggcaaccgcgccgtcgaaaccgcgaccgtgaccgtcagaaaagtcaccaaggaggtactgaacgccaaggcggacgaaatactgaaagatatcctgaccgccggaatgaccgacagagaaaaggcgaaagcgatctacgactggtgccgcgagaacctcaagtactcgaccgtgacaagctacctgatgggcaactacataaaggcggcgtactcgggctacaggctgcattacggcaactgctacacctactacgcggtcgcgcgctcgctgctgagccgcgccgggatcacgaacatgatgattcagcgaaacgaccctaacaagccgcactactggaacctcgtgaagatcgacggaaactggtatcatttcgacacctgcccgcagcccgctcctgacaacgacggctgcttcctgctgactgacgctgaggtcgcggcgtactcgaagaacaagcataagggctattacagcttcaaccgcgcgtactacccggcgactccgtgacccttttccgcgaaaaatgtcaaaaattatcacagaaggaattatacgatgaaaaagtcaattatcctgatactctccgccctgctcgtctcctccgcgctcttctcctgcggcggcactccagccaacgctgagaccggcgacacaacaaacggcgctgacacaacagcttccgacgtggcggacacaacgaccgccggagacgagacgacgtccgcgccggaaacaacagcggctcaggagacgacttctcctgacacctccgctcccgccgaagcctccgcgtatgcctgcgagctcgacaacggcttcacggtcacgataggcgctccggtcggaacgactgtcgacgacatcacgtcaaagctcggacagcgcgactacatggaggcggtgagctgtgtccatccgggctatgacaaggtctacaccttcgacggcttcacggtctcgacatctcccgccgccgacggaaccgagtacataacagagctgaccctcatttcagacgaggtttccctcgcgaacggcgtcatgatcggcagcccgaaggacgacgtgaactccgcgttcggcgacaatttcgaggagaagttcggcgtccggaactacgatctctccggcgtgaagctctcgttaattttcaccgacgacctcgtgtcctcgctcagcttctcgaagccgattgaataaccatgcggtttaatccactgttctgtggattaatttgaaaaagccctcgccaattaattggtgaaggcttttttattattccggaatctcctcggcgcagacatatctttctacatatccgcggaatctcgtcagatcggttccccagaattcccggttcgcgaggattgctccgacgccgcttttctccataaaatcaacgtattccttcgcgtcgtccggcgggtcggtcttgtacatctcgatgagcttcgcgagcgcgaaaagcaggtgcacgggcggctttccagtgaatctctcgtaatcgagcacgctcggcagcaccctcacgcggtacttgtcgatcgaattcagcgcgatcgagcggcacttgtggtggatgaacggattcgagaagcgccagacgacatcctccgcgtaagccctgcactcgtgctcaaagttctcgtcctcgtcaaacccctctggtctcagcgacggcagaatctccccgaacaggcaggcgtcaagatgccgcctcgtccgctcgtccgcgaggcagtcgccgaccgtcccgatgccgagcgacaaagcgtaaggtatcaagctcgtgtgcgcgccgttcagcaggcggaccttcagttttctgtatttgtcgagccgctcgaacttcacgttgaagtcctcgagccaaggcatccgcgggtcggacggcattccctcgatcacccagagatggaaatactcgctcgtgttgatgagatggtcctcatacggcagaccaaattcgtcctccggcgagggctttcccgaaactatccggtcgacgagagtgttgcagaacctgcactcgcttctgacatagctctcgaaagcctgaccgaagccccactcgcgcccgtgccgcaggacaagcgctctgagctctccggcgttgttctctataagctcgcacgggagcacgaggaagccgcgaagccccttgtccatccgccgctttatcagagccgcgagccttgccggatagccacgcgcgctgtcgggtctctctccgtcctgccacgcgattccggactcggtggtattggagaccatccggacagtctccgggtcgtcggcgagccgcaggaagccctcgtagtcgtcctccgggttgacgctgccggagatgcagtcgacgagcgttatgtcctgatgctcctggtcgcgcgcgacgtgcgtgtacatatagttctgcgcggcgagcgggtcttcgtgggtcttcgagcggacaatgaagatattctcgtcggatatcccgaccttgttgttcttcgcgaccataacgtcgtagaatccgcgcaggaaaacgccgccgccgaactgtatcgtcccgaccggacggtcttttcttccgagctctgagataagcataaaatactcctttcgggtgctttttcttaaggatacactgaataaatcgggttttcgcagaaaaaagtccccggtttatgggcttttttccgcgaaaacaaccttaaatcagtgtttccttaattataccacatcggatgggaaaaagcaagaaaaaagggcaaagtcattttgaaactctgccctgctcttcacagcaaaatataaacgacgacgagaaccgccgcgagcgctatgcagctaagcccgacgacgagcgtctctttcagccacccgcgcttctcgctgttctttctctccttgaactcatagagagactcggcgcgtttgtctttcttaaactcgaaatgactctttatcgtctggatgccatagctgaaaacgtcatagaaccccttcgacgcggcaaagctcagcccagccgcacccgagagcaacacccccggaacgaagaacgcgtcggaaagtatccgcactacgtctttcgcgccctccgccgaaaacagccccgcggacagcgcaaccgcgaacacaagcacaagcccgatcgcggcggacgcgtaatatttcgtcagcttctcattcatcgcttactttatcatttcctgatatcgcttaaattccgcgtcattgcacatgacgaagtgttccggcgaaacctccctgaaggacggcttatcgaccgtgtagtcgtgctcggcgagcgggttatacacgatacggcggcgggtacgctcatagagcgggtccggaagcgggatagccgacagaagcgagcgtgtgtacggatggagcggattcttgaacagctcatccgacgacgcgagctcgaccatcttgccgaagtacatgacgccgatgcggtcggagaaatacttgacgaccgacagatcgtgcgcgatgaacagtatcgtcagaccgaagcggtgtctcaggtcgttgagcaggttgatgacctgcgcctgaatcgacacgtcgagcgcggagaccggttcgtccgcgatgatcatatccgggttcatgatgatcgagcgcgcgacgccgatacgctgacgctgaccgcccgaaaactcatgcgggtaacggctcgcgtgctcgcggacaagtccgacaagctcgagcatctcatagaccttctcgtcgatgaccttctggttgcgctccccgcggatgacgagaccctcggagattatctccttgaccgtcattctcgggtcgagcgacgctatcgggtcctggaagatcatctgtatctgagtgacgagcttcgcgtttttagccttgcgaagctcattcttgtactccgcggtcagctcggcgagcttctctccggaggcgttcgcgatcagcggcttgtacttctcgtcagcctgttttttcagctcgtcggagtactccttgtcgcagttcttcttgtcgaactccgcggattttatattctcgcggttctcggcgattatcttctcgcactcttccttgattttccggcgctcctcgtcggtcttcgcggcggcggtcttctccttcagatccttcttcgcctgagcgatggcgctcttgtagcccgccgtgcccgcggcaatgcgtatgcccttgaagtaaacgcttccgccggtgatgtcgtagagcttgataatcgagcgtccggtggtggtctttccgcagcccgactcgccgacaagtccgaagacctcgcccttctttatatcaaagctgacgtcgtcgaccgccttgttggagccgaaatactgacagagatgctcaaccctgagcagcggctcgttattctggttattcgtcatcactgtcacctctcttttccatcattctggcgattctgtcggttatagccttcggcggctcgaccttcggcgcgtccggatgcagcagccatgtggcggcgctgtgcgtgtcgctgattctgaacatcggcggctgtctctcgaaatctatcttcatcgcgtacttgtttctcgcggcgaacgcgtctccgaccggcgggtagatcatgttcggcggggttcccgggatagcctcgagcttctcgttggtgtcgaggtcaggcatactcgagagcagcgcccaggtatacggatgcgcggcgtgatagaacacgtcctcgcttgtgccgtactcgacgatcttaccggcgtacatgacggctatcctgtcagccatgttggcgacgacgccgaggtcatgcgttatgaatatgaccgacagatgtctctcctccttgagcttgtttataagctcgaggatctgcgcctgaatcgtgacgtcgagcgctgtcgtaggctcgtcgcatataagaatatccgggtcggctgcgagagctatggctatgacgatacgctgtctcataccgcccgaaaactcgaacgggtactggttgtatctcttgcgcggctcggcgattccgacctcttccatcagctttatagccttctgcttcgcgacgctcttcgtgacctttctgacgacgccggaagcgttcgccttcatgaaatcgatgagcgcgacagtctccttgtcgtagttccgcttgtccttcgccgcctgtatctcctcgagatgagcgatgagacggtcgatctggtgcaggatattctccttgaccatatcagtgttggtgatggacgcggcgggaaccttccagtcgggctccttgcccttcgccttcagcgcgtcgtacttcgcctgcatcctgtcgtgcttcgcctgctcggtcttgttgtgcgtgtgagcgtggaagtagacgtcaagctcgctcttaagaccggacgaaaaggtgtaggacaggctgtccttgacgatcgcgagatgatcgatcgacgccgcgacggcgtccgccatctccttgtgcgccgccacgcacttctcgtggtcgagcttttcctcggtgaacaccgcgcgcttgtcgcggagaacacttaaagccttttcgcggttcgcgtaagctctctcggcggagtgcattatgcccttcttcgcgtcctcgatgaacgcgagcatgaatccgtcgtcgagctcctttctcatgaacctgttgagctcgtctatcggcatcttcggcagagccgcgcccccgcctgtggtttccccgttctccttcgcggttccgaaggtgaggtaatagcccatcgcgaagaaattcggctgctccttcgcggtcgcgcgagcgagtatctcgtgcagctcgccgaggaggcttatcgcgtttccgaagtcataaccgggctttccggcgtcggacgcgagcgagacgagactcttcgttatctctccgagccttcccgcctcgtcgtcgacgacgtattcgccgaccgacatatccgcgagcttcgccgcgtgttttattctgtaagaggcgtccttgaccgagttcttgcccatctcgaaggtgagctcctcgatgaggtcgacagcctcaagcgccgcgtcgcgccggtcgttatagaccgactcatgctttatatgacagatctcgaacttattgaagtcctgacattttctggtaagttcctcagccttcgcctgatcgttcgcggctatagcctcgatcatctcctgattcagcagcttcaggcagctgttgaaggtcgaacggctctccttctggcgcgccttgcccttgaggatcatcgcctcggtgagctgctttcctatcttcacgatcgggttgaggctcgacatcgggtcctggaagatcatcgcgatcttgtcgccgcggatcttgtggaactcgtcctcagagatctttaacaggtcgcggccgtcgtaaattatttcgccgccctcgattatggcgtttccggcgagaatgccgaggatagccttcgaggtgaccgatttgccggagccggactcgccgacgatcgacagggtctcgcctttcgcgaggtcgaagctgatcccgcggaccgcctgcaccttgccgttcgttgtgcggaaggatattgtcaggtcgcgtacactaagtttgttttccatatcagccctccgctcctctcatagacgggttgaacgcgtcgcgcagtccgtttccgaacaggttgaacgaaatcataagaagtgagaaatacagcgccgggaagaacatcgcgtgcggagacgtcgtcatggaggtctgtccctgcgacagaagcgtgcctatactggttccggcgaagtccgagatattgatgatgccgaggtaagtcagcgtggtctcggagcgtatgacgctcgggatgacgagcgcgcagcttgtgactatagttccgagagagttcgggaacacgtgcttgaacataagccgcatatccgaggctcccagagtgcgcgccgccagaacgaactcctgacccttgaagcggtagaactgctttctcgtcagagccgccatgcctatccatccggtcagcacgaaagcgaacaggaaggacgggacaataccgaccttaggcgccagatgcagctggaacaatgtcgccacgacgataaacgggacattcgagagtatatcgctgacacggtcgagcacaaggtcaatagcgccgccgtagtagccctgtatcgcgccgtaaaacgcgccgatagtcaggttgatggcagacacgatcaccgcgaagacaagcgagaaccgcgcgccgactccgatagcgcagaatatatcctgacccatcgagtttgtgccgaagatataggtcggctccttgccgttgacgaagcggtaataattgtagtagcagacgcgcgcctgtaccgagccggactttcttatcgaatagatatagcttccgtcgtcgcccgggatgcgcaggctgttgtagggcgcgccctcgatcgcggaattcttcgagtagacgggcgtgtagttgccgtccttatcgagcttcggggtgcccttcgagtcggagacctcgtaccagatgttcgggttgtcggtgattccctcgatgtccttcgtttcgacatacggatagatgacctgtatgccggtctcgttctggaactgctggatagcctcgaactcctcgtatgagaggacgcggtagacgacgccggtctcgtagtacttgtttgtcttcagcttatagctgtaggaaggcacttccttgccgcggcgtacgaccatcgtctcgtgagttgagacgatcttcaggaccgggtccatgccggtctcgacgccgattgccttccacgcggcgtactgcgcctcgttctggctcgcgtgggtggtagagccgtcgaggatgccgatgttcatatcggcgatccatctgacgaacggagggtagttcgtgtatctcttttccttatcggtgaccttatacggagaaatcagcggggagactatcgcgaaaagaatctgtagcccgatgattatcgccgcgacgaccgacgacttattcttgctgaaacgcaggaaagcgtcggcgaaatagccgcgggacttcgtctcgagcttttcgtcgtggatctcctcgccgtgtctcgcgaactcgaactcggacgccgggatgtgctcgtatttaacgtttgtatcgctcattttacatatcctcccggtggtttatttcttcgagcccatacggatgcgcgggtcgatgaagccgtagcttatgtcgacgacgatgctcgccacgagaccgatcgccgtgtagaaaacggtcagcatcatgaacatcgggtagtcgcgtccgttgatcgagttgatataaaggttgccgacgcccggcactccgaacaggttctcgatgatcagcgaaccgccgagaataccgatgaactcaccgaatatcgacggaaggatgacgaccatgcagttcttgagcgcgtggcggatggtagcctgcgcacgggtcagaccctttgtgcgcgcgaggagcatgaactcgctcgtcagcacctcggtgagctccgcgcgggtggttctcgtgaacccggcgatgaccggcatagcgagcgacagaattaccggaatcatactgacgaacatagaccacgagaaatagtcagtacccgacttcatgaggaacgggaaaagactcagcttatatgacagaaaatactgaataaggaacgcgtatacgaaggacggcaccgaaatgcacaccattgtcagtgtggaaatcgtgtggtcgatccacgtattcttcttgagcgccgcccagataccgaaagctatgcctatcgggatactgaaaagtatagaataaaggttgacgatcatggtcgccgggagctttgacgcgaagatatcggagacattctgaccgatatacagcttgtcgctgacgccccagtcccacttcgtcagaacattccggaggaatatcccgaactggacaagatacggtttgttgtagccctgcgcctctcgtctcgcctcgatgatctgtgtgtgaggatcgttcggcgggagctcgactggcgggagcattctgacgagcacaaagcagatgccggtgatgataagaagcgtcagcagcatcagcagtactctctgggcggtgtatttgagcattttccagacctctttcgtacattgttgttttaggaatttccgatcggaaattccattttgttttgtggtcagccgcacggaaatatccgcgcgccctcacaaaaaaacaaatttcatagcgacgcgaagcgacaccttggcgacgcgaagcaacgccttggcggcgtggagcgacgccttgcgcctttgacagcgctctttcgcgggcattcacccgtgaaaaatctcaaaaatcctgtgaaatcatcggaatagccggatttaataaattagcagaataaatttctccatatacagcaaaatattgcaaagctctcgcccggcaatatctgtaaaataaaggcaaaccgcggcggcgttctgccgccgcggagcttgcctgtttattcgcctttaggatttcgccgtgatgtcatgaaataccaacctgaaagattaatacttcagctcgccgccctggctcgttacatactcggtccatgctgcgtcgtcatagttgtacttcatgtactggatgccgccgcggctgagaatcgggttgtactcctcgacgacgtagaatacctgctgagacagcagagccatcgaagcgttctggagcatcgggatatagtcgtaggtctcaaggatagcgccctcgatagccgccagaatggtaagtctggtctgaacctcagcgataccgtcgccgaagttgtactccttgtcgccgacagtgacagtcgcgccgttgagagcctgcgaccactgagcgaggttcatcttgacagtctgaacgtcagccggctcgccgatcttcgcgatgtcgatgctgagctcgagagacttcgaagtagcgtcaaaccatttagcgtcatactggtaggacgggttggtgtactgctcggtgagcgagaacgggttcagagcggatccggaccagcccgcgagagagacgtcagccataccgttcttgagcttgttggaccagtcgttgccgtaaggagcggacttgacgaactggatcttgccgtcgaaaggagtgtccttcgtggcttcgttcatcttctcgttgaggtaatcgatggtcttggtcatgaagtcgttgtccgctgacatcgcgtactcgatctgaacagtctggtcggacttgccgtcgccgtcggcgtcggtgatataaccagccgcgatagcctcgtcaaacgccttcttgtagagctcttttgccgctacagggtcgtaaccggtgatggagtcaacagcctcgtcaaggctcgagaacttggaagtgtcgatagaatagaagtcgcagagaacctgctttgcctggtcggtgtcacgatatctggaaccggtatccgggtcgtagatataggagttaccgataagaccgtaaccgcccgaacgagccggggagacagtggaagcgaagagctccttgtcataggagacagcgaccgcctttctgaaggtagtcagggtcatcgtctggagatcatacttcgaggtgtcgtagctgtcgttagcttcgcggctgttgatagcgtcgagataaccgttgaagatgaagaagaagatggtctcggaaggagttacataagtgtaatcagagtttctgtaggtagcgaagtcctcgctctggaggccgtaggtcataagctcgcccttgaggaacatcagcttattggtagcggcctcggcgacaacctgagtgtcaatcgccgtggtctggtacatcggatagataagtccgtcttccggatcctggtaaacgtgcttgccgtcggtgtagccgtaccacttctcgttgcgctcgaaacgcatcgacttgtccgcctgataggagacgagcttgtacggaccgtaggaagaagtggtctcaacactggtgttgtaggaagagaaccacgcgtcgccgtccttcttcaggttagcttcgtagaggtcctgctttacaatccagttgctggaaaggttgtagtaaaggttgaagcccgccagcgacttgccgaacacgagagtgatctgataatcgccggtcttcatgatgccgacattcgcgaagtcagccaccggataggtgtactcatagaaagcgtagagatcgagattctcgaccggctcgttgccccaggtatcgcttccgacaaactcatagagagccgccttggactcgtcggtaaccggaacatagccgttctcgtcgcccatagccgcgagcttatcccagactccctccgggaaatactcagcgtaggtcgagagagaatcgctcatgtacggaatggaatcattgagagagaaatagagctttccgccgtcagcgttgacataaacgccgtcgtcgcccttcttcgcgtcagcgagaacggtcgtcggtgtagcgccgtcaggagcgttggacttcttgatggtgcgtccgctgttggcgtagttctcagcgcccgcgatgcagatgtcgcccgcgtagtaatcggtagcgcggtagttcagaagctcagggttcagcagctgcttcatcgagtacacgtaagtgtccgcgttgatcggagtgccgtcatcccagcaagcgttctggttgaggtcgatggtgtaagcgtagcccttggtagcggactcaggaatgccgaactcagggttgcttgccttgatcttctcggtgacgtcaaccgggtcggaagccgccatctcaggaacgatcacatatcctgcgtagtcttccttgccctcaacaggatgcagagcgtcgttgaagtagaagccataaagaccgacgcgcaggaaatctgccgggtaggcgtcatcgttggtctggtaggtgtgaggattccagttggtcgccatagtggagaccgagtccttgtaggtatacgtcttcgacttgtcgaactcgacgacgttcagcttttcgccggagtcgtcagccgccgacgtatcgccggagccgtccgtcgtttcagtgccgtcgccgttgcccgggttctcggaactcgtgcaggagacagcagccggaacgatcattgccattacaagaagcaaagcaatgacttttttcatttttcttacctccaaataaaatataccatatgtcccgtcgggaaatacagtttacttttttaatatcgcccggtcgtgagcatacgccctccatcccgtcatgcgatataaattattataccactcccgacgcgttttgtaaatagcttttcgcgcatttcttattttttgttaaaatcacgtcaagacacctttcctgacagaaagtctcttattcatgttgcgcaatgcgatttttgtggaattataatatatcagagaactaaagcgcaatcacgttaataaaatgggataaaacagtgccgtcaagaactattatgccgcgcgggttgtctattatgtatgatatgacgcggcgcatactttttcgccgtccggaacgaagccgggaagcaataatcgcgcgattccggaatatttacgccacatcggatattccccgaaattattgtcgtgattctttcatttcgccgtccgattcgcgctaaaacggaaaaagcgtgactgtccgtcattatgacagagccgacatatggtcctccgtcccgccgggtattccgcagaataacggcggaatcgctcaaccgccggttgatttttttgtcagtgcaggattctgtctggaatactgtcaagccgtctttttttcaggatgaaatcgctcggcgacatcccgcactcgcggcggaagaacgccgaaaactggcatacgtcgcggaacccggtgagcctcgccgcctcgccgacaccgtactcagccctcagaagctccttggcgcgggtaagccgcaggtcggatatgtattgtctcggagatttaccgtaagcggcggtgaaatcccggcagaggtatctctcgctgattcccgccgacgacgcgagatcccggacgcggagatccggcgagtggtagttctcgtgtatctccgaaatcacccgcgcgaggcgatccctgcgccggtacggaacgctccccctgtcgcggcggcggcagatctcggcgaagatacgataggtgattgacatacagtcggcgcggtagtattcgtcctcccggtgacggttccagagcttcgccgcctcagagaagagcgggaagagatcctcgcagttcctgatgaccatccagttctcgtcggtatgtccgaaaaagtcgataacgtagcacttcaggtaattgtccggaagctcgatgcggtatttctcgtcctgacggaagaagacgatctcgccgcccgcgatgtcgatggtctttccgtcgatgaacatacgctcgcgttttccgacgtgatagatgattccgaagaaatcccttgacagcttgtcaagcgggtatcccgtcccgaagttctcatagatatcgatatgaacgatatcctcgataacgaattccgacatgaataccacccccgaaaccattatacaccatccgggaatgattgtcaagggaaacactgattcagtgtatcctgggaaaatttctatgttccgaaaaacacaatttattccgatttcttcattgacataccgtccggcggatgctatacttacaatgaacgatcggccgatcgagtgattccggaatacacaaataacgaaaggataatccacaaatgaaaaaactgacagcgtcccttcttcttatttcccttctcgcgtccctcgcctcctgcggttcacaggacagcggcacaaacgacacgacctcgtccggcgcctccacagacacgacagccgaggaaaccacgtcccagttcgtaaaggacgatctcccgtccgacctcgacctcggcgggaagactgtcgggattatgatcggagactattttaacgcgttcctcgatgacctctacagcccggaggagaccggaaacagactctccgacgccgtttacagaacctcgaaaaaggtgcaggagcggctgaatgtcgtactcgagtacaattatcagacctacgcgtggtcggagatggcagggtttcagtcaaagataatctccgggatactcgccggcgacaccgggtttgatatactttttgacgtccagaactactcggctcagatgcaggagggcgaatatttcgcgaacttcgctgatgtcgggaacatctcgcttgaaaagccttggtacaatcagacggtgcttgagaatatgcccgacgactacatctatttcctgtccggtcagttctcgctggcgaacgtcaagagcgccttcgcgatgtacttcaacgccgatctttattcctcgctcggtctgaccgaagacctgtacgctctcgttgacgacgggaaatggacgatagataagctcgacgagctgacaaagaacacctactcagacctgaacggcgacacgaaagccgacgcgtccgaccgctacggcgtgaccttcggcgacatgaacaagtacctcggcttcatcaaggcgttcgacattgatatgttcaggaagacctcgtccggatacgagttcgcgtatgacagcgagcgcgcctctgacgccgtctcgaaactctgtcagttcataaacgacaacgagaacacgcaggtggcgttcggcaacgacgacacgcatccggaatatcagatatcaaccggcggaggaaactacgcgtcgaagatattcacggacggacgcgctctgttcagcttcggtctcatcgcggacgccgcgacaatcgttccgtccatagatttttcgtatggactgcttccctacccgaagtgggacgagacacaggagaactacggaacaatgctccagagaagctgctacgccctgattccggtgaccgtggaagacaaagacgccgcgggagcggttctcgaggcgctctcgagcgaatcctaccgcactctcgttccggagtactgcgaagtgtcgctcaaagtccgctattcacaggacgacaacgtcgcgcggatgttcgacctgataataaactcgatagtctacgatccgggcgagatattcacgagccagctcggcacgccgtccgccgatttccgcggcgccatcctcgacaacaatccgaactgggcgtccaccatcgcaaagaagaaggatgccttcatcgaaaagatgaacaagataacagaagaataaacttcccgcttgacctccgccctccgatgtgctataataaagcagaaaaggagggcgggcaaatgaaccacaaccaatccgcgggcaaccggaaatgaccgacgagagactgatctatgaggttctgtcggtcgttgaggaaatccccgagggaaaatgcgccacatacgggcagatcgcgaagctcatcggcagggacaaaaattcgcgccttgtcggaaaaattctgtccgaagccgaccgctacggcgactacccgtgccaccgcgtcgtaaacgcgtccggcaggcttgtcccgttctggcgcgctcaggcggagcttctcagacgtgaagacgtcccgatgaaggacgagacgcacgtcgacctcagaaaatgccgatgggagccatgaatcccatcaaaaaaggacttgatactatgctcggacaactcaaaaaagaccttccgtaccttgagaacaaatatcacaggacagacagacccttcgacgccttcagccgcatggcgtatcacggctgggaatgcccggaggacagcggtcttgacgacgccggaatgcgtgacgcgctcgaaaaatatgtcgacacgctcccggacaccgaccacgcggtgatcaaagcgaaggcgttcgcctttgtgctcgacaatatgcgtatcgggataaacgaacacgactacttcccggtcctctggaactggaaccgcccgctgaacttctgcacgataaaccgctggctcggcgatgtgaaactgtcggaggaaaaccaaaaggcgagagacgagctctaccgctccgccgacataacctgctggatggactacgaccactctgtccccgactggctgtccctctacaaatatggttttaagggcataaagaatcgtgccgcgagataccgcggactgcgcgaagagacaaagccgctgacagacaaggaacgcggatattttgactcgatagatatagagtacgccgctatactgcgcctgataaaccgtctcagagaagccgccgaacgctcagactcgccgaaagccccggagatggcgaaatgcctcaagactttagagaacggcgcgccggtcacgacctacgaacggctgatgcttatctacctgtatttcatcctctcggagagcgtcgactcatatcaggtgcgctcgctcggaagcggcatcgaccacgacatcgacagcgtgtacagagaagacctcatctcaggaagatacaccgaaaaccagctcgacgacttcatcggctacttcctcatgcagttctccgcgataggcaactactggggtcagccgatgtatataggcggcagcgaagaggacggctcaaccagattctcggacacgacgctgaaaatcctcgacatctacgacgagctcggcatctacaacccgaaaatccacgtcaaatacaccccccgcacgccggaaaaatacctccggaaaatctgcggcatgatccgccgcggccactcaagcttcgtcttcgtctgcgaggacaacgtcctgagaggtatgcgcgaacgcggaatcccgttcagccgcgcctacgacttcgacgtcaaaggctgctacgaattcacggtaagaggtgaagaattctccaccgcgccgatgtacataaacctcgccgcccccgccctgtacgccctgaacagcgccgcccccgacgcgtcatacgaagacatagaaaacgcctacttcacccgtctgcgcgatgtcttcaaaaagagcacagcaatctgcgacgacctcgaaacccggataggagaagtcaacccctcccccatgctctccgcgacaataaagcacagtctcgacaccgcccgcgacgcctaccacgacggcgccgatctcgtaaccacctccatattatccggaggtctcggcaccgcggtcgattccctcgccgcgataaaatacctcgtcttcgacaaaaaactcaccacaatcgataatctccgcgaaatcctcaaaaacaactggtccgacgaaaaactccgcgccgaagccctgtcccgccccccgaaattcggaaccggcgaacaattcacagacaacctcgccgccagaatctgcgaagaaatccgccacttccaaggcaccaaaaactcccgcggcggctactacaaaatgcacatgcactccgcccgcatgtacatagaattcggcaaacgaatgcccgcctcccccgacggcagaaaagccggtgaagaaaccagcaaaaacgcctcccccgtaatgggcatggacaaaaacggcgtaaccgccctaatccgctccgccctcgccacctcccccgaaaaattctgggaaggctacggactcgacataatgctccacgattccgcggtaaaaggcgaagacggcatgaacgccatgctcgccctcctgaaaacctacaaccaaggcggcggtctcacaatccaattcaacgtcctgaacgccgattccctcaaagacgcccagatccaccccgaaaaataccaaaccctccaaatccgcgtctgcggctggaacaccctctggaacaatatgccaaaatccgaacaggataaatatatagagcgagcggaaaatatttaatgtcagaggggcggaggaccccttttaaggaaag

SEQ ID NO: 557 - DNA, 17065 bp, Unknown
  16S sequences of unknown bacteria
ggctgtcctcgagcacggggtgtccggtgtcgcatagctccctgccggtcgctctgctcgcctcccaccctccctgcgggtcgctttgggctgcgcccaaggccccactggggccacgcttcccttcgggacagtttgcttcgctcacccgccgggaaaaagccctttattgcccatttttgaaagagggagttcgcaatgtcgcgcgcagcacagttggctagctaactcatacgttcgtgcgcgctcgtgctcactcttttcctctttcaaaaagggcaaggctttttccctccgctgcctatctccgctctgctcccccgcagttgacgcgagacatactcaaatagcggtacttgggatgtttcagtgtagcttggatgatggcgcagcacagaaaaacagaattgtttttttctgcggttggcgttatccatacaccaataacactgcttgggatgcttcgatgcagcttggatatatttgtaacacaaaatgccagcgtggtttcaaatccacgctggcatttttatgcgagccatgaggcctgtcgccgaatggcggtctatatcagccaactgacaggaaatcgtacaagacccgcgagccgcgaggcctgttgccgagcggcggtaattcaacggccaagccgcatgtcccactggcaccctgcgcgcccatggcgcgcagtccggggttaaggggcactgccccttaaggaaggtagacggtggcgttcatgccgggaagaagctccagactggtggaaagggagagctttacgttgtagtaggaggcgttttgcttctgaacgcccatgccggaaatggaaacgaccgtgccggaaagctccgtgtccggatagcggtcgcagatcaccttcagggagtcgcccacgtgaacccggtccagatccacttcgtccacctgcgcggtgacttccatggaggaaaggtcgtgcagcacagccaaaacctgtcccttgtagacctgctggccggaaatcgccttcagctccagcacgccgtcgcagtccgccttcagctgaccgtccgttaccgtgggagcgcagtccgcaggcgcaagctcaaagagcagctggcccttcttcacctgctggccctgacggcagtagcttttcagaacgcggccgctgccctgaacggctacatccagcccgcgaaccagcgtgccgctgccgatgcaggtcttgctgcccatcttctcatcccggtagatcttgacctgatcatccttgtcaaattccccggcggtcagctccaccgtgaaggcgtcgccatccacagaggtaatgcggccctcgccggtgttgtcggtatcgttgctctgctcgaaatagacgtgtgtgcctacgtgcagctccttgttttcgtcgctgtcgtagcggccggcgttggtggcgctgatgagcagcgtttccggcttttcaatgttggcgattttgccgtattgggcgatcacatcttcacaaaggtcgccctcctccgcgaaaacgccctgcagtgtgccgtctgcgggggcgtagagcttgttggtgtccatctccagcaccacgtcgccggaggagatccgctcgccgccgttccagtcatagggcagcagcacgcccgcaaagggagcggtcagttgaacggtgttcgccgcgtccactgtggcgttggccgtggagacggcggcttcctccgcgcctgcggcgcaaagggggtccagcatcagcaggcaaagcacgaggctgatcaatttctttttcatcctgaattcctcccgtttttttccgatttattccacgctcttcaaagccgccaccatgtcgatgccccgaaccttgcgggccagaaagcgggtgacgaagacggagaaggcgtaggtgacgacgcagccgatgagaacggacttccacgaaacgaagggcacgaactccatggtcttgctggcgcagctttccagaatcgcgccggtgagccagaagcccgggccgacgcccagaagcacgcctaggccggtcaaaaggtcgttttccgtggtgatcagccgccgaatctccttctgatgatagcccagcaccttcagggtggcgtattcccgggaacgctccatgaagttcaggatgcccatgttgtacagcatcacgaaggccagtcccagcgcgatgaagaacatcagcttgaaaacgccggtcaccgcgtccagcacggtcatggtgtccagatactgctgatccgggtattcccagtcgtccagctcgtccagcgcgttgacggtatccagcccgcgctgcgtgggctccagcaaaagaagggccgtaggcgagaaagcgcccttccggcagccctcccattgactgcggcccatgaaggccatcaggccgatgtcgatgggcgcaatggccgaaaccgtggtggtaatggcctcgtcgtctccggcaagccagaggcggacgacgtcgcccacgctggcgcgcagatattgggccagcttctggctcagcaccacgccattctccggcaggggcgcccaggcgttgtccggtcccagcagaagcagccgctggtcgtcctgaagcacggtgagggtggtggtgcggctcttttcgccggtgcggatgctgacggtcttgtccatgaccgcctccacccgctctgcctccacgcgcttttcatagctctccgccgaaccgaccgtacccgtcagattcacccgggccgtgtaggccagcgtgcccttgtagtacttgcctacggagtaggccacgctttcctgcaggcccatggaggtgatgatcagcatggtgcagcacagcacgcccaccagagaggtgagggagcggcccttgttgcgcatcaggttgcgggtgaccatcttggcgttgaagcccatccggctccacagccgggggaagcgctccagcagcagcttccggcccgccttggggggcttggggcgcagcagctgagcggtggtttcccggccggactgccggtaggtgcggtagcagatggccacggccagcagcacgcccagcccggtcaccagccattccgaccaggacaccggaggattcagccggtagggaaactggaaatgagccatttccagctcccacaggatgctgggcagggtgtgccgccccacgaaaagccccagcagcgagccgatcagcgaggggtagagggcgtagcacatgtagtggctgcgaatctggcggccatggaagccaagcgccttcaaagtgcccatctgcagccgctggttttccatcatgcgggtgatggtggtcagcacgatcatggccgccacggcaaaggccatcagcgggaacagatagcacaggttgtggaacatggtcacgtccgactgcacggcggcggagctgcgctgggtgtcccggttgacgatcagcgcagccgggtatcggtcgctgatagccgcttccaccgcgtcgctgcggctgcggtctttcaggatgatcgtggcctgattcagcggcatcgtgggcagcgccttggcggacagcagcacaaagccgtagttcagaggatcgtaggtggtatccttgttgtcgctcaggtattcggcgctctggcaggtgccgcgaatccagaaatcatagtcgcccgcagcggttttcagggtcagcttatcgcccagcccgagcccgttggcccgggcaaagccgtcgtccagaagacagccccgcagatcgctgggttccagcgcttcgccgctgaccatcctgggaacgttgatgcgcatgacgccgtcgtaggcctccagctgcagcacgggctcgtggggcaggtcggccttcacctgtgtggaaaagcgggcctgcacatcctccacgtcgggaaaattgcgcagggtctccagcgcttcccgatccatgctcatgttgacccacaggtctgccacgttgccctcgtcaaaataggtgttggccgtcaggtcgatggtacgccacagcgcgtccagaccgctgaagcaccaggagcccagtgcacagagcagaatgaccgccacaaactgcatccggcttttccacatgtcccggcccagcttgcggccaagaatgtttttctttaccatgagatgtcctccacggcggcggggtgatcgttggtttccacgctctcgatccggccgttgcgcatacggatcagccgctgggccaaaggcgcgatctgggcgttatgggtgatgatcgccacggtggtgtggtaggtctggctcacgtcccggagcaaagccagcacctgcgcgccggtcttggagtccaacgcgccggtgggctcgtcgcacaaaagcagcgccgggttcttgcacagggcccgggcgatggaaacgcgctgctgctcgccgccggaaagctgggcggggaagttgttcatccgctctcccagaccgacccgccgcatcatttccacaggatccagcgctctggggcacacctgacgggccagctccacgttttccagcgcggtcaggttgggcatcaggttataaaactgaaagacgaaacccacgtccagccgccggtattccgtcagctcccggccggacaggccggtgatctccttgccgcccacgacgatcttgccggaggtgaccttgtccatgccgcccagcaggttcaaaatcgtggtcttgcccgcaccgctggggcccagcaccacggccagttcgccctgctccatctcgaaactgacgccgttggctgccagcaccttttcgccgcccatctggtattctttcgtaacgtcttcaaaggaaatgtagctcacacaggtttttcctttccgaatgaccgattcgccagagaggatcattcttacaaggtaaagagtagcaggatgcgccagcgccgtcaatagacagcgggacacttttaaccatatattcacaaacggtttccgcccttgcgcggcggcggcggcgcggctataatagaggacggaaaaaaacgaagatcgggaggcggacggatgggtcacagaagagacggtttgataagatggctggcggtggtgctgacggcgctgctgctactggccggagcgaaggcgctggcggacgcgggcggatatgccggggatggcgattatggctcctgggacagtggaagctcgtgggatagcgattcctcctgggacagcgacagctcctggtatgacagcagctccgattcctcctccggcgacggcgagctggacggctgggtgaccatcgttacgggaggcgctatcgtggtgatcgccatatggatcgacctgagcgaaaggaagaaaaaacggagcgccggcaagaagcccaagaacctgcgcccggtggaggatctgctggacacggatcccgacttcgacgaggcggccctgtgcgagcagatctccaacctgtatgtacggatgcagaacgcctggacggccaaggatttcagcgtgatgaggcccttctttaccgacagcctgtaccagcagtttgaccggcagctgcagcagatcgtagccgcaggcaagaccaaccacatcgacgatatcggcgtgctggacgtttccctgctgggctggaaggagaaggacgagaagcagtggctgacggcccgggtgaagacccgcatcaccatctattccaccgacgacaagaccggcgaaatcgtttccggcagccggaaggaggtcaagctgatggaatacgagtggacgctggttcgggcctcggatcagaagacattcaccgaggaagaaacccgcaccgttcattgccccaactgcggcgcagcgctgagcatcaatcacagcgccgagtgcccctactgcggcagcgtggtcacctgcaacgaatacggctggacgatttcccagattcgcggcattgcccagaaaacggtgaaaaagtaagccacgataagcaagcccccgggcggcggaaaagccgcgccgggggtttttttgcctaaaaaggggcagggaaaagaaaacagcggggcgggccgcaaaaaagggggcgaagcaccgaggacgagcacgccacgaagaggcagcgcagtccgaagcccgcgacgcgaagcggggcgggccgcaaaaaagggtgcgaagcaccgaggacgagcacgccgcgaagaggcagcgcagtccgaagcccgcgacgcacgaacgtttcttattatcgcagacgataaatgttttccgataatgttccttcagaaagaagctttctccaaacaaaaaatcccccaagccgtaaggctcgggggaaaaactgtccgttagttggcggagttcataccgtaggtcagcagcgcttccggggggaagtcggcgatgaaggtcttgccgcgggtcagctggatctcgttgcccttgtcgtcaaagtagacggtgggggaggagacggactcgcgcacccagtagccggggatgtagcggccgccgatgaagatgtcggcatttcccttggccacggtgccgtcggtgaaggcggactgcatctggggcatatcataggagccgttggcgaactcgtagggaacccgctggatgatgacgttggagaagctcatctgctccatctcgcggtcttcgatgttcttgatggtgctgttggaagcggcggcttccgcatccgcgtaggtggcgtagggcacgatgccgctgtagcgcaggtagaggttctcgttttcgtcatagtagaaatgagagatccagttggggctgccccagtccagattgatggcgtaggcagtctcgtagccgtcggtataggggctttcatcggtgaacaggaagggatggggcgtggctacggtggtctcggggatggtgttgcgcaggccgaccacatccgcattcaggttgttggggcgctgcagaccgtccacacgggaggaatagtcgttatagtcattggtgtgcaccagatccatggcggcctttttatccagcgcgcccagctccttcaggaaggaagtgatgttgttgttctgagcgcgggggccgccgccgaacaccagaccgccgccccattcttcccgcaggagggcgtggccgtaacgggcggaacggatggggccgacgctgacgggctggccttccgcgaagctgtcgctgaagaggaaggtcatacgggtctcgccggtgcggtacagaacgccttcgtacacgatgtccgcatactggccgccccagggcgcgcgggaataaacgccggcgctgatggtgttcacgccgttatacttgaacttgctcttgggcagctcgttggcgacctgcaccagcataggcatgtagcggtcgctttccgccaccggcaggccggtggtggggctttcgccgggaatgacgggattgaccgccaggtcgtccttattgtaattgatctcacgatccggcacatcctgcaggaccgtgacgttttcagtgctcatgctgtatttggcgctcttggacgcggccagagccgacacgcagctcagcgtcagcacaagagccagcaaaagggagaccagcttcttcacaggggaaccctccttagcgtatggtaatgaatcgagatgcggaaccgccacgcagatagccgcatggtacagccattatagcattgcctgaaaacaaatgtcaacgcggcctgcggaaaagaccggtttttccggggaatcgttacatttgtgaccgcctgtggacaaggttttccgcacccgtccgccgcttgtgccgaaagggcttttttggtataatccaatggttgctgaaaccgattcggaaaggatgaaacagcttgaagaaaaaggcggcatggattccgtggctgacggggctgtgcatgagcacggcgctgatggccgcgatctttctttttggtgatttgaaatatgccatgaatgacgataccgccattctgcggcagtatatgggcttcggcaccggcgcgatcccggaggcacacgcgtttctgcatcctctgctgtccacgccccttcgctggctggggctggccgcgccggaggtgccatggttcagctggatgcagcttactctgctctggcttgcctgcatggtcagcgtcaaggcgctgatgcagtgctttgccaaacgtggcttttcaatggcgctgggcgctgcggcgggagctgcttatctgacgctgttcggcatgacctacgcctgccacgtgaccttcaccgtcacggcggcggtgctgggggcggcggcggtgttgcagctttgctccatcgatggggagcgctataccgacgggcaaattttccgggctatcttgctggcgctgggactgacggccctgtgcggcgggctgcggctgatctgtgtgctgccggtggccctgtactgcggtctggcgctggtgccgctggcggcccgggatttcggctttggccggaggaaaaagcgctcgtggaaaccgctcctttgcggcttgtgcgtggtcgtgctggcgctgggagccctgcctttgtggcgcgcggccaaaatgaaggctgccgggatggaggactacctgaactggcagaacgccaacggccgggtggtggactattatggaatcaagggcctgacggacgaagagctggcgctggcgggctggacgcggaaggaggccaacctgctggcccagtggtgctttctgggcagcgagctgaccgaagaaagcttccaccggctggcggacgagctggacagccggtggaaggctgaccctgccgcgcggctgcaaagcgcgtggcggaaggtgacggcgctgccggagttggatcccgtggcgtggaggtcggtgctggcgctgggcggcgcgctgcttttgtgcctgttaggactgctttggaaaaagcgggatgggctgtggcagggtctgaccctgctggcgggactgctggcagcaggcgcgttcctgctgtatctgggctggaacggacggcttcccgtccgggcggcgctgcaggcgattttgccccttgccgcgctggcgttcggcctgctgccggcctgcctgccggaaaagccgggaacggcggccaaagccgtgctgtccgccggggcggcgctggcgctggcgctgacggtgaactacgccgttcccgccgcgcaggcgctggcccggcagccgaagaatccggaaatactggatcccttcgccacgctggactggatggcggcggaggatccggattgcctgtacttctacgacggaagcctgtgcgcggacagccgtatgttcccccgcacagatctcggcgttcccaagaatctgctgttctggggcggctggacgttccgttcgcccgaatacatgaagtgcctgagccgcttcggtatttcagaggcggaactggacgcggagctgttcctgcgggacgacgtatatctggcccggggcatggtggttccggagcccacagagctgatcgacgttctgtcggaaaaggcggaggaagagatcgcctccatgcagggcggcgaagagggcggcgtttatctgttccagttctattgaggcgaagcgggccgcaccccttcggaagaaagccgggccgctctttcttgacttcctgaccgaaacagggcataatgacaacggcctttccggcctgtgctggccgggatcgccgaaggaggaactttatgcgccatgagatcaccgcggtggatcgcggttctgcggcccaccgggccggtattctccccggcgacgtgcttttgcgcatcaacggggaagacattatcgacgagatcgactatcaggcgttgatcgctaaccgccagctggaaatggagctggagcgggacggaaagcccctgcatctgtccgtccgaaagtacgaggtggagcccatggggcttcatttcggggagagcatgaccctgagtccgcgcacctgctacaataattgcgccttctgctttatcgcccagatgccgccgggactgcgccagaccctgtacgtgaaggacgacgactggcggttttccctgatgatgggcaatttcgtcaccctgaccaacgtgaacgaccaggaattcgagcggattatccgccgccacgcttcgccgctgtatatcagcgtccacaccaccgacccggagctgcgctgccggctgatgaacaaccgcttcgccgggaatattatggagcggctgacccggctgaaggaagcgggcatccacttccactgtcagatcgtggtctgcccggagcagaatgacggcgaagccctgatgcgcaccctgaatgacttgcgctcgctggcccccgccgccgaaacggctgcgctggtgccggtggggctgaccaaattccgggaggggctgttcccgctgcggacgtttacccgggaagaagcccgggcgcttctgaaaatgatcgcgccctttcaggaggaatgccgccgtaccctcggcaccaccttcgccttccccagcgacgagtttttctgcatcgccgggctggaagtgccggaggaggactggtatgaggacttccctcagatcgaaaacggagtgggcctgctccgacggcaggtcagcgaaatggaggaagcccagaagtttgacgacgatccgccgccggagggggagcgtcgctacgtgatccccacgggggtgagcttcgcgccccagctggaacggctggtgaagcgcttcgctccgccgaataccacggtgcgggtggtgccggtgcagaaccatttcttcggcgagaccatcaccgtgaccggccttctgaccggcggcgatattctggcagcgctgaccccggaggtctgcgaaggcatgaaggagatcatgctgtgcagcgtgacccttcgccacgaacaggatcgttttctggatgatatgaccatcgacgagttccgcaggcgggcccccctgcctgtgcggctggtggactgcgacggccagtcgctctacgacggcctgcatggccgaggtctggactgaaccatcgggaataaggaggaaaccatggccaaacccttagttgccattgttggcaggcccaatgtgggcaaatcgactttcttcaataaaatcgccggacggcgcatctccatcgtggaggatgtgcccggcgtgacccgcgaccgcatctactgcgacgtggagtggatgggccgtcatttcagcatggtggataccggcggtctggatatgcgcagcgaggacgtgctgctttcccagatgcggcggcaggcggagatcgccatggaaacggcggacgtgatctgctttttctgcgatggccgtaccggcctgaccccggatgacgaggacatctgtcattacctgcgcaagactcacaagcccattctgctggtggtcaataagatggactacgcaggcctgaacgaccagctgtacgaatactacaaccttggtctgggcgatcccattgccatcagcgccaccaacatgctggggctgggcgacctgctggaggccatcgtccgccatctgcccccggctcagcccgacgaggaagaagaggaagaacacgtgatccagctggcgctggtgggccgccccaacgtgggcaaaagctccctgtccaacaagctgctggggcaggagcgcaccatggtcagcgacattcccggcaccacccgggacgcgattgacaccctctttaccgatacggacggcacccgcttcaacatcattgataccgccggaatgcgcaagaaaaaggcggtggaggatgaaacactggaacgctacagcgtgctgcgctccatcgccgccatcgaccgctgcgacgtggccctgctgctgatcgacgcccagacgggcgtgaccgagcaggacaccaaggtggccgggctgatcctcaactctggcaaggcggtcatcgtggtggtcaacaagtgggacgctatcgagaaggacaccaacaccatggaggccatgcgcaagaagatcctctccgatctgaagttcatgagctacgcgccggtgctgttcctctccgccctgaccggccagcgggtgaatactgtgctggacgcggtgaaagccgcctatgcccagtactccaaacgggtgcccaccggcgttctgaatgaagcgctggccgatgcgcagatcagtctgcagcctcccgtttccggcggccgccgcttgaagatctactacgctacccagcagagcgtctgcccgcctaccttcgttctgttcatcaacaacgaggaactgatgcacttcgcctatcagcgctatctggaaaaccacttccgcaagtgcttcggcttcgagggcactcccatccgcttcatcctgcgggaaaagaagcaggacgggaaaaactgaaaaaagcaacagcccccttccgcacgtgcgccgcgcgggagggggcgtttgctttaatgctgaaaggcgcttaccaaagcgcttcgtccagcgtttcaacgaagcagcctttgctttgatagtattcaagcagcccggcgattttgcttttgtcgtagctcgtgatgcagtccgaaagcacgtgaacccgatagcccgcctttgccatgttgaagctggtggatttgacgcaggcggcagcgtccgccccggcaaggtaaaattcgtcgatgccgttcgcctcgataaaggccgcaaacacctcgctggtcagggcgttgcttttggtcttgacgaaaatattttccgaaacgatttttaatgccggaaccagttctgcgccgcgggtgccgggcttgaaggtgcgcgttccggcggaaagattgttgtgctgaatgtagaccacctgcatgcccttcgcagcggcccgctcgattgcctgattcaggttttccagaatgtccctgtagtttttggtgatgtcattttgaatatcgatgatcaccagcgccttgctcatttctttttcctccgcaacgtaaaaaaggtttttgtatttggatttgaaccgcttcgttatcatagcattttgactgaaaatatgcaacagacgaaacgcaacattcaaaacaaaacgaatgaaaaagaaagtgaaaaacgtccacatgctttttcgtcaaaccgcgcacactgtccccaaagaaaggatgggatggtatgcgcggttttcgcacggatctggccatggaaagcgtgggggaggagagcggacggctggagggcgtcagcatgagcgcccaccagatcggcggcgtcaaacggacgcggatcgtgatccagtcccgcagggcggcggaggtgctgcagcggcccgtgggcgaatacatcacgctggaatgcccggaactgtcccgatgcggtcagccggagcggccaatgctcatccgcctgatcgcacaggccgtgcgggcgctgctgcccaaggagggcgaggtgctggtggtggggctgggcaaccgcaacgtgaccgccgacgcgctgggcacccgggtggtagagcggacgctggtgacccgccatctgggggaaagccttgcccgggaaatgcggggccgtctgcggggtgtcagcgccattgcgcccggcgtgctggggctgaccggcatcgaaacggcggagctgtgccgggggctgatccagcgggtacgcccggcggcggtcgtcgccattgacgcgctggccgctttcgacagcgggcgcatctgcagcaccatccagatcaccaacaccggcattgaacccggcagcggcgtgggcaatcaccggctgggcctgacggaggaaacgctgggcgtgcgggtcattgccgtgggcgtgcccatggtggtgtacgcctccaccattgcccgggatgccatggcccggctgatggaggagtaccacgtggattccggcgaccatgccgaagcggccggacggctgctgcagcaggtggcggacggctttctgggcaatatggtggtcacgccccgggagatcgatgaaatggtgctcagcgtggccgatctgctcagcgaggggctgaaccgggcgcttcagccttctctggacgaagaaaccctgcatacctaccttcacgcctagcatatccttctgggaaaaaccccgttaaaggcggtgattcccacggaatctttctggaaaaaacgaatgctttatctggcggcgctgggcttttgtctcggtgtgcttctcggacagctgctgccgttggcgctgccagcggaggaaccggcggttcaggcagccttttcttcctcggcagaaacggcgcagcccgaacaggagccggaaggagaaaacctgtttgccgcgcctcggcagaccgacgcggaaacgccaggcccttcttccgcgtccgcaggaaaggcggacggatttgtgctggaagtcctgagtgaggcggcggagacgcagacgaagggccgcattctgatctaccacacccacacctacgaggcctacgagcagcaaacggacgcgccctatgaggaaaccacgaaatggcgcacggcggacgagcgcttcaatatggtgcgggtgggggacgagctggcggcgctattgaccgggctgggctatgaggtggagcacgaccgcaccgcctttgaaccgccggtgctggacagtgcctacacccgctccctgaccatgctgcagcagcgccttgcggcgggggagcgttatgatctgatgatcgacctgcatcgggacgcttatcccggaggcagtcagggtggggccaacgccgtgacggtgggttcagccaagctggctcggctcatgctgctggtgggcaagggcgaggggcagacgggccggggctttgatgaaaagccggactgggaggccaacctgcgcatcgcccaggccgtgacggacgcggtgaacgcccagaccgagggcctttgccgaaaggtcatgctcaaagcgggccgttttaatcagcatgtgcaggtgggctgtctgctggtggaagtgggcaacaaccgaaacacgctgggggaagcgctggcttccatgccctatctggccgacgcactggacgaagcttggagcagcctgaagggcaactaaacgttccgacttgaaaaacccggcgcaagcaggtataatcttcaaagaatgaacggcgctccgccgggaatttcggaggggtttaccttggatcaacgtcctgtcggcctgctggacagcgggctgggcggaatcagcgtattgggcgaggccctgcgccagctgccaaatgaggattatgtctattacggcgatacggccaacgcgccttacggggacaaggccccggaggaagtgctggggctggtgcatcaggcggtggagcggctgattgagctgcgctgcaaagccatcgtcatcgcgtgcaacacggctaccagcgtttccgccgggaagctacggcaggagctggcactgcccattatcggcatggaaccggccttgaaacccgcctccctgctgccgggcgagggcaaaattctggtcatggccacccgggtaacgctggcgctgcccaagtttcaggccttgatggctcaatacggccgggatgcggtgcccgtgccttgtcccggcctgatggaatgcgtggagcggggcgagttggaaggcccgcaggtgacggcgctgctgcggcaactgctgggcccgtggctttcccagccggtgaaggcggtggtgctgggctgcacccattatccattccttcgcaaggccatcgccgctctgtttccggagggaacgcccctgatcgacggcaacgccggttccgtccgtcagcttcggcgacggctggaagaagaagggctgctctcaaaccggcaggagcccggacgggtcaccttcctttcctccagcgaggagccctcggttttacagcgtatgcagacgatgttggaactctgcgcgaatgaaagcaaatccgcccccgaaggcgaaaaagaggtacgttcatgaagaaagtcatgctgatcttcggcacccggcccgaagccatcaaaatgtgtccgctggtgctggagatgcgcaagcatcccgaactggaaacggttgtctgcgttacgggtcaacaccggcagatgctggatcaaattctggaatgcttccacgtggagcccaagtacgatctgagcatcatgcagaaaaatcagaccctgttcgatgtgaccgtcaacattctcatcagggtcaaggaagtattggaaaacgaaaagcccgatgtggtgctggtgcatggcgacacctccaccgcctttgtgacggcgctggcctgtttttatttgcagatccccgtgggccatgtggaggcggggctgcgcacctacaatctgtattcgcccttcccggaggaattcaaccggcaggcggttgacctgatctcccaatattatttcgcccccacggagaccagccgtcagaatcttctgaaggaaggcaagccggacgagaaaattttcgtgaccggcaacacggtcatcgacgcgctggccaccacggtgcggcacgactatcagcatcccgagatcgagtgggccaagggcagccgtctgctgctgctgaccgcccatcgccgggaaaatctgggcgaacccatgcgggagatgttcaccgccattcgccgcattgtggacgagttcccggacgtaaaggtgatctatcccatgcatctgaaccccgtcgtgcgggagatggctcgcgcctgctttgcgggcgaggagcgggtgcatctgatcgagccgctggacgtgctggatttccacaacctgatggcacattcctacctgatcctgaccgacagcggcggcattcaggaggaagcccccgcactcggcaagccggtgctggtcatgcgggataccaccgagcgcccggagggcgtagcggcgggcacgctgcggctggtcggtacggacgagcagcagatctatgccgccgttcgggagctcctgaccgaccccgccgcctaccaccagatggagcacgccgtcaacccctacggcgacggcaaagccagccaatacatctgcgacatcctcagcagggggtgaccccctgcacccccgaactgcgcgccatgggcgcgcaggggcgtagggagacatgcggcttggccgggg

SEQ ID NO: 558 - DNA, 32759 bp, Unknown
  16S sequences of unknown bacteria
tcctctctcccttgtcaacaccttttttcaatcttttttatcttttttcggatttacttcttttcgcaatcggtgcgaatttccgttcttgatatgcctctctcgacgtgctataattatcgttgtacaggcgggtacgatcaggcgattaccaaatcaagccgcagcctatccgaacattttatataccgaccggccggtcaaagcttaccggaggaattcatatgcagacaatagccgaagctttgcggaagcttcaaagctcaaaattccgttcttcttttcatctttccgaaagcgatattgattatgttgataaaaaagggatgtcggtcatacgctcccacgcggaggatttcatcaggctgcgtctctcgcctgccgtgattccgaacgacggacgtcagacaccgatgcgcggtcacccggtatttgtggctcagcacgcctgtgcatgctgctgccgcggctgcctttacaaatggtacagaattaagccggagcgcgcactcacggactgcgagcagcagcggatcgtaaatcttctgacggcatggatcgaaaacgaatatttcgaagcaaaaaacaagcgcactgcgcgataaataaaggaggacaaaatggagcaagtatgcaagtttctgaaagaagcggggacttattaccttgcgaccgccgaaggcgatcaaccgcgtgtcagaccgttcggaacggcgcacattttcgagggcaggctgtacattcagaccggacgccgaaaggatgttgcaaagcagatcgccgcaaatccgaaggtcgagctttgcgccttcatgggcggaaaatggctgcgtctttccggcacgctcgttgaggatgaccgccgcgaggctcgggtatccatgctcgaagcataccccgagctgaagtccatgtacgacccggatgacggaaataccgcggtattttatttcaaggacgcgtctgcagtattttcatcattcacggaaagccccgtcacggttcggttctgaccgagaacagcaaatcgaaaattgaaaaaggtacggatgaaggtgaacgtattcactcgccgccgtaccttttttatattgttccgaaaatcatgtccttccgcacaccgcgtccgatgtccgtatcatatatgtctcagcatgccacggatcgtcttccctgatttcaaagacacgtccgccgcgcagagcgtcgatgccgtagcagccgtatccggcgcaggcatcccagcaaaggcggatcccgcaatactctgcttcgaaatcgttctcatgcgtatgcccgcatgagagcgtatgtacatctccgcgctgaatcagttccgcaaaaatgcctcaattgaaaggatacgtcccgagcgcttcgccgaagcttccgtttttcacgcacggctctggatttgcagccgccatagtgaattcgtgcggcgctatgtgcatgcacatgattccggggatcttcccgccgtgttctttttccgcacggcacgaggtgttccaataccacataagctgatcaaaataaagaaatccccactttccgacggaaagcgtattattcggaagaagagccttcgcatacatatttccgccgggaaccataacgtcaagctcttcgacgctgttgttggtatcaagcccccagatatggaatctgaccctgccgtccgaatgaccgtacaccgggaggacaaagtttgtagttccgtgtatgccgtccgtatgtccggacaaacaaagcgggaagctctcgtagaccttctgctgctcaagcgctccgcacggggagtcgtggtcatgatttccaaagatatgagcccacggtatcccccgtttttctatttctccggcgaatatttcgagaaaccttctcagatcgtcggtgttttttatcagatgaccgcagcagttatctccgccgagcatgacgaagtcaggatttgccctgtcaagcagtttgcgcacgctcgcaagcgagcgagggtcataatcggcggactcctgtatgtccgacatcataagcatacgaaacacgccgtccgacgaaaatctgaggcgcggttttccgcattcgttcgtcattttctcctccgttcggattccggcgcggtgcgttctcgcgtcatgcgatgcggcgcgccgccgatcctcaattgaaatcgtagataaagtctatgtaatttgcgaggcagtatttcccgtcctccgctttcacaagcactccgcagtcggtcagctcatccatgatccgctcggagacatcggtaaacgcaaatcccataccgaaatcggaagcaccgacgtataccggctccgcgtatccgcgctgacatattatcatataatcgatcagtcggcgacgcacaagctcgtctctgcagccgatccgcggaatattgattccggcgcggctgcagaaattcttgactgcaaactcctgcgcacgcgcctcgatctgtccgaactgtccgataatcgtattataatcgggtaccggatgccagattcgtgcaagctcggcggaaagctgctttttatccgcgcccgcagccgatattttttcaagctccgccatcttgcagcgaaaatgcgcatactgacgtatctgatcgatatgcgggagcatgagctcaagaatccgatacggctcgacgggcagatcgatcgtggagtgatttttcctgtcaagcgcggctttctttatctccgcgagactttgttccgcacgcttttctatatcctcggggtcgtttccgccgagaacatatccgtcctctgtccaccaatagctcgtccatgtatcacccgaacgggcatcgcgtataagctcgagcgcgctcagcacggtatcgcagtgttcggtgccgtaaaccatttccgtgatttcgcggagaagctcatcgggatcccgcgtgggatcgatcataagctgcgcgctgcagtacagtgagaaaagattgagaacgttatacgccgaaagctccgcccaatattcgggcacaagcacatcgtcaccctgttcgcgtaccttattgtaaacgtccgaaagcacgcgggaattcacatacattgacgcaagctgatctatctcataatccaccgtataccagccccacagtccgagtctgcaccccgcgtctcgcacgccctgacggaagcgctttctctttccttcctcgcgccactgcggaaggaacggaagctcaagaagaagataatcgctgaatcccgctttcacaagccgatccggaaaatcgtcctcgcacgcccatgtatcaacgcccatccgaaccgacggattcctatcgcggaacttcttttcgagaagtcttgtaaaagcgaagatgtcgtcgggatcggtaagctcgcccgggtctctgaagtgcgctatcagaagatcggtgcagtccgccatctcggcataaatgtcgtagtagcgttcaaacgacgcaaaaacctcgggatcgtcgtatgcctttttaccgtctgccgcgcggtattttacatcggggtcgttccatccgtgtccggtgaagtttgccgcccaaacccaaagggtaaacgtcatgccctcttcgtgaagcactttcgcataacggcgaaactgcgaatgaacaaatttgtaagagccgtacgttcgccagcaaaggcagccgtccgtgacctgcattccggtaaatccgaagcttttcagcatacggacgtagctgcgtatctgctcgtccgagaaaagcataatatcgtttttacggctgacgctgaaattggtaaaaaagcctctgttctgcgtaggatcccatgtacagaaaatcggctcgcgtttctttatccacgggttttctttactgtaattcatgcctgtctccttgaattcggaagttattttctttttgccggctgtccggattctccgaaaagcccgtattattcaaaaggcacttgcggggcaagtgccttttattcagcttttgatctctttctttctgaataccgcaagagcgataatgtacattgcaagcgtatgaagcgctatgattatcacgcccgcaagcagacttatatcggaatataccgcagcatccgggctgaagatcatcggacggtaaataaaccgatcgatgggagagacaagcagattcccgagattaagatacgggagcacggtaaagcgcaggaatgaaaatttttcgatcaggctgagcgcaatcgtctgcacaacgcccgagaacatatcgacgatgaacggcagaacagcagcaacggcgatcttctccgttaccgtcgccatcataaaggcaatcgatattataaacattcccgagaaaagcggaaggatcagcttcagtgcgccgtaaacaagcgccggtacctcgatcactccggacgaatacatgagttcgggaacgaacgcatccgacacaccgaaaagtgcgatcgaaatgccgtacacaagcacaaatccgacgatgctgatgagaattgcgcacgtcataagtgcgagaaacttagatattattatctttgatctcgttttcggtcttatgagaaggagacgtattgttccgttggaatactctccggcaatcagcgtaaccgtgataatgatcataacgataacggttattgccgccgcagttccgaggctgccgtacaccgttgacttcgtcgaattctgaacgtaatcggaaagcgggatcttgttatccaggctgtattgaaccgttatcgccgcctcgcgggcacgcgactgtgttttttcgcattcccgcttatactgctcgtaggtcctgtctccgtaatcctccgaaataaacgtcttttcgtcctcgacgcatgattcccggagagtagagaacaccatcggcagacagccttctatctcggagaacatccagtcctcttcatctttatccgcttcggcaaaagccttgtacgcgcttatctgatattcggcgatctcaacatcggcttttgcgcggttgaaggcgccgagatatgcggaattctttccgtcgccgtagtttgcgcttgcctccgcacgttgaagctttgcggcttcgagcgtctttttcgcgctgtccgcgcggctcagtgcgtattccttcaccgactgctcggtgatgttgtactcaagctccgcaaggtcggctttcgctttttcaagctctttcgcaaagttaatatcatccgccgtgatctcttcataagaaggggacaccgcagccggaccgtcgtgcagcataccgtcctctgtatagacatcggtttcgctcggagtttcaaaaagccagccgaacagagatgcgacggtctgtgcgtccgtccttccggaggtgacctcttcgcaggcatactgcttcattttgagatcgcggtaactgccgcagtagcggctgtaccgccagctgttctgcgaaatttcgttatcacggaagaaatcccgagtatctctttccgcataaaaatacaccttcacttccgcgtcggcatcgtcatcgggaacataataatactcgtcgtagccgccgttttcgctcctgcttatgatgtaggtaaagcaaggcggcaccgcgatcagcagcacggcaattataaggatgatcttatttgcgacaggtcggaaaatcttgatactttcgtttttccataatccgagcatacctttcacattcctacacctcccgcatcgttctttgtgatttccataaacgcatcctcaagggatttcgtttccggaatcatcgcgtaaatacgcactcccgccgtggtaagcatcgatgcggcatccgccgcgccctcgtgcgagagatcggcaaatgtcttttcgccgtccgacgacgcctcaaatccgacggacgaaagtatttccgcggtcttcgctccgtcgtccgtgacaaaggtatagcgaagtttttcgccgacggacgatgaatgcacatcgtccatagtcatgtttccgacgacgaccccgcggtcgatgacgcatacgcggtcgcacataagctcaagctcggcgagcatatggctcgacacaaagaccgagcagcccttattgtgcgcaagatccttgaaaatgtcgcgcagctccttgatacctgacgggtcgagtccgttcgtcggctcatcgagaacgagaagcttcggcttgtgaattattgcctgcgcaatgccgaggcgctgtctcatgccgagggaatatttcgatatccgatcgtcgattctttcctcaaggcggacggtctttataacctcctcaatacgttcggtaggaacatcatcatacattcgcgtatactgcatgagattctcgcgtccggtgagatacttgtacatctcggggttttcgattattccgccgacattgcgcattgccttttcaaagtcgcggcggacatcgtacccgcatatttttatctcacccttctgaatattcagaagtccgaggataagctttatggtcgtcgtctttcccgagccgttcggtccgaggaatccgaaaacctcgccggaattcacgctcagattgatgtcgcagagaatattgcggctgccgagagatttcgtgagtccttttatttcaaggacttcggcggcggagtttgcgtcggtcatggcgggatactcctttacggttaatgtttatacatcgatttccgaaagctttacgacgcggccgccctctttgcggctgcgaagtccggcaactaccattttcataagctccacggactgtgcaaacgggaaaggctcctcgcccgttctcagccaatgaacgaaaaggtcgagctgctttttgaacgcatagtagctgtcgcggcactgaatgtaattcgagcccttcgagccgatcatgaggattccggcgcccgccattccgattccctgcggaatatcgacggcgcatccgctctcatggagtatatgcatcatcgaacgctcataggtgcctgtgctctgcacggaaacgaatccgggtccgagaagcgggtacatcgattcaagcgcatggattccgtaggtctcgtactttttcgacatcggagagcagatatacatgagctcgccgagctcgtaatgatttgcgtaataaggctcatattccttgcagtagcgcatggacgacgaggtcaggaactgcgcaccctcattgtgccatttcacgaatgtgcgcaggtcctcctcgctgtttacaagcggcttatcaatgaacatcggaagccctgcctcgaggaacgggcggcagcgctcaacgtgctcgtctccgacgtcggtcgcgcatatgaccgcatcgacctcgccgatcatatcgagcggattgtcaagcacattcgggattttcgcggcgcgcgcgatattttccgcctcctcgcgctccgcgtatccggtgcagcatatatgtgtgatatgcgcgccgggcataccgaaggtctcctccggctgattcgaaagatatgccggaatcaccgggaacgggcacttcgccatctcctccggatcgtatccgttgaacattgcgctccacgaatacggatgtccgttgccctcggtcattccgagaattcctattttaagctcacgatctccgagcggtacctttgccattttcgatctctcctttactttttaggtctcgaaagcaccttcatgatttcgggaatatccacatcggcgaaatccctctttaggtccgccgcggttctctcggatatcggcgggacgtcgaagtatccgatgttctgttccacctgcgctttcgtgtccgagccgagcacgaggcttgaaactccgggcaggtcgcgtatgaacgcgatcgcaagcgaagcgaccgagattccttcacgctccgcgtattcgcggagaaggcggatcctcggagctgcctgttcaacgagaatcgggtcggtgatcttatcgggatcgaggaagaatatgccctgaaggaatacgctgcggacaaaaaccgtaacgccgcgcgcgccgagtctgtcgatcgcgccggaatgtatcaggcgctgatcgaatatgctcatcggcacctggatcgccgtatagacatccgatttcagcatatcgtcaacctcgttcgtgagatagacggatgctccgacaaggtcggtgtatcctctcttcacaagggattcgagcgcttttgccgttttgtccccatgcgccgttatatcggcggtgacgtgaagcatcacgcagtttacgcggggaactccgagtttttcaagcgaggtctccaccgacgaaacgacgaatttctcgatctcgccttcggtctcgccctcgattttcggcacctttgtcgtaatgaacggaagctctccgtcatactgtctgaagaaatgcccgatcacgtcctcggaatttccgtagacgcgcgccgtatcaattgacgaaactccgcccttgagtgcggcgtcgagcattgcaaagctttcctcttcggcgggctgtccggtcgtgttcgcaatgccgtagttcataccgagctggacggtgccgagagtcatattggaaagcttcttttcaccgatcagtatactcttcatgtcacacctccgcgatatcgcgtccctgtatctttcccgttatatcgaggaaatactgccagagcgcaacgacatccgcgccgacgcttatgaaggtatatcccattttgacaaggtcgtcgaaattgccgggaccgccgacggtgcctgcgaatttgccgtgctttctcgccgtgcgtgcgacaagctctcttgtttccttaacctgaggatcgtcaaactgattcggctttccgattccctgactgaagtccgcgggaccgaagaacagcatatcgattccaggaagcgcgcatatttcctcaagctcggaaagcggctccggatcctcgatctgcacgatggtgaagcgttcctcgttcgcctgcttcatataatcgtttccgtcaacgaggcagaacttgccgtccgtatttcctccatcgatcggacggcgcccgatcggatggaatttcgtatagtagacgacacgctttgcgtcctcgaggctcatgaggtgaggcaccattattccggtggagtccgcctcgagcggtctgacaagatcgctgtagcatccgtgaggaacgcgggtaagcgtatcacagtcgtaaatttttgcagcgcgtattgcgttttcgataaacgaaaagtcgctcggcacgtgctccatatctagccagacgcagtcgaatccgcacattgcggcgatctccgcggcgcgcgtatccgcaaggttaagctttacgcaagttgcgaccttgccgcttctcatctgtctgagaacacggctttttctcatatccatagataacacctgatttccttatttggcgctgtagccgccgtcaacggctatcgtcgcgccggtagtataaagcgaagcgtcggaggcgaggtatacgataatgcccttgacatcctcgttgtttgccattctgccgataaacgtacgctttgagtatctctcgacaaagcgcgggtcctgatttgcaaacagaccgccgagtgcaaggtagttgcagcggacgccgtatttgccgtagtaggaagcgataaagcgggtgaggttgttcattccgcccttatgatagaagtaatcgggagcgccgaagccgctcatccacggggtctcttcgtagagcgtttcatcgcagccgagaaatcccatgtaggagccgatgttgattatgcttccgctcttgttttcagccatgtggtcgccaaaaacgcgggagatcgcaaaaagtccgcttccgttgaccttgaggctttcaagaaatgcgtcggggccgtcgtgaaaatcgtgcatgggacggagcaccgaattattaacaaggatatcgaccttgccgctcttttcgactatacgcgcaagaagagcttttatgctttcctcatcgctctgatcgtaggattcggcacggacatcgaagccctcaccgcggagcgcggacgcaaattcctcgttcggctcgaggcggcgcgatgcggtatacacagttgcgcccgcttcgcagagtgcgcggaccatctgagagccgaattttccggcaccgccggtgacgagcgcaacgcgcccgtcaagtttgaacatatcaagcacagccattattcttcaccgttcagcagtttttccgccgcctttacgatctcagcacccgcttcgggtgcaaatatagaatttccgacttcgtatccgccgtcgccgatcgcatctggcgtatacacatacccgggaagctcgccgttcgtaagattgaatacgaatgttttcttatacttcgaccttgccttgattgcaagtccgtattcgacaaagagctcgccctgcgttccgactattgcagtatcgttgagggtaatcagctcgatctcgcatgggagaagatcggcatagacgctctccgccttgccgtcttcgatctcaagagcgagataatagagatcctcggcgccgaacatatcgagctccgcatttctcatggtgatataatcggcatcatgaagagatgcgaagcgctcgcgcgccttttccatgccgggctttgcctcggcggacgatgcaaatgttcttctcggaagatcgataaacgtatgtttgaatccgatgtcaagcttgtcggtgaactccatctttccgatacagtggaagatctcgactccgagagtcgtgcctacgcggcatgcttcctcgaaggtctgaccgaggcggtgatagcgcgagctctgatttccgatcgtgccctgtgcaaacatgaatatcgcgtccgggaaagcgaagtgaatgtaattgcggactccgccgggataatcggcgctgacgagaacgttatcagcgtgaagatatgtcggatggagcgcgtagttgagaaggattccgcgaatctttttgtcggaatcgcggacggcaaggatgtttacggacggatcgcagacaccgtctttttcgcggcggtttccgccgacgccctgctctgcgccgcagtgtccgacatacgagccgaattcggcgtcaaaggtgttgtcgtgtgcttcctttatgatcttctccacctttgcgacaaggtcggagacaaaggcttcatcgacgaacacgccttcgtttttctcgaaatcgtgcacaagacccgtattgggtgcgctgtgcgtgtgagacgcggtaaacgaaatatcgaaatcaaactttgaccgtatctccgtgcagaggcgcttcgtgaagaagaatatatccatggctacgatcgccacgcggtcggtgccgttatcgaggaacatacacgaagcgtaaagtcggtcgtgcacgccttcgttcggacgcgggcaatggggatatcctccgagctgtacgcctttttcgggagtgatatcaatgattgacatacctgcttttaacattgtgattgtcctttcagttaagccttgagtacctcaagaagattaagttcgccgtcaacgacgataacgtccgcgcgctttcccgcctcaagagaaccgatctcgccgtctgcatgaatcgctccggcgggatttagagagcatacgcggaacacatctggaacggagagtccgagggcgtagaagtttctcgccgctttgtccatggtcattttgcttccgacaagctcgccgccgaagaaattcacgtccgaatcgtcctcgctgcccgtgcagcagtcggtaattccgacgattctgtcaattcccgcagcctttatcgcaagctttaccatgtcgggacggacgtgcaccccgtttttatcgcagattatctcatagaagaatccgtcatgtgcaagcactgcggaatcaaacgacacctcaagcgtgccgccgtagcgtgtcggagaaatcgcatttcccgtcgcgtcaaacaaatgcgtgacgagggtcgcgcccgcatcggcggcaagtgcaacattctcgggggatgcgcagctgtgtccgatcgaggaaacgatgccgcgcgatgtaatatcgcgaataaacttctccgtgccgctcatttcgggggcgcaggtccattgacggacgatccccgttttgcagaggggcatatactcctcttcccgaacgggagtttccactccgatgcccgaaccgtaatccggattcaggtacggtccctcgagatgcactccgagaacgttaggaagctcgggaagcagctcctttatctcaagggtgtgcttgagcatatccgcgatcggtatgcgccggtacatcgtgaagagcatcgacgtcgtgccgtgcgcaagatgatgtgccgccaccgcgcgcggattatcgtggcagtagaactttccgccggcgtgacagtgaatgtccacgaatcccggtgcgataagtccgtccacgcggcgcgcgccgtgcggaacagaggttccgcacgcgcgtcccgcgtatttgatcaccccgttctcaacctcaagcactccgtccggtacgatccggtcgggaagcacgagtgagccgagaagagtatatgagtccatcagtatccgaccttctccatgcactcgatcggctttgcgatctcttcgctgacataaacgtcggtcttaagaagctgaaggatcgatgcgggaacgagcggagttacctctccgtggaggataaggcgggagatcattctctgccatgaagagaatgtgcccatggtcgtgagatcgtgggattccattctcgctcttgcacggcgtacatctgcgggaccgatggtcgccgcgcgcggaggaacattggcgatatcgccgctgcatccgaacacgccgtggagagaattctgcatgatcgtcatgggattgagagtaacgacacgggcatccatgttcatgaaatcctcaacgctcggagttccgaactcgggagtgagcggatcgatgaatgcgatatgtccggcccagccgggaccgctgtagcaaatatcagcgccgccttcgccgcactcggttatcatcttggaatagtctgcgatattctcggtcgtggggtaatggatgtgatcgagaggcatgcgcagatcctcgcggatagagccgtagaaatacttgagctgagaataggtgaagccgcgctgataggtggagggggcgatatttccgtcgttgtccgcccactcatccattgtgaacacataaacgttgcggcagctgatattgttgaggttgatgatctcggcgacggtgcagtaaataacggggcacggattagggaggatcataacgcacttcttatcgagcatatcggatgcctggatgcgtgcgaccatatcgccgatccagatggctccgggattatcgaccacatggatcttgaaatccggattcggatgaacggtcatctcctcgcgtgtgatattgcggcagcgctcgagaacttcctgattcttgtacggaacaaagtccgcaggcttgaatgaaaacatggtatactcctttatgtaataaaattattgacttattgaatgcctcatacggcatgtgcggcggcgggcggtatcttcattgacgaagcgagccttgccgcgccgagtgcggcggtttccgttgtgtcggacgcataaacgggaagtcccgagacgtccgaaagtatgcgacaccatatccggcttttcgctcctccgccgaaaacgatcagcgaggatgcgccgcccatacggcggctgagagcggttatctccttcgacacgccctcgtaaagcgcatatatgatctgacctcccgttgtcccgagagtaagtcctcgtatgtcggcgccgaccgtgaagtcgggcgaaaaagagacgccgccggacgaccccgcctcttcgcagagcgcgtcaagctccttataggaagctcctccgaaaaggttctgcgcgacccatttcagagccgagccgctcgtgctgaccactccctccgcggaaaaattatcgcggtcaaaggcgaacagtgaatatctgtcttcgcgtgccggaatatcaggaagcaaatcaagaagctttgtcacggcggtcgcggttccgagtgaaacggtcattgcgccgtctccgactccggcaccgagcgcggcaagcttctgatcctgccctccgagaaagacctcaagctttcccgtgatgccgagctccgctgcgacctccgaaagaacggttccgacaaaatcgcccatgcagccgacggaggcaagccttgaaggatcgacccccgcgaatccgagaaggtcggtgttccattcacgcttcttcatgtcgaatgccatcgttccgcctgccgcggtataatcagtcaccgcatttccggtgagcttcatatttataaaatcgagcggcagcaggaatttatccgccgaatcgaatatatctctcatgtgggtcttcatccacataagcttcggaagagtatatgtaggcagtgcaagttttcccgtcgcagagtagatcgcgtcctcgccgaactttgaaacgaggagagccgtctcactgtcggagcggagatcgagccagcttatcgcgtcggagagcggttcgcccgttttatcgacaggcacgaccgcgattccctgcgtgctgacagctatgccgtcgacaacattctctccggattcgcgcacggtatgaagaataccctccttcacaagctcccaccagagccgcgcatcctgttcgacaaagccgtcgcggattataagtccgtactcgcggttatattcggaaaggacattcccttccgaatcatacatcatggtcttgcacgccgttgttccgaggtctgttcctatatacataaggctcctgttctacattgcgatgaaggcaagcgccactctgaagtagacgagaagcgcaagcgcatcgacgatagtggtgataaacggacttgccataacggcggggtcgaatccgacacgctttgcaagtatgggaagcgtgcatccgacgactttggcaagaagcacggtcgcggcaagggtgatacatacaacaagtgcgatcacagcactcacgcggtctatcgttatcatcttcacgaagttcacggcggcaagagaaacgccgcagaagaatgctactcgcacttccttccaaaggacgcggaatatgtccttcatggcgatctcgccgagcgaaagtccgcgtatgatcgttaccgaagcctgaccgccggcgtttccgccggtatccatgagcatcggtatatatgcaacaagcgccgcctgtgcggcaagcgcattttcaaatctgagaagtatctgacttgtaaatgtcgcggaaaccatgagcagaagaagccacgggatacgcttgcgccatgtctcgaaaactcccgtgcggaggtacggcttatcggacggcgaaattgccgccattatttcgatatcctcggtatcctcttccttgatgacgtctattgcgtcgtcgaaggttacgataccgacgaggcggttctcattatcgactacgggaagcgccagaaaatcgtattttgcaagaagctttgcgacttcctctttatccgtcatcgtatcgaccgatatgatcgatgtcatcattatatcgccgacagccgcgtcgtttcccgcaattatcatatcccttacggtcgtgagaccgataagcttacggctgtcatccgtgacgtagcaggtatatacggtctccttgtcgagtccggttgcgcgtatacgttcgaaagcgtcgctcacggtcatgcgggcgcgaagctccacaagctccgtagtcattatcgatcccgcactgtccttaggatagttaagaagctgatttatcagcgttcttgtttcgggagaggtattgtcaagtatgcgcttgacaacattcgcgggcatttcctcaatcaggtcgacggtatcgtcgagaaacaggtcggaaacaacttcggtaagctctttgtcggagagtgcttcgataagaaacttctgaacgtccggctccatttcgacaaagcattccgccgcaagatccttcggaagcaatcggaaaagtatcggaatgtcctcctcctcgcactcggtgaagatctgtgcgacatccgccggctcgagatcttcgacaagttttcgcagagcggcgaattctctcgatgcaatgagttctttaatttcttcggtgatggtaagttcgtcggacatactctctcctccttttccgttcgatttatttatattcaggctgtattcagtccccgaaagcctcctctgccgcacggcgtatcctttcaagtgcggacttcatgtcggcggctccgaaaagcgacgttcccgcaacgaacacaccggcaccgcgggatgcgcattcggcggcgctcttttcggatattccgccgtccacctgtatctcaacaccgacgccgagcctgtccgcggcggcgcgtatcttctctatcttcggaagcatatcgctcatgaagctctgtccgccgaagccgggttcgacagtcatcacaaggatcatgtcggcgatatcgagatattcaagcgccgtctcggcgctctcgcccggtttgaccgcgaagccggtcttcattccgcagctctttatcttttcaagcgcttcgcgggtgcttccgttcacgcaggtattctcatgaagcgtgacgcggtccgcgccgcagtcgcgcagcttttctatatagcggtcggggcatgacgtcatcatatgcacgtcaagctcggtatccgttatccgcgatatagcctttaccgtatcaaaaccgaaggatatattcggcacatatacgccgtccataatatcgaggtggagcatatccgctccggcggacgatgctcggcatatctcatcctcaagatgaagcatatccgcggcaagcacggacggcgcgattttaattttcttcattcgtttctccgtaaagaatcaaaaacttttttcattcgccgggtgtgaaaatccgacggctgacatcaaacacgcgttttcggctctgccgcgcgcctgccgaccccgtgtcaccggggtaaataattcatatcctgttaatggcggctgagccgccccgaaacagatttccgctttcctgcaacggacgttgaaacaaggaagtgaatacaatgaggaaagcgtaaaaatatccgctgctttgccgccgcaaggcagcggaaactgttttaccgttcttcggaggagacgaggcagacggcgtgcgccgcgattccctcgccccttcccgtaaagccgagatgctcctcggtagtggcttttacgttgacatcgcctatatcggctcggcaggcttcggcaattctcctgcgcatatcggtgatatatccggcaagcttcggcgcctgtgcgatcaccgtacaatctatgttctccacatgatatcccacggcgtcaagctcgtttatgcagtccgcaaggagcttcatgctgtcggcatttttatatctttcgtcggtatcgggataatgtgccccgatatccggcagggcgcaggctccgaaaagcgcgtctatcagcgcatggataagtacatctccgtccgaatgggcttcaagtccgtatccgcacggtatctcaactccgccgaggatcatcttacgctccggcgagatacggtgaacgtcatatccgtgccctattctgaatttcataatacgcctccgttttatcagatatgctccctgcttttcagtatcgcctccgccgtgatctcatcgccggggtaggtgatcttgatgttgtccgagccgcattcgacaaggctgaccttgaatccgaggcgctccgcgagcatacagtcgtcagtgaccgcggctccgtcctttttcgccatatacgcacccgcacggtacatattgcacatgaacacctgcggcgttttcacgagccagatacggtcgcggtcgagcgtttcgtcgataacttcgccgttctccgaatattttaccgtgtcgcgcgatctctcggcggcggcagcagccccgctttcgtatgcgcgtctcaccgttttttcgatcagctcgggggtgacaaggcatcgtgccccgtcatgtatgcagacgtaccgcgaatcgtccgacaccatgtcaaagcccgcgagggaggattcctgacgagtctttccgccttcgacgatctgagttaccttgccgagcttatacgttatgcagtactttccgaggaggtcgagctcgtctcggcgtccgaccacaacgatctcgtctataagatccgtattttcaaatgcgcggatagtgtgaacgcatacgggaatgttgtcaatgagaaaattctgctttgtgatctctcccgaggagaaccgctcccccgttcccgcgcacaaaacgaccgccgaggtaaacggatgcttatttccgttccggaaaatctgctttgccgccgatgaaaaaatatttcccacatttacctccgcatgtgtttttgcgcccggcgcggcgtcttccgaaactcttccgccgcgacacgccgcatgagcgcagttttattatgttattatatcacattattttcccgttgaaaatatataaccgatattttttacattgttcgggcgaaaaaagttatttacggcaatataataattaagacttgaagcggcggcgattatctgttattattatataaacggcgcagttatgcggaagtctccgcgaattccctgccgtttcccgaaatcctcggaaaggaagcccccgcccggcggaggcaaagctttgaaaaatgaaaacagctactgaaatttttgaagaaataacgcgcataccgcgcgaatcaggccatgaggaaaagatcgcgtcttatcttgaggaatttgcgcgttcgcacggactttactgtctgcgcgacagtgcgaacaacatccttataagaaagcccggcagctccgagccggtcattcttcaggggcactcggatatggtgtgcgaaaaggaaagctcgtccaatcacgatttttccgcggatcctatcccgcttatccgcgacggcaggtatcttaccgccgacagaacgactctcggtgccgacgacggcatatcgatggcagtaatgatggcgcttttgtcggacgacagtgtgaccgcgtcgcttgagtgtctcatcacgtccgaggaggagaccggactttgcggaatgaaggcattcgacttttcccttcttaagggacgcaccatgataaacctcgattccatggacgagggtatcgcaacggtatcctgctgcggcggaatgcgttccgatatcaccgttcccgcaggacgccgccccgggcatcttcgcggatacgcccttcatctgaaaggcttctacggcggtcactcgggcgaggatatcaatctcggaagaaccaacgcgatcgaagccgcgctcggacttctcggcacggtgccgggcgtgaagatagacaagatccacggcggctcgaaggacaacgcgattccgagagaatgcgatatatatttcgcgtccgatgcccaaaacgtgaaggaactcatatccgcggaaaatgaaaaactccgggaaatggtaagcgacgacgaccgtaattacagcgcggaagtcgaagaatgccttcttgattcggtattcgaagacgggctttacgaaaggctcgtttctctgatagggtgtatcccccacggagtgaccgaaatgaatccggacattccggggcttgtcaagacctcggcgaacatcggaaaaatacgcacatcggaatgcggagtaagcataacggtgtcatcgcgttcctccgacgaggcggcgcttgacgctcagcaggaaacgataaactccgctgcggacgaggcaggcggtcacgcgctccaccgtgacagataccccggatgggcgttctcgaaggaaggcagaatactgaaggtttatcttgaagcttacgaatcgctcttttcaaagaaagccgtatacgaaggcattcatgccggtctcgaatgcggaatagtaaaggctgccgttcccgacatggacataatctcgatcggagccgacatccgttctccgcacacgcccgacgaaacgcttgacaccgaatccctcgaacgtcttctggcaaccgtaaaggaaattctcagacgtattgagctttgacgggaagtctgcggcgaaagcgctcatgttcgaggaaaagcggattgagcctgtaaccgccgaatcggcgcgtcagaatcagcttctttccgcatactcttcttgattttgaatttatattcgaaacatggacgctcaccgtattgcttcttatctccggcatcacctttacaaagcagttacggaccatatcctccgcagtataccactcgcgcattccgaagatcaggagcaaaacgattgtcctctcgagccgtgtaagcgcaaattttctgccgcagaacacaacttttccctcaggattaaaatatattccaccgtacgacggcgtatcggcatcgtttccgcaaagcgcggcagcacgcgctttaagaaactgcacgagatcgccgtcgttttcttcgctgtaaaaatatgcgtcggtgttgataatattctttccggtatgatttatgactatgagctcggctttatccgccgatccgagcgccgaaagctgatcttctctgtctgcgcagagcacgacgatatccttgccgtgcgggaaatgtacaaattccgacacactgcagaaagcgcacggaagaaaggccgaaagagccgagtgtctcagagcgagcccgcgctcggtgttatcatcaacaataactatcataatattctccgttcacggtataaaaagaaaaaaacacgaatataaatatatcaccacggaaaggaaggggcttagatatgtttatctgcacgctgaaggcaagcaatatcaaatttttcgccgccgttctggcagcggtaacggttcttatctcgataatcgttttttcctccgatgtcaccgcgcagaccaccgacgcgattgcagccgcaaatgaaaaaataagctttgaaaaggtaaagacaaacgaagacagagtgaattttctgaagcagttcggatgggatgtcaacgagacaccgaaggaagaggtcacaatgaaggttcccaccgaatttgacaaggtgatgaactcctacaacgaaatacagaagaatcaggggctcgatctgtcaaagtacaagggcaaggaagtcgtcagatacacctacgagatcacaaactaccccgactacggcggaacggtatacgcaaacgtcataatccacaaaaacagagtagtcggcggagatgtctgctccgccgacgttaccggatttatttcggggtttgcgatgcccgagggaaaaagctcaggaaaatgataccgttatatcatccccgttgatcctcccgtcgggcaaagacacccatgctccaccgcacaccggaagcgttatgcttccggctttttcttttgcgtcacccgcaataatacggaattttcccggaagcgataccgtcatttcgcgcccggtgcggtttattatacagatcaccgacggtgaatttcgctcctcgcgccggaagcgttcaagcacggcaaaatcgggcgacagcaaaattatgccgaaatccccatcgcaaaaaaggtcctcttctttgcgtgcgcgtagggtgcgtcggaattcgccgagaagtgcggtatcctctctcccccacgggaaaggtcggcggcagaacggatcgcggtatccttccgttccgacctcatctccgtaaaacacggaaaaggcgcccggaagaaacgcaataatcttaagtgcaagcaaaagaagcgacaccgcgtgcactctctcgccgacgctcatgcgaagatgtgcaaggcccgcattagacttgccctcgacgctctctccgccgaggacggtaagtattctctcggtatcgtgtgtcccgaggaaattcataacgccgtcgagcacgcatttcggataccttcggcatatccccgtgaccgtatcggaaaattttccgcagtctccgtcgcgcacatacgatatgaccgcgtcgcggaacggatagttcatcaccgaatcaagctgagcggcggaaaaatacgatctgcgttttccgtaggatatcttattcgacgcgtcctcccagacctcgccgatcacggcacattcgggatcatacgatctcacggcgcggcgaaatccgtcaagaaagccgtcggacagctcgtcgcagacgtcaagccgccagcccgcaatccccgcgccgttccacttgcggactacggaatccgtgatgaagcgtcggtatgactcgcacgaggaattcacgcgcggcaggatcttaactccccaccagcactcataatcgtcgggaaacgagcggaagctgtaccattcggcatagggcgaatccttcgattggtacgcgccgagcgacgggtactttccgtatttattgaaatatacgctgtcgtcccccgtgtggttgaaaacgccgtcgagtataatgccgatcccgattttcccggcttcggcgataaggttgaaaagcgcttcgtctccgccgaacataggatcgacggtcatataatcgccggtgtcgtatttgtggttcgaataagcgtcgaacaccgggctgagatagatatagtccgtgccgagagcctttatatagtcgagcttttcggcaatgccccacagatcgccgccgaagaacacattgttcttcacgtcggctcccggatattcgccgtactgcggaattccgccgttccaatccggatcgaggactgcgccgtccttcacgccgcattttccgctgcgtctgaatctgtcaacgaatatgtggtatatcacggcgcccttcagcttttccgggacgtgaagtgatttgtcatatatgagaagctgacgatccgcgttttcggtgaggatttcttcaccctctccgccgaacgagcgcttttttcctcccgcggtaatcacatagcggtaaaaccaaagtcccgccgaaaggcgctccgcggggatcagaacgctccagatgtctcgcccgaggacaaagctttcccattcgagaggaaagctctcctcatttccgccgtcgcgccgtatcagaagctcggcatccgacactccgaacgcacggtcaaaggtgagggaaacccggatgtccttcccttcctccgccgcccccgaaatgagtttgccgtcggcacccgcgcgtttttcttccctgaaaatatcctgcattatttcaccggagagagattccatattttctcggcgtactcgcgtatgctgcggtcggacgagaagtatcccgcgcccgcgatattgcagagcgatttcttcgcccacttcatgctgtcggcatagcagtcgcacattgcctcgtacgtcgagaaatacgaatcaaagtccgccatgcacatatagggatcggcgattcccgcgccgtgaagaagataatttgccatcccctcgaaggaattgccgtaaaatccgcgtcgaagagtttccaccgtctttgaaagtctttcgctcttgcggcagtattcggcggaatcgtaccctctcttccacagctcatcgacctcggtggagttgagtccgaatatgaagaaattctccgctcccgccttctccatcatttcgatattcgctccgtcgagcgtgccgagcgtcagcgctccgtttatcatgaacttcatgcatcccgtgcccgacgcttcctttccggcaagcgatatctgttcgcttatatccgatgcgggcatcagcgtttcggtcgtggtgacgttgtaatcctcaaggtatatgacgcggatcttgtccctcactctcgtatcgcgggcaaactcctgcccgatgctccagataagctttattatatcctttgccatatagtatcccggagccgccttgccgccgaaaatgaacgtggcgggggttatatcggcattcggattttcgagaatatcattataaagcgatattattttgagtgcgttcagaagctggcgcttgtactcatgcattcgcttgacctgaacatcgaaaatcgacgaaggatcgatgcgcactcccgtattcttctccacaagcgcggcaaaattgaccttgttgtccgccttgatctgcataagtctttcaagcgtgggcttatcgtccttaaacgctctgaaatcctcgaggcgttcactgtccgtgcggtatgccgtgcctatgcactcgtcaagaagtgaggaaagccccggattcgaatagcagagccatcttctgtaggcgattccgttcgtgacgttcgtaaacttatcggggaaagccttgtaataatcgtggaatacggttttcgtaaggatatcggaatgaagcgccgagacgccgttcaccttatgggatgcggcgacgctgaggtttgccatgcgcacctgcccctgtgctatcacggacattctcgatatgcggtcccaatctccgggatacatattccagagatcggcgcagaggcggcggtttatctccttgactatcatatggatacgcggaagcttgagggcaaaaagaccctcgttccagcattcgagcgcctcgggcatgaccgtatggtttgtgtacgagatcacgcgagtcacgacagaccacgccgcctcccatgtgtatgagtatatatccatgaggatacgcataagttcgggaatgcagagtgcggggtgggtatcgtttatatggatcgcaaccttatccgcaaagttataaagcgttccgtacacggcaaggtgatccgcaattatattctgaagcgatgcggacacaaggaaatactgctgagtaaggcggagcatctttccctcgtcgtggttatcggacggatacagaacctttgagattatctcggcgtccgtcgtttcctgaagcgctcggacatactctccctgggagaaaaggctcatgtcgaatatcttcgtatcatgcgctctccacaatctgagaagattgacagcctcgccgcccgctcccgatatcatcatatcgtagggtacagcctgcacctcgtcgcagtcttcgtatgtgatgctgcactttccgctctgccaattttcgatcacatgaccgccgaagcggacgtttaccgcgcggtccgtgcgcggattcagccatgcatccccgcggctcatccactcatcgggaagttctatctggtttccgtcgattatcttctgcttgaacagcccgtattcgtagcatatcgaaaagcccgtggcgggatagctcaatgtgctgagagaatccataaagcaagccgcaagccgtccgagtcctccgtttccgagaccgggatcgggctccatttcatagattgaatcgagagagaagcccatgtcggaaagagccttttcgtaaagctccgctataccgagattcataaggcttgatttaagggagcgtccgacgagaaactccatgcagagataatagacgcggcgcgccttcttcgctttcactttctctttgaaatccgatctcttttgggtgaggatatccctcaccgtaagtatcgtcgctttatatacctgatttgcgtttgcctcatcgggcatcactccgaaaaatcttgcgagctttgtttcgagatttttctttatttcctcttcggtgcactgttcctttgacatctgatattcctttccgtcgggcttttgcgttttgctccgtttatcatgcgaagtgcccgttctttgcttttccggcaagccggaagcggcgccggcggtgataattcactctgcggcgccgccttctcaatactgcattgaggtatagagatcgatatatttcccggcggagctgtgccatgagaaatcggtatccattgcgcgccgtacaatcgatctccatttttcgccgtctccgtacacggtacgcgcgtaatacacggtattcatcatatcgtgtgcgttatagtttacgaacgagaatccgtttcccgtgttttcaaattcgttatacggaattatcgtatcggcaagaccgcctgtctcacgaacgatcgccacggtgccgtagcgcgatgcgatcatctgcgaaagcccgcacggttcgctcttcgatggcatgaggaacatatccgcgcccgcgtaaatcttctttgagagagccttattgaattcgatcatggcgcagacgcggtcgggatagcgcgacgccatataacggaagaagtcttcaagctccgcctctcccgtaccgagcacggcaaaccgtatgtccgaattacatacgatctcctcgagcacgcgccggacaagctcaaagcccttatgggatgcaaggcgcgataccatcgcaacgatcggcgcatccgaatgcgggaaggagcatatatcttcaagcgccgctttattcttcgcctttccggtcatatcgtccgcactgtagtttgacgctatatcgggatcggtcttcggatcgtaatatgagatatcgataccgtttattataccgattatcttttcacggtacatacggagtatgtgataaaggccggcggaatagtattcggtcatgatctctttggaatacctcgggcttacggtcgtaactctgtccgcgcagacgatcgcgccctttgtgaggttgatattcccgctatagtcaacgatgctcctgtcccattcgtcgagctcaaatacatcgccgagtatatcgaagccgaacacgccctgataatcgatattgtgtatcgtatagagcgcggatattctctgatagcgttcgaggtgggcatattttctcttcaggtagataacgctgagcgcgctctgccaatcgtttgcgtgaagtatatccggataaaaatccgtgatccgcataagctcgagcacagccttcgaaaagaaagcgaatctctcgccgtcatcgaagttgccgtatgcctgcgcacgtttgaaatagtattcgttatcgatgaagtagaaggtaacgccggagcgctcgatcttatatatgccgaggtactgtcttctccacgaaagcgtcatctctccttcgaatactctctcaagcttatcgttccatccgtttctcaccgagggatagagcggtatcaccacgcggacatccgccttatctccgagtgtcgccttgaccgccgccggaagcgagcccataacatcgccgagacctccggtagccgcaaaaggaagtgcttctcccgctgcataaagaattttcattttaccctccgttccgccgacgtgcggcgtactgtccgccgtttttcccggcggaattttgtctgccgtgaccgtccgaaggatcagagcatcttgcccttcggcacatagtaaggattttccccgattcccgaaagcatgcgtgaatcgcggataacaacattcttatcggttattacgcagttgaggtacacgttctccccggtctgcgtatcctgcataagtatcgaattcttgaccgtggtatttcgtccgaccttcactccgcggaaaaggatgctgttttcgacgtgaccgtatatcttgcagccgtccgcaataagcgaattcttaacgtcggaatccgcgctgtaatatgtcggggcgctgtttcttaccttagtgagcacggggcggtttttgacttcgaaaagagacgctctcgcctcgggggattttatgagatccatgctcgcagtgtaataatccgcaaaggatgatatgcatgcgaaatatccgtcgtacttatacacgcggtagtttgaatatttcagatttttgaatattatttcccttgtcaggctcgtatatccgtgggctatcgagtcgagaagtatcttatggagatactcggttctcattacgacgatgttcagcgagacatccgcctcaccctcaaacgatgtcggataagtgagaacatcggttatcctgccgtccgggtcggattcgtaaagcacgttcatgcttgcctgagccggggtcagatacatgcgcttgacggcaacggtcatatccgctccgtattttgcgtgatcgtttatgatatcgttgaaatcgacgttgcatatcacgtcgcagtcggagagaactacatattcgtcggtgatgcggtttatcgcgttgttcacgcttttcagtgcttcaagccttgtcgtataaagtgcattgcggttatttgcgtatgcggtgatattcggaggaaggatcttgattccgccggagcgtcttgcaagatcccaatccttgcccgagccgaggtgatccataagtgactgatagttgtagtgcgttatgacgcttatattatagatattggaattgaccatgttcgacagagcgaagtcgataaagcggtatctgcatccgaagggcacggacgccgttgttctcagccgtgtaagctcgggcagattgccgtcatgtatgtttgaaaaaattattcccgctgctcccatatcacttatcctcccttccgagattttcaagatactgtttcgtcgccatcatgcccgccggaacgtccgcgccgtccgggacggtcacgccgccggacacgacggttattccggtgctcgcgcttctcgtgcgtccgacgacgcttccctctccgacggtcgcatcggaatcgattatgctgtaatttacaagcgctccgcctttcacggtgacgccgctcattataacgctgtcgcggatatacgcgcccttttcgacgcgcactcctgcggagagcaccgaattttcaaccactccgtcaacgaagcagccctcggttatgagcgaattcgtaaccttcgcgttttctcccgtgaagtgcggcgggtccgcgttgttcctcgaaaagatacgccacgacgtatcgtatatgttgaacaccggatcgtctccgagaagatccatgttagcttcccaaaggctggagatcgtcccgacgtccttccaatatccgtcgaaatgatatgcatacatatttttgtgatccgcaagcatggcagggatcacgttcttgccgaaatcgtttgacgaattatcgtccctgtcgtcgcgctcgagatactcttcgagcacctttcttccgaaaacgtatattcccatggacgcattcgtgctcttcggatgagcgggcttttcctcgaactccgtgatgcgctgatcttcgtcggtattcattattccgaagcggctcgcctcctcgatcggcacatcgagtacggcgatcgtcgcatccgcgcccttctccttatggaagcggatcatcttcgaataatccatcttatatatgtggtcgcccgagaggataaggacatactcgggctcgtatcttcttataaagtcgaggttctggtatatcgcgttcgccgtgcccttgtaccaatccgctccgctctttccctgatacggagggagtaccataactccgctcgacatgcggtcgagatcccacggctgtcccgagccgatgtactcgttcagcacgagcggctgatactgcgtaagcacgccgaccgtataaattcccgaattcacacagttagagaggggaaagtctattattctgtatttgccgccgaacggcaccgcgggctttgcggtcttttcggtaagtgcgtaaaggcggcttccctgcccgccggcaagaagcatcgcaacgcattcttttttcttatacattatcgttcttcctccctttaccggaggcgccgctttttccggagccgcgccccttatctgatttttttgcggatttcttgattatgagtgcgcagagcggcggaacatcggctgttacacggtatacgcgctcgccgttcacgaccgtactgtcagtcgtgagaggaccttcggtgacgtcgttctttccgccgaattcatatctgtccgagctgaacacgatctcgtattccgcgcgccgcggtacggtgaacgtatagtttccgtaggggatcggcgagaaattcagtatgacgatcagctcgcgtccggatgcgctctttcgcttataggatatgaggttcgacgatgaaagatcggcgtctatccactcgaatccgtcccacgaattgtcgatctcccaaagctcgggagattcaaggtaaagcgcattgagttgtctgacgtagtttttcatctccgaatgacgcgggaattcgagcataaaccactcaagctgattctcgtaatcccattcgcggaactgtgcgaattccgttcccatgaacgtaagctttttccccggaagcgtcatcatattcgcaaggaacgtgcgcattgaggcaaacttcgaatcgtattcgccggacattttatctattagggacttctttccgtggacgacctcgtcgtgggacaccggtaggacgtaattctcggaaaatgcgtacatgagcgggaacgtcagcttatcatgcatatactgtctgaaaaacggatcggacgacatatactgaaacatatcgttcgcccagcccatgttccacttaaaattgaatccgagaccgccctcatcggctctcttcgttatcatcggccatgaggtcgattcctcagctatcatcagcacgtcgggatgcgccgcaaaaacagcggtgttcagctttctgaaaaaggcaattgcctcgagattcttattgtctccgttcacgttagggatccactctcccggctttctgtcgtaatcgaggtaaagcatcgacgcaacggcatctatgcggagtccgtccgcatggtacacaccgagccagaaaagcgcgttcgatatcaggaaggactgtacctccgttcttcccacgtcaaagcatcttgttccccatccgtgatgctccatgcggtcgcttccctgatattcgtaaagaggacctccgtcgaattcgaaaagaccgtgacggtccttcgggaaatgcgcaggcacccaatcgagaatcactccgatacccgctttatggaggcggttgacgaagtacatgaaatcctcgggatttccgaaccgcgaggtcggggcgaaatatccgcatatttgatatccccacgatccgtcgaacggatgctccatcacaggcaggagctcaacgtgggtatatcccatttccttgacatacgggacaagcccatccgcgatctccctgtaattgaggtaatgcttaccgtctgcggtgcacgcgccgtccttcgtcctccatgaaccgaggtgaagctcgtatatgttcatcggagagggatagaaatgcgatgccttccgagacgctgcggaacggaactgcttccggcggaacctcatccatgaagcatcctcccatttgaagttcgggagcgttctgacgatcgacgctgttttttcgagcgtttccgactgaaatgcgtaaggatcggctttcagccatgtgacgccgccgcgccgcacggcgtatttatagaagcgtccttcgatgctgcggtcgaataccgcgatcgcctcccatacgccctgttccgtaactctctccatggggattcccttgttctgatcccatgatgagaaatctcccacgacagacacgctttcggccccgggcgcccagacgcgaaatgaatattcaaacctgccgtcgccgatttcttttccgtgtactccgagataatcctgcgcgttgaagttggttccctgatgaaacagatacgagggaagatcgttcacgttattcttttccgactgtgattttttatccataccgtacacctttcattatattccggaggcagcggcaattatccgattccgcgtacaaattaccgccgtcatgcgtttttcattccgttattatacatcttcggctttgtcctatcaaaggggattttgacgcagattgaaattttattccgtcacctcgttgcggggctcgcaggtgaggtttattccgagttttttgaacatggatttgtcaacggatgagagcatgacgctcgaatgagcttcacacccgcggagctttccgagctggctgagtgcgagcgcagcgcgttcgtcatgtgaagcgcacacggaaagcgcaatcagcgtttcatcggtatgtaatctcggattacggctgccgaggcagtttgtcttaagtctctgcaccggctctataatatcagccgcgagaagatgtatgttatccgggatatccgcaagatacttcagcacgttgagaaacagcgcagacgatgcaccgagaagattggtcgtttttccggtaatgaccgttccgtcctcaagttcaagcgctgcggcgggtttgcccgtttcttccgcgcgcttcagcgccgcgaccgtaacagcgcggtcgagagcggtaacgcccgcctgcttcattacaagctcgatcttatagaccgtctcgtcgtcctcaaggcatttgagctggcggcactttgaggtatagtagcgtctgattatctctctcttcgaggcttcgcaaaccgcgtcgtcgtcggtgatgcagtaccccgccatattgactcccatgtcggtgggagaggaatacggacattcgccgattatcttttcgaatatcgccgaaagaagcgggaaggcttccacgtcgcggttgtagttcactgcgtactcgccgtatttttcaaggtggaacgggtcgatcatgttcacgtcgcgcagatcggcggtcgccgcctcgtatgcgagattgaccggatgcttgagcgggatattccagatcgggaaggtctcgaacttcgcatatccggcatggcagcctcttttatactcatg

SEQ ID NO: 559 - DNA, 32759 bp, Unknown
  16S sequences of unknown bacteria
ttctcctacattagggggctttttgtctattgtccgtttttactggtccagttcactttgtcctctccgctttttgcttatcgcagaccttcacaggcctttttgaactcaccgatccgcgccttcgggtcctccgccccatagaccgaagaaccggccaccaggatatccaccccggcctgataggccaggggcgcattttccaggttgatgccgccgtcgatctcgatctcacaggccaggccccggctgtcgatctcctgacgcagcagccgcactttgtccaaagcctccggcatgaatttctgtccgccgaaaccaggctccaccgacatcaccagcaccatatccaactgaggcagatagggaaacagcgcctctgcgggagtggcgggcttgatggtcagcgccactttgcggccggcggccttgaccttctgaatcaggctgaacaggtctccctgggactccagatggaagttcaccaggtcggccccggccttcaggaaatcatccacatagttttccggctgggagatcatcagatgcacatccagaaagccgtcggtgaccttccgcagacaccggagcaccggggcgccaaaggagatattgggcacaaaatgcccatccatgatatccacatggacccagtcggctcctccctccagcaccatctgcacatcccggcccaggtttgcaaaatcagcggacaaaatggacggggcaattttcacgctcatggttcattcctcctgcaaacttttttactttcgctccgccggtacccctgcagagacggcggcatatactcttattagcagcgaaaaatcccagtgagcggcgccgtcccccagcgtgcccgacaatcatcccggtcggctttcgctgctgtttatcatagatgggctgtccccaaggggcagccttttttctttttacatggggaacacttggttcaggcccatcaccaccaaggggataatgaacaccgacagaatattggacagggccaggccctgagcggctgcccggtcattgccccggtacaggccggagaggatgaccgtctggttcatggcaggcatagccgcctggacacaaaagacacaggccggcaaagggggcacatccatcaaaaggcagataccggcacagaacaccggcgcccacaaaagacgagcagccacagcacccacaatgcaccgaggagttttcagtacatccttgcccatgctggccagaagataaccgcacagaagcatggcaatgggcgaggtcaaagcgccaaaatcggtgagggccgtctgcaaaaaggcaggcacgggaatgtggagcaaagacaccgcagcgcccaccaggaaggacagcagcggcggggaaaagactctcttgatcttttccgcccaggtgatgacgccgcccactgtgccgccagctgcgatgcggggggccaccagaatccaaaagaccagggtgttggcaatgtaataggcggtgacatagggaacgctcacttcaccgaagatctgcatgcaaatgggaaagcccatcagcatggtgttgcacatggcaaagatggaaatgaaaatgccctccaaggacttgggcagcttgatcagtttggcaatgcccagggcaatgaaatatccccccagctgggtgacaaagggggccagcagcagtgtgccgctttcggtgataaactccatggtcacattctcgatggcattctcaaagagcatggccgggatggtgtacttcatgatgaaggatgtgagaaaatgatagtaatcctccgtcaggaattttcgtctggtcatgaaggcgcccagcagcatgatgagcatcagggcgaatacgccgttaaaggcgtttgcaatggacaaggctctctcctcttttctcttggctccaggccggattgaaccgcctgcttttttctttgcagaaaatatccccaagcccggcggctcttttattatagcacggcaggaaagctttgggggacttttttgatttttgccaaaaccttctgccggggcacaaaaaagccgccccatacggagcggcttaggcgcttcgaaaaagtggcttcggccacttttccgagtttttgcaaggaactgcatgcacgcctttggcgcacacttgttccttgataggtgcaaaaagccacgcacaggtcgcagctttttgcagatccgttaggaataaaatgatccagtccctcacacgatatgaagttcctgacagacaaaagccgccccttgcgggacggcttttcagaaggtttttacttcttcatggcgatgacttcgatctccactttcacatctttgggcagacgggccacttccacgcaagagcgggcgggcagcacatcgccggtgaagtaggtggcatacacctcgttgatggcggcgaaatcattcatgtccttgatgaagacggtggtcttgaacacatcttccatggtgcagccggcttcggccagaacagccttcacattttccagagactgcttggtctgggccttgacgcactcttccacggcgcctgtttccggattgacaggaatctgaccggaagtatacaccagattgccggcgacgacgccctgggaataaggaccgatagcgccaggagctttttctgttgcgattttggttaccatgggaatgaccttcctttccgattgggccccttctgaaaagcgggccagattttatttttattgtataccaagccttgctgtttgtccactttctttttcggctcaagcaaggccgtcccgggcccgctgggctttgatattctgctccaccatcatgtccttcaccttcatcagccgggacaggttgccccgttcgttttcatccagcttcatggtgatataacggatggtttcctggagctgagggatcatcacatattccagggcattgacccggcggcgggtcttttcgatctcctgggccaggagcttgacggttttttccatctccgccagacggagcatatcctccagcgtcccggccagctgggccacggcgtcatccagctcgccgctggtggcggcaaagccatagggatagatatccgccttgtcgctggttttggtgatcacatcgtacatgggcacatccaccgacataatgttgcggaacttcatctcaatgcccactccctgcttgggatagagaaaggtctgctccagcatttccgggggcatcaccgcgccggcggcctggaatccggcataggattccgtcagggctttttccacccccagccgcagcttttcgctgacccggacgatatccaggaactgcttcatcagctcgtcccgcttgtctttcagcagcttatgcccccggctggctgtggcaagtcgctttttcagccgggtcagctccatgcgcgtagggtttacattgagcctggccatctgcattcctccttattgcccatctcaatccttggcgggatagtatttgtcgatgaattccggcttgatccgcttcagctcggtcttgggcagaatgctcagcagcttccagcccagatccagcgtctcttcgatggtgcggtttgtgtcatagccctgggacacatattcccgctcaaaggcatcggcaaactgggcatagagcttgtcggtgtcggtgagggcggcctcgcccagaatggtcatcagctctttggcgtccttgccccgggcataggcggcaaagagctggttcatggtaccggcgtgatcttcccgggtcttgcctttgccgatgcccttgtccttcagacgggacagggagggcagcacatcgatgggcggcgtgatatctttccggtacagctcacgggacagaatgatctggccctcggtgatgtaaccggtcaggtcgggaatgggatgggtcttgtcatcttcgggcatggagaggatgggcaccatggtgatggagccttccttgtccagcagctttccggcccgctcatacatggtggcaaggtcggtgtaaaggtagccaggatagccgcggcgtcccggcacttccttccgggcggcggacacttcccggagagcctcggcgtagtttgtgatatcggtgaggatgaccagcacatgcatcccctgctcaaaggccagatactccgccgcagtcagcgccatacggggagtggcgatccgttcgatggccggatcgttggccaggttcaaaaagagcacggtgcggtcaatggcgccggtgcgcttgaagtcggagacgaagaaatcggcttcctcaaaggtgatgccgatggccgcaaagaccacggcaaacttggcatcgctgccgggcacctgggcctgacgggcgatctgggcggccagctgggcatggggcaggccggaaccggagaaaatgggcaatttctgtcctctgaccagtgtattcaggccgtcgatggccgacacaccggtctggataaactccgaaggatagtcccgggccgccgggttcatgggggtgccgttgatgtccagatactgttcggccaggatctccgggcctccgtctttgggatggcccatgccgtcgaacacccggcccagcatatcaggggacacgcccagctcaatgccatggcccaggaaacgcaccttggactgggccaggttgataccggcggagctttcgaacagctgcaccagggcgttggagccgtccacttccagcaccttacaccggcgcacctcccccgaaggcagctcgatttccgccagctcgttgtaggtgaccttgtccacgccctgcaccagcatcagcgggccggccacttcctgtatggtacggtattccttaatcatgcctctttacctccctgggaaatctgagcgatctgctgccggatgtcggcttcgatctggtcgtactgctccttgtagatctccttgggcacatccttggcccggccgatgcgggcccgggcgggaatgtcgaagacgggctgcatgggagcgcctttgcgcagggcttccccggctgtctcgtagtagaacaggatcagctccagcagacggaactgcttgtcgatctcacagtaggaatcggtatcgctcatggcgttctgctgcaggaagtcctcccggatcatctgggtggtttccatcaccagacggtcggcgggagacaaagcatcgatgcccaccagcttgacgatttcgtccagctcgttttcctgctgcaaaagcttcatggcttcattgcggtttttgatgaagttctggttgatgttgtcctcataccagggacgcagccggtcaaagtacagagaatagctgtttagccagttgatggcggggaaatgccgccggtaggccagagagctatccaggccccagaacaccttgacgatacgcagggtagcctggctgacaggctcggaaatatcgccgcccggaggggatacggcgccgatggccgacaaggtgccttctctgccgtcactgcccaggcagatcacccggcccgcccgttcatagaactgggccagacgggaggccagataggcaggataaccctcttcaccgggcatctcttccagacggccggacatctcacggagagcctcggcccagcgggaggtggagtcggcaataaccgccacattgtagcccatatcccggtaatattcggcgatggtgatgccggtgtacaccgaggcttcccgggcggccacaggcatatcggaggtgttggcgatgagcaccgtccgcttcatcaggctttcgccggtgcgggggtctttcagctcggggaattcccgcagcacatcggtcatctcattgccacgctcgccgcagccgatgtagatcacgatgtccacatcgctccacttggccagctggtgctgggtcaccgttttgccgctgccgaaggggccggggatggccgccgtaccgcccttggcaatggggaagaaggtgtccacgatccgctggccggtgaccatggggaatgtgggagccagcttttccttgtaggtccgctccacacgcaccggccacttctgtaccatggtcagctcatggagctggcctttttcgtcctcgatgacggccaccacatcggtgatggtgtgtttgccgccccgcacttccttcaccgtgccgcgcactcccacgggcaccatgatcttgtgcagcacaatgatggtctcctggacggtgcccagcacatcaccgggctccaccttgtctcccgctttggcggtgggagtaaactcccactccttctcccgggagatagggtctacttcaatgccccgcttgatggtatcgcccacctggcggcgaatgtcctccaggggacgctggatgccgtcatagatctgaccgatcaggcccggccccagctccacagacagaggcgcaccggtggataccacatcctccccggtgccgatgcctgcggtttcctcatacacctggatggaggccttgtcgccccgcatctcgatgatctcgccgatcaggtgctggggacctacccgcaccacatcgaacatattggcgtgggccatgccctcggcaatgaccagggggcccgccaccttgatgatttttcctatattatccattcaatcagcaaccttctttctcttacaggcaggcctttcctgccatgaaacggtcactccccggaaaacggggtcactattttttgaggatgtcggctcccacggcccgctccaccgcctggtgaagtcctcgcagcccgatccccaggcttcccttctgggaagggatggggatgacggccacggtgggctcgtcgttatagcggtcgatatcctgggggatgagggcggccagctgctcggtgatataaatgacggcatagcctgcctccgccagcttatgcagctgccgggcggcctccttctcttcgctcaccgccacggtggtcaaacccaccgctttgaatcccatcaccgtctggctgtcgccgatcacagccgctctatacagcataacagatcctcagcctttccatgatcttgtcctggctcagaccggcgtttttccccgccagcaccgagcgcactgcgttgtattccgcctcgcaggccagcagataaccaatgacggtctcttccccaaaggaaacctgccgggcaaagcgggcatattcaatgagcagatcgtcacaggccttgtccaaaagggcaaagccccggccttccagggcatccagcgcctggccttccagcgcctccagacaggttccggccagcaagcgaggcagctcctcccgggtcatgggcgcatagaaagcctccggcgcgatggttccgccgggcaaaatggcccgctgggcataatccagccctttgcccatgcgtcccagacgcagcgctgtgcgcagattgcaacagtcgatggttctctgcacatatcctgtgagaaaatcactgccgctctctctggcttttttcagcgtctcttctttttccgcccggtccagcaccatatcgctgagctgagggtcgccggtgcgctccagcatctccttggccgtttccacagcctgagccatcaccgggtccatcccttccaggtctccctcccggatcatgcgcaaaagttcccggggcggaatgagaccagccgaagacaaaagccgggtggggtccacctgctgagcgtctcctttgaggatggccttgatattgtgataatcgtatttcagccggaatacttcgatcatctccggcctgggacaatgagcatacagcagatccatcatctgctgacgccgctgggagatgacctgctccagcttcagcatatcccgccagtcaaaggcgggccagcccttttcctccaggagcttttccgcttcctgggcgtctttgctctcggccagacggtaaagctgggtgctgttcatcagctgcccttccacgcagcggatccgggtgctgatgtgcagataatcggtatccttggtttttttcaacaggctccctccttaaaagaggatggccgccacttggctggctgtctcctcttccagcaggtgcacagcggtctccaaagcgcagttgatctccaccggcccctgacgcagcacaaatccgccggcgatatttttttcttcctggcccagggtaaaggcggcgccgatcttctgattgatctgttccaccagggtttcgcccagccgggccttgtcccgggcattgagcagaatttctccctgcttctccccggtctcctggcacagtttcaccaaaagggcgcagtaatccccttcctccagggacaaaagccgctggagagccaggtcataggctttttcgatctgctgccgccgggcggccagctgccccttcttgttttccagaagggcggtgcgctcgctgcggcggagcaattcctccgcccgcgtctgggcgtcttttttcaggctttcctcttgggcctgtgcctgctgggcggccttttccccgatgcgggcggcctgctggcgggcttcttccagaatctgctctgccttggccttggcctcatctacaatgctgcgagaaatgttttcgatgcctttcatggcgtttacccgatcaggccgccatgctgcccacgccgaagatgaccagcacggagatcagcagggccagcaccgcgtatgtttccaccagaccggcgctgataacgcccttcatggcgtcatcgggcttcttggccacgatgttcatggcagcagcagccacacggccctggcgaatagcggaatagtaacccacaatggcagtgggcagagcggcgaagaaataagccaccccctgcaccagaggcagtgtgccatccagcacagcgccattgctgaacaggatcaaaaaggccaccagcaggccatagatgccctgtgtgccaggcagagcctgcagcagcagaaccttaccgaacttggtggggtcttcggtgaggatacctgtgccggcctcaccggccaggcctacgcccttggaagagcccataccggaaaaaatcaccgccagagcggcacccaatactgcaaaactggtccccgtaaacaagctggaaatccattccatgatctagtcctccttaaccacatctacatattttgtttttattttcagcgggtgcatcatccgcccaccgtcttcataaaaccggccaaagaattcgatatactgcaaacggctggtgtgaacataggcccccagcacgctgatggcgatgttgaaggtgtggccgatgatcgccaccaccacaaacagcagcacgcctaaaaggccaccgccgcccatggcgcccattttgttgaccacagagcctaccacagcaccggaaagccccagagccatgatacgggaataactgagcaaatcagacacaaagcccgtgatgccatacagttttcccaagccgccggtgatgcggccaaagccctttttgtcccggccgcccagcaggagcatcagcaccacgccggcgatgatcagccactgtcccacaccgatgcccagcaccgcaaggccaatgccggcaaagatcatataccaggtgccggtgtcacacaacgcacccagataatccttctgccggatctgccgccatgcagaagccgccatgccggtgaggatctgaattccgcccaaggccagggagaaaatcaacattttcatcggctcttccatgggattaaaccacagcgcaggcagttccacccgcttgcccaacacgccttcggtgaaagcgggcactgcgtcgcccagccagccgcccatcagcacaccggccacaatggtgcccagtccgcaatagaaaaacagagtgagcatctgacgcatggttcctttgggcttgagcagcttgagtcccaggaaacatcccagggcaatgaggatgccgtacacagcgtcccccatgatgaaggcaaagaatgtgatataaaagggcaccatcagggggttggggtcgatcaggctgccgtaacgaggcatgccatacatctcggtgatggcgttaaaaggctcggccaggggtccattctccatggccgtggggggatcttccccttcctggggatcctccatgctataggcgcagccttcccgttccagcaccttttccacccgcgcctcagcctttttcggcagccagccggtgatgaccacggtgtttttcgtgcgcaccaggccggaaagaagctgatcttcctccgcttccatggagtaggcgtccaaagcctgctccatggcccggtaggcatcgccacattccttgatcttgccgatcaggtcctgccgctgctgttccatctgggccatctgcttttccagcgcaccaatatactgggccggagtcccttccccctcctggggagcctgggcaaagcctcgctgcttgatgatggccatggcctgttccttgcagctctgatgaatgaggaaggtaacataatgctgttcattgtcggaggaaacctgctccatctggcaggccggcgctttttccgccagttcctcttccagctctttcagatcggccgctccgggcagaacgccccggagatattccaccgccccgtccatatggtactccaggggcacatccaggcttttccagggtttgagctgggtcactgtgccttccagccgcccgatctcccccagcaggcggttcatttcctcggccgccttgttgatctgccgggcagcggccagggccttgtccagcaccttttcatcataaagctgactttcggtcagttggggctttcccgccagcaaaggccggctgggaggcggcacatacttggacaagacctccatggcctgtccgatgaccgtcagatattcccgggcccctgtgttttcttccgtcgtgcgctccagggcattttcctgcccgaaatcggtggattcctgggcggtctccacctctacgcaaccttcccgccgcagctggcgcaaaaggctgcggcgcctgctttgcagcgcgacggcccgcaggcgcttcatttctaccagcgccatcagccaacgaccctttccataatgaatttcaccgctttttccatattgctttcggcggatgcggcgatctgagcgcattgcttctctgttttgtcccgcagtccttccgcctggcgctccgcctccttctgagcctgagccagcagggccgctgtctcatcccgggccttctgccggctttcttcccgcagacgggcggcgtcgttctccgcctgttccacaatgcttccggcctccttgcgggcctgctccagcagctgttctgcctggcgctctgcctgctccacctgttcgatggctttcatggacactctatcaccttctctttttcagactttcgcatacggccttagtatagcaccaaaaaaactttttgcacagggaaaaaagggacttgcccttatttttcctttgcccgattctgccgcgcctgacgcagcatttccagctctggccggagttcaccggagagcagcagacaggccacatacacagcgcctcccactccggcgccgcacagcgtcttgaccagcgccgcaaggccgccgccctccaaggggatgaaacggcacaccacaaaggcgcacagagcgcacagaagggcactgacaaagatgcgcagcgtacttttcccatcgggacggaaccggaaagtgcggcgcattccccagatcaccagcaaaaagtagcacacaaaggccaaaagggtaccccaggccgccccctggattcccatcagacctgtcagggcaaaggtggccacgatcttgatggccgcggccagcaggctgtaacgcagcaccggccgggtgttcttggtcagctcaaagcccttaattgcatattcggtcaaatccatgaaaaaataagcggcagcggcaataccgatgatggaagcccccgaccaataggtgtcctcaaacataaaatgtgccaaaggctgacagacggcgcacagtcccagcgccgccggcatggcgatgaggaaataaagccttgtgccctgggccagcagcttttccgccgcctgccgtccgtcattggtataaccggagataagggacggatatgtggcccgcaccaccgcggcggcgatcatgccgaaaatacccgaactgacagtgaaattggtgagatagatggccgagcccacatctccctccatgaaggccacgatgtaccggtccaccatgctcaaaaggccggtgccgatgctcatgccgatgagaggcacgccgaaagtgagcagatcccccaacagggccttggaaaaatactgaggccgggtgctggaagggacatggagcaccgccatggcgataaaagaggccacaagatcactgatgaccgcaccaaagatggcgggatagggagtgctgttgcccccggctgtgaccaacagggtggtgcacaccacttttcccgccacatccagaagggacacaaaaatgctcaccatcaggtgttcggtctggatcagaaggccgttcatcatggtgaagagggaatagctggtcagcagcatggcagcggcaaaaaagaggaagcttccgccgatctgccaggccagcgctccgatccccagcaccaccacggtgatgacgccaaaggacatcaggaaagtggaataaaaggtcttttccccctgggggctccggtattccgacacaaagcgggcggtggcattgtaaagccaggccgccgacaccagaaacagggccagcacagtggtgttgacgatttggtaacggccattcaccgccggtgggaagatgcgggaatacagggcgctcatcaccaaaagcagaaccccttccagcaccttggccggcaccagaatcagggtattacgggtcattttttttgtttctcctgccaaaacgctacctcctgggaacacatgtgggggccggccttctgtattgaccatgcccctgggattcgatataataaaaaaatgaacattccccttttttcaaagaaatcaggggcctgtacttttggattatacacgaaatcaacgccgacttctacggcttttgggaggaaatcatgaaaattttgcacatcgccggcggcggcgaccggggcggcgccaagacccatatcctggccctctgctcccgcctgaaagagcagcatgagctcaaacttctgagtatgcggaaaggggaattcgctcaggatgcccaaaaagccggcattgatacgctggagatccagtcgggctttcccctgcgggatttcctcctggccaaggaagccgcccgtcagtttcagccggatatcgtccactgccacggggccaaggccaacaccgtgggcatcttcctcaagctgactctgggctgcaccgtcatcaccacggtgcacagcgactacaagctggactatatgcactccttcctgcgccgccagaccttcggccggctgaattccgccgccctgcggctgatggattaccatgtgacggtgtcggacaccttcaaaaagatgctcatccagcgttccttccgcccctcccgcatccagaccatctacaacggcctggatttttcccagaagaccccggattttgaccgtggggaatacctgcgccagcagggactgaactatactcccggggatgtggtcatgggcatcgccgcccgcctcactccggtgaaagacatccccactttgctgcgggcctttgccaaggcccggcaggaggaaaagcggctcaagctgctcatcggcggcgacggagaagatatgaacaagctgaaggccatggcttcccagctgggagtcagcgacagcgtctgcttctgcggctgggtgtcggacatcggcaaattcttcaaatcctgtgacatcgatgtgctctgttccatttccgaatccttcccctattccatcctggagggggtcaaggaaggctgcgccgtcatcacctccgatgtgggcggaatgcagaagctcatcgaccagggggaaaacggcttcatcttccagccaggggatgtggacactttcgcctcctacatggtgcgtctgtgccaggatgaggagctgcgccgcgccttcggagagcgccttctggaaaaagcctcccgcatttactccctggagggcatggccgcccgtcaaagccagatctatgaatacatccaggcccgtgaggctcggggcaagcgcaacggcattgtcatctgcggcgcctacggccggggcaattccggagacgaggccattttgggagccatcatctccaccatgaaggagctggacccgctgtcccctctgaccgtcatgacccgcaaacccgctgagacccggctgctccatgaagtggacgccgtctataccttccacctcttccgtttccgccgggccatgcgccgggccaggctctttatcaacggcggcggcagcctgatccaggacgccacctccagccgcagtctgtatttttatctttacaccatttatattgcccacaaactgggttgcaaagtgcagatgtatggctgcggtgtgggccatgtgtcccgtcccttcaaccgccgtctggccggacgggtgctcaaccgcagcgtggacatcatcaccctacgggacaccatctcccagcaggaactgagcgatatgcatgtggtcaagccggatatccgcctggcggccgatccggccaccatcctcactcccgcttcccctcaggaagccgaccggttcctctcttctcacggcgtgccggtggatgggaagtatttctgcctggccctgcggccctggggcactttccacgattttgatgtctttgccaaagcggcggaatacgcctaccacaaatatggcctcaccgctcttctgctgcccatcgaggtgccccgtgatcttcacgcctgcaaacaggtggcagcccgtctccacacgccccactatgtgctgggggatgcgccggaggatgtgcgtctgaccattgcccttttgaagaagatgcggcttctctgcggcatgcgtctccattccatcgtcttttccgccgtggcccgtacgccttgtctggctgtgagctacgacatcaaggtatccggttttatgagctatatcggtcaaagcgaccgctgcaccactttggagcaggtatcggaaagctggctgtgccagcaaatcgaccagctgatggaaaaggaaaatccggaagccgccgacgagatctgtcagaagctggcggatatggagcgggagaaccggaaagccgccgccactttgctgggcattcccttcccaccctccagcaattcataattttccccataaacgcgaaaggccgccggaaggcggccttttttctgatgcacactttacattttgttaaaacccagctcttcctcccctgctttctttgtgatatgatatattataattaaagtagaattttttctgttttttcaggctccagccctgttttcttgtgggaaaggatgatttttatggaaggctttgtctctctgcgcaatgtgaccaagcgctataaaatgggagaagtgaccatcacagcggtggatggagtgagtttttccatcggccaaggggaattctgcatcattttaggccaaagcggtgcaggcaaaaccacggtgctcaacattctaggcggcatggacagctgcgacgaaggcgaagtgctggtggacggcaccgatgtggcccatttctctccccgtcagctcaccggctaccggcgcaatgacatcggctttgtctttcagttttacaacctgatgcagaatctgaccgctttggagaatgtggagctggccgcccagatctgccgcaatcctctggacgccgccaaggtcctgagccaggtgggcctttccgaccggatgaacaacttccctgcccagctctccggcggcgaacagcagcgggtatccattgcccgggccctggccaaaaaccccaagctcctgctgtgcgatgagcccaccggcgctttggacgatgaaaccggacggactattctatcccttttgcaggacacctgccgcaaacagggcatgacggtcatcgtcatcacccacaactcggccattgctcccatggccgaccgggtgatccacctgaaaagcggcaaagtaacccagatcgaagaaaacccccatcccgtaccggtggaagaaatcgagtggtgataagatgaaacgctacaaagctcttttgcacgatatcctggtggagatccggcgcacccacaaccggtatctttccattttgtgtatcgtgctgttgggtgtgggctttttcgccggcatcaaatccacctgtccggatatgaaagagaccgcccaacaatattttcaggatcagaacctgatggatatgcacctgaaatcctccatgggcttcacagaagaagatgtggacagcctgaaagcccaggaggatatcgcctgcgtttccccttcctattcggtggatgcctttgtggagccggccgagggggaccccatgctggtgcgggcctggagctgggaaaatggcgcccaggaacaagaggacaccgtcaatatgccggtgctcaaggaaggccgctggccggaaaaggaaaatgaatgtctggtagagcatggaatgtattccggcgagagcttccaggtaggccagaccatcactctgttcctggaagaaggcgatctgtcggagagcctgaaaacccagaccttcaccattgtgggcgtggtagagtcccccatgtacatcaattttgaacggggcagcagcagtgtgggcaacggctccatccgctcctttctctatctgccggaagatgcctttgcctatgaggtctacaccgatgtgttcctcacctacaaagacacccaaggccttcccttttatgaggacgaataccaggatgtgatggatgaaaagactccggtactggagcagctggccgaagagcaggagcagacccgccacgacgacatttacaatgaagccaaaagcgccatcgatgcgtctcaggcggaactggatgaaggcatcgcccaatacgaagaaaacaaagccctgtttgagcagcagatcgccgatgcccaaagccagctggaaagcgcccaaaagcagatccaggacaatgaaagcctgctgcaaagccagcagaaacagctggaaagcggcaaggcccagtacagtgccgccctcagccagtggcagagccaaaatcaggccctttctgccggagaagccgaactggcccagggagaaagccagtggcaaagcctttcctctctggtgcagagtgtacgggggctgatgaacaattattccacccaaagtctcccttcggatcaacccattccctctgaggtacaaagcgtgctggacgcctctgccgctttgaatgcctttgtgccccaatcggccttttccttctctcagattttgagggaatatctgctggccgccccggaaggagaggaaaaagccgcctttgctgtccagctggaaggcgtgctgggcggtgtggaagaagagctttccgccaaaagtgcccagctggaaagcacccgctcctccctggaagaaaaccgggcccagctgaatgcaggcaaagtccagctggactcccaggccatcaccctgactagcagcgaacagaaactgaaccagggctggagccagctggaaagcgccaaagccgaataccagcaaggtgtggaagagctggaatcccaaaagacccaaggccagcagcagctggatgaggccgcagcagaaatcgaagaaggccgggcccagatcctgaaggcccgccacgacctgaacgacttgggttctccggaatggtatctgctggaccggtccaacaaccccggttacagcgaatttaccgacgacgcccagcgggtggaccgcatcgccgccgttttcccggtgttctttattctggtggccgctttggtgtgtctgaccaccatgacccgcatggtggaagagcaccgcacccagatgggcaccctcaaggccctgggctacggaaaaggagccatcattgccaaatatctggtctatgccctgtctgccagctttttcggcagcatcatcgggcttctgatcggcttcaagctcttccccaccatcattttcaacgcctaccggatcatgtacattctccctgactgtctgactcccttccggtggggctatgccattctgtgcacgctggccgccctggcctgcaccgggctgaccgctttggctgcctgctaccgtgctttgtccgaatcccccgcccagctgatgcgccccaaggcgccccggtccggcaagcgggtgctgttggagcgtttcactcctctgtggcgccgtctcagctttttgcagaaggtcaccgcccgcaacctgttccgctacaaaaagcggatcctgatgaccgtggtgggcatttccggctgcaccgccctgatggtggccggtttcggtttgcagcacgccattgcgtcggtggtggatatgcagtacgatgagatcttcctctatgacgccatggccgtctttgacgaggaaatcacatcggatgaacagcaggagatcgcccagcagctggacaacagctctctggtggaagaatccatggcagtgcgtcaaaacaccatcgacatttcccgggccggcgtcaccaaaaacttatacctctttgtgccggaagatccccaggccctgtcgaattatgtgaccctgcgccatcggggagacggagaggccatcaccctgccggaagaaggggccgtacttaccgaaaaaatggcccggctgttggatgtggaagtgggcgacaccgtcaccctttccccggacggcggccagagctattcggtacaggtggtggatatcaccgaaaactacaccctgaacctgatttatctttctccctctcagtacgaagccctgtggggccagccggtctcctacaacggcttcctggtgaacatgacccccgatgccaccgaagataccctgtcttcccaactgctcaccaacaacaatattctgatgatcaattacaccgcatcctccggcagccagttccacgacattgtggacagcctgaattacattgtgctggtgctcatcgtctgtgccggggctctggcctttgtggtgctttacaacctggccaacatcaacatcgaagaacgggtgcgggagattgccaccatcaaagtgctgggcttttatgacggggaagtttcagcctatatctaccgggaaaacatcctatcttccctgatgggcatggtggccggactgtttctgggcatccccttcctccgctttgtcatccatacctcggaggtggacgccgtcatgttcaatcccgccctggatgtccccactttcctgttctctgctttgctgacgctgctctttaccatcatcgtcaacattgccatgcacttccgcctcaagcgggtggacatggtgcaaagtctgaaatccattgaataacacaaaaaggtctccgggataccggagactttttcttttttcagaatattataaggccttttccccttgcaccagcaaggcgccgttgatttgaggcaaactctgccctcgggacaagccataaagaatgagcgcatcccgggtgatccgtgggtccagctgggcaaatcccgcctgacgcagcaatttctggatctcctctaccccggccgaaagaccgatgcacaaacacaaaagccgatcccgggatggactgcgcttgccagcaagcacctggtgaagatacacctcgctgactccgctgcgccgggccaccgccgctttggaaagcttctggccccggcagagcttgtccagctcccgtcccacattgggatggagcatctgctcccggttccggctgagataggagctgaaactgcccggcgccatcagttcttccaatagctctcctgtggtttttcctttcatttccacactcctttacttttgaacagaaatcgtctaaactaaaaatagatgcaaaacccctcaaaaacagagggatacagggagggaatcatcatttacacctggttttcacaagcacttcagcaggaatacgatctggttcggcgaatgaaggaaagcccccgcgggcatgtggatctgatccgccacaagaaaagtggacagctttttgtgctgcgggatttttacggcaactgcgaagtataccgcaaactgctccactatacctgcccccatttgcccaccgtctacgaggtggcgaaagggaatgaaaaaaacctggtgctggaggaatacattcaaggagacacgctgggctttcttctggaggaatccctgttttctccggaagagaccaaaaagatcgtcgcccaggtgtgccaggccctgtgggccctccactctctgggggctgtccaccgggatgtgaagccggaaaacatcatcctgcgaggtgatacggcggtgctcatcgattttgacgccgcccggctccacaagcctcaggctgacaacgacacccatattctgggcaccaccggctttgccgcgccggaacaatacggcctgtcccagtcaggacctttggccgatatctattctgtgggcattctcatcaatgtgatgcgcaccggggagcatccttccaaaaagctggcggaaggtcatctgggccgggtggtggaaaaatgcacgcatgtgaatccccagcgccggtacaaaaatgttctccggctgacggatgccctatgagttcccgctcttccaaaacctgtccccactgcggcgctccccttcccgacaaagcttctttctgccctcattgtgcccaaaaaattctttcgccccagcctctgtccatgccgcccctgggccgccggaaacactggcgccgccgggtgttggctctggcctctctctttgcccttttcctctgcaccggtctttccgtggctctgccccggattttttccgcccgatcccgtccccgcacctatgaaggccaaggggaggtgtcctactccggagcagacggcgcttttcacctgaccctgggcaccatagacaccccggatcagcccacggcagaacagaccttttataccatgcccggctatgaaggcaccgcccaagtcccgctctttgtccatcacccggaaaccggtgaaaactcatctggcttctttctccacaaactgaaaagtttttcggtggagcttcttcaggaggagggaaattccctctccagtgaagagtcctacaatgccacggatatcgtccctggctctgccctggtgtgcaatgtgcgcttcaacgggcagcctgggcggggaacactgctgtggaacctggaaatggacagcggcgacaccatccgcatatcgcaggatctggaagttaaaatgcttcccacccgttcctatcattggcaggactatcccatggaaaccatggaacagctgcaatcggtggtggcccaggcagaaaaagaaagtgctcctgaggaagtcatccagctgcatcttccccccgttacctataccggcacgctgaagctctcccacccggcctgcctctatggctcccaggagggcgaaaccgtcttccaaggcggtatccagcttttgtgggaagagggaccggactgctatctccacgatctgaccttccgctcttccggaaacggcaccggcctttcctcccgcgggcatcttcatctgaaccgatgcaccttctccggttttgacaccggcctattgggggaagggacaggcactttgtacacttccgattgtgttttcacccagaaccatgtggccattcatcttaccggttctcctcccaagcggcgcattctgtccttttatcagacccaatttctgcaaaacagcaccggccttttgctggaacaggagcccatggaagtgcccctcaacctgagcggctcggttttccgggggaacgggcaggatatcgaaaatcctgtcaatcagtccctggaattgtccgatgcccgatttttctagggacaatcccatcaaaaaagggttttctcgttttcttcaaaaagcttgtcgttgatctctgtgagcacctggccatgcatcaggccatagagcacgatggcatcccgcctgttgcgggggtagagctgggcatagcccacatattgcagcaatttctgggtctcctccaccgtggccgaaaggccgatgcacaggcacaaaagccggtcccgggaaggattgcgccttccggcaaacacctggtggagatatacttcgctcatccctgccccccgagccagggccgctttggaaagattcttttgttcatagatctccatcagcagtccggcgacgggagccgtggcaaaactttcctgattctcccgaagataggaatcgatgtctcccgcttccatcagttcctggcgcaggtcattggtatcctttttctccatgctgtaccctccctttactttttttctgaaaatcggtatacttttctattcttactttataacaatggcaaaaaagatacaatatgcccgttgcatagtacttgttttgcccgaaggaggtcattctcttggaaaaaacctgtccacattgcggtgcatccctgccggagggcgcttctttttgccctcactgtgccagcgatctttccacccgccgtccctcccgcactccccgcttccggccgaaacgggttttgccggtgatcgtggcgattttgctggtaggagccggcttcatcggctattataccgtctcccggcctgaaacctataaagggcagggagaagtgttctattccgccaatggaaaaaactatcagctcaccctgggctatcccgatacccggaaccagcccacgccctctgtcacccagcgggccgccgccgatgaacaataccgcttccccatgcgtttttacatcaatgaccaggataccggcagcgatgccaacgaagaatttatgaaactggtggacagcgtgtccatggaagtccatccactcaccgacaccgattcccctactgtgtgcagtgagccggcccccataccggattattctcccgatgccgctttgatcaccctcatcgactttactgtggaaagcggcgacacccagatggtgtggaacatcaaaatgaaaaacggagatcagatccgtctgtcccaggatcttatcgttcaggagatccccacctataactatcggtaccaggacaccaagatggacaccatttccgatcttcaggccctgctggatcagatcgcccaagaaaccgacccctctgatatcgtcaacatctatctgcctcccgtcacctacgaaggggagctggtcatcgactcccggtctttcaatttctatggctgcaccgaagggcaaggccgcaccacattcaccgacaccgtgcagcttgtgggtgaggaccggagtatttcctatttttatgatatcgactttgtaggcgacggcacctcggtaggcctttccgccggcgtgcgggcccgggccacccgttgcaacttctccggctggaaaaccggtatgctgggctatggctatgcctgggtcaacctgatcgaaagtcgggtggaaaactgcgaagtgggcttccacttcaacagcaccggcaattccgcctcccactccatgttcaacgacaatactttcctcaactgcggcaccgccgtgcttctggagaatgtgcccaccgatctgactttgaattttgacggcagtactttctccggcaatggagtggacatcgacaaccgctgccagcattccgtcaacacatcagaagccacttttaattaaatacttcccatttaaaagacctgtgcagagcaaactcgctctgcacaggccttttttattcattcatagagtgctagggtcttttccagatggcttttcagccgctctaatacccactgaggctccaggatctgggcttcttccccaaagcccagcacccaggagaaaaactggggactgacggccaccgaaagccacacggtgaaatgatcttccccgtcccgccgtatgggcacatccttgccgaaccggtccaccaccaccccggccaggtgattggcaaaccgaagccgcacctgcgcttcctccccgccatacattccgaacacctgacgggaataaaccgccatatcgaacttctggaattgctctgcaccatccctcttttcttgttccaggcggataccctccattttgtccactcggaaatgcttgatcttctgctccggcgtgtcataggccaccaggtagtaattttcatcgtcccaggtaagggcccaggggctgacctggtaccgctctccctcccggcggaaccggcgggccactgtatcctctccagcctctcccactgcccactggaaatagcgaaagctgatctgtttgccttgggcgatggcctgatgcaaggcatcaatgttataataaatgctttcattcatggttttgatccggtttgccacatagacctgacgctggagggtctgggcctgatacacactggccaggctttccaccttgccgatcagctcccgggattttttggcggtgataaatcgggaggactgaacggcatccaccagcaatttcagctcggccacctcaaacaggcgggagcctaccccatagcttcccctcccctggggagagatcacatccagcccataaacctgcagggtttccagatcgtcatagaggctcttccgctcggcgctgacgccccattcctccagcttctgggccaactgggcgatggtgagcccgtgatcctcatcggtttgctccagcaggattttcatcagatagagcagcttgagtttttgtccggaacgcttggccatacttcctcctccttccactggatacggggcggtctgtccagccctgcataacccagggcctctttgcctcccaaaaggtccgccccgtaccggggtggccatactttcgtgaacacagccttccctggctttcttgcacagcgcggaagcgcagcatgggtgcagcgtcacgctgccccgacccaggaaaggaggcaaagcggcggtatttccgggaaaaatcccggtggatgatctccccgatctcccgggatgttatggttttctgctttctatccactttcttcatcccctttccttttccaatagagtgcagcgcaccaaagtcctgccgaggggagagaaatctctccatccagcaaaacaaacactctttctccctgttttaccatgcattccaccatccggcgctggtgctccggaagccgctccaaaggaagccttcccagatcggttccttcctcattcaaaagaggcaaggtctccctctctgctggccggggcggacgcagcagcaccaggtccagaaacaatccgccaaagcgccggggccgcctcgcccccagaccatccatctgccgctggatcaccatgcggatcagttcttcccccacccggccggtatgatgggggacgggatagcgccgctctaccggagtctttttctgtctccgggccagcgctcccagagcctgccgtctctcctggggcagaagggtcagcagctcttccagcgcctttccccctttgccttctgcaaaagcccaggcagccagtttttctgtcatactctgccagctttccctttgttctgccagcgggctttggcggtagctttccagcagcatcctggtctcgtcccttccagcggatacacagcctttcaacaaaagcaggcaaaattctgccggtgcacgggaggccatcacctgccgggccaggggcagatcttgcagcaaggcccgggcaaccggctcttcctcttccatgaaaagcccttccgccacatccagcgtcagctcccgagcggcccgctcctcttttagctgggaggaataggtgcgcagcatctggagccactgctctttggcctgtacttctccctcttccaaagcaatccaccggagaatctccccgggagaccagggtgctttctgcaaaatcttctgccactccccaggcgacggcaccggccagcggctttcctctgctcccacctggatgggcaccaacacccgctcttctttcaattcctgggccaatgaacctccacctcctttttgccataattgcccagccgcagccgcccggtgagcaaaatgccttcctccagcaaagccgccggaatggcattgtattccctgggaagatagccgatcctctgtccattctcccgcaaaacggccaccgctttgggatcaaagggattgtccggctcccttttgaggatcagctcctctccctcccacagcgccagatgttccccgcccgggatataggaaaagccccgcagcgccagaacatccagcagcgggccttcttcccgctcctgttcctgctctggcccttcagggctttgcttatttctttttccggcccgcagccaaaggagcagcgccagcagggcgatgacagccagcaagattccttccagcacgggtacctctcctttcagcaggccacacccatctcccgcagatcccagcgggcctcctccatgttgtctgcggaaaagagaaagcgtccactgaaatcaaagacttcgatgtgaccgtttttatattccatggtgtattccattgagaaagccctcctctttctgcaaaaaacagtttcttttactgttttcagtatagcaggctttctgtcccataaaacggacaacggctttctctcccgtttgtttcactccccagtataccctcttcttatggattccgccagcccctattttgagaaagaaaaaggcctccgcccaaaaggcagaggcccaaaagaccaatttcttatttgttcagcatcacctggaggatggtgggatccagctgaggcacgccttcgttggaaagcaggcccacgccccggatggtttcttctacatccttgcacacaatgccctctttttcggtgggggcgatgtcctgcatggccagggtggcgcagagcacggccgactggatgccagtggcgatcttgagggcgcaggtggtcttggcgccgtcgcagatcatgcccatgtggttggccagcatggactggatgcctctttcgatctggggcagcttgccgcccatgaggtagatcatggcgcagcaggagccggtgccgccagcgataccgctgccgcacaggggggacagacggccgatatagctcttgatatgaacggtgatcaaatcgctgagagccagggcccgggccagttcttcatcgctctttcccagcttctccgccaaagcggtggcggccactgtgcaggaaataccctggttgccgctgccgccggtggtcatcaccggcatggggcagccgtccatacgggcatcggaagccgcagccgccgcggccacaatatcgccgcccaaggtgggttgcatcaggccgcccagcgcaccgctgaaggctttgcccacccgcaggccataatcgccccgcaggccttcctgggaaacagcacggttcatcttggctccttccagcaggaaggaaatttcttcaaaggggatggttgtggcaaattcatagatctcttttaccgacatctccacatgatcatctgcttcttcgctggcggccacttcttttttcagagaagctacgccgtctttctcgatgagcaccacattggtgtgggatttgacgatgatgcaccggccggtgtgtccaccgccctgcaccaccgcttcgatatacagacgctctgtggtatcctctttcagggagaccttcaggattttcttgtccagcagcgcttcggcctgctgaagctgctcatcggtcattccattgaggatctccagcttcttgtccgaccggcggatgacggcgcccaaaagagccgcgatgtcgatgccggtacggcctgtgcccggaatgcccacccccaaggcgtttttgacgatgttaccgctgagatacagctgaatgctttcgaccggcccttccagctgctcggcggcgatggatacgccatacgccacagcgatgggctcggtacacccttgggcgggtgccacttctttttgcaacacttcaatgtacttatgcatgattatccccttcattcatttgatccccggcatgaagccgttttttgtccagtgtctagatttaattgtatcaaagccccaaggcaatgtcaaaacattcccgctctgctacgataaaatacacaaacaaagttacggccaacaggtcggcgctgcctcccggactgagatttttttcggtaaacaggctgtccatccggaacaatccttctttcagcgcctgctcgtcctggcattgctccaaaagagcggcggcctgctgctgcaccaggtgcagtccttcttccccgccacgatgaagcaagttggtatcctccgtgtgggccatcagggcacaaagggcctgagcgcaggccccattccagctatatccccggctcagagccttcgttagctggggaaggccccactgccgcacctgggggaagccttgggccgcctggccccgcactcccagaacgccgcttctttgataaaaacgccgtccggcggtgtcctccccctgtttctccagatcattcaaggccgggctggcgatctgccccgccagggaaagcaaagccagatcgtcgattaccgctccttctcccagcagccgtcctgccccggcgcatagaatgcccagggaaaaaatggctcctttgtgggtgttgatccctttcgtggcctgggccatctgctcttctgccctcagccccaaaggacggatgcggaacaaaagctcctccggtgagccctggaacagcgcccctttccgggcgcaggcggcaaaatagtctcccagcacggcggcgctgtccaaaaaggtgaaccggtccatatcccggtgggcgccagcattctgtccgtccaccagtcccggcttgggggtgcagcacacctcgtgaagcagcgcccgctgggcacaggcgccgcaaaaagcccctatctcccaggccagagcctgctttatccgccggtggacttcttccaccacctggtcaaggccatgagcccggctgcggccgcactccgccgcaggccgggggcaaagcaggcattgccgctcctccctgcccagctcctgccgggaaaccttctcccccgttccatagagcacatccgcatcccacaatctacccaaaggctcctgctcttccagaaggagggccgcttccttgacctgccggggctgcccttccacccggaggaaatactcgatccccgccggagtggcgtattccttttcttccagcaagggaaatccccagcctgaaagctgccgccgcaaggccttggctccctgtcgggcgctccaatcccccagagggaagcgtttgcaggggccgggcatattcagggtgagcaccaccaaagtaccccctcttttcagccactctttctgacgctgggcccgctcctcccggcactccagcacctgctccaaagtgggatggggcccttctgtccaggctttgttcaccggctctcccccgctttccgggcaatatcctgccctgccgggctttggaggaattcccaggtggtatcgggcaccagggttctcacttcatccagttttccttcggccagaagagcccgcacccgggatgcgctgatagccgctcccccttcttccttccgggggatctccaccacctggataccaaaccgggggaggatctcctgcatctgcttgttatacagggcggtgatggggctgaaaggctcctggcccacaaatcggcggcggatatccagggccggggcaaagtgctggccaaagaccaccaggtccagctgaccccctgcccccttttcgatctgctcttccttgaggaaataggtggggaaggtagctgaggaaatgagataatcggaagtgggatgcaccagcacattgggaaggtgtgccgttccttttttcaccagctccatacgcacatcagcgggaaacaggctggcatcctctgaaagaacaaaaaggtgaagggtatcgcaggctttggccgcctgctcgatcaggtactggtgtcccagggtaaagggattgcagttggccaccaccgccccctggctcccctggccccgggcaagggaagcgacaaaggaatcgatgccgtcttttttgttttccatcagcagaatgtcctgggtgcggctgatctcataaaagccaaactccagaaacatctgcttgttgtggggctttgtaaagaggaacaaatgctgctggttttgctggaaggcctgggagcgcaaggtggaaaccacggtggccgtcaagccctcgccccgccacttttcgtccaccgcgatacatttgagcacatttttctccagggaaccggtggcggccacctctccctgccggtcatacagaaccacggtgtactggatacccttgtcatagcgcagtccctggcgggaaagaaattcctccacccggcggcgcaccacacctttcagtccgccctcataggtctcctgcaaaaaatcaccctgcacggcctttgtcctcctttttccgatagaaagggccccatgaaagaatggcttccatggggcactttttctgtttgattcctgttagtccacgctcttgatggtgtccagcagactgccatcccgatagagcacattggccaccactttatctcccagatgaatgggcttgggagtgccggtgagctcttcggcaatgcgcttcaggtcctggatctccacaatgggcagaccggccttgacgagccgctccttcagctcctgctgacgggggttgacggcaatgccacgctgggtcaccagcacatcaatggtgctgcccggggtggaaacggtgagcacccgatccaccacaatggacaggcgagcccgggtgaggggggcgatgatcatggccatcttggctccggcggcggtgtcgctgtggccgccgctgccgcccatgatataaccgttggaatcggtgtgcacattcacattgaagtcagtgtcgatctgggtagcgcccaggatgaccacatccaggctgtccacggcgctggaacgcaccgaggggctggcatagtgggaggcggtgacttcccggtgacggggattggtgcggatgctctccacagcgcccaggtcaaagcactgcacatccagcagcgcctcaaagcagccggcgttgagcatatccaccatatagctggtgatgccgcccaggccatagctgcccttgatacccttttccagcatgatgtccttcaggtatttggccgcggccagagaagcgccgccggcaccggtctggaagctcatgccgtctttcagcaggccggaatgttcgatcactttggcggcatactgagccatcaccaggcccaccgggtcacgggtgatcttggtggtgcccgaaacgatgcctgccgggttgccgatgctctccacctgcaccacataatccacataaatctcgctgatggagaaatcggccagcggatagggcaccaggttgtcggtgatgacgatcacttttttggcatacatggcatcggcaaaggcatagcccaggctgccgcaggccgatttgccgtatttgccggagcagttgcccatggtgtcggaagtgggcgctgccacaaaggccacatcgatggggctgcggccctgctcgatgtcgctggggcgtccgccatgggagcggaaggtcaccggcttatccagcacgccgtgggagatagcccggcccaccacgccgccgatgtagtcggcttccaggccagtgaccacatggtttttgatatgcccgatgaggggctcatgggtgtcgaacacagaggacgcattcacattcaggtctttgatccccaggtcggccacagcgtccatgaccatgttgagcacatagtcaccgttgcgcagatgatggtggaaggagatcgtcatgccgtctttcagcccggccagctggattgcctccttgatggaggaaaccactttggaattattcatcgatgagcacccccattgcttttgccatttccagaacctgacgggcccgtgtgacgatgggcgcgtcgatcatcttgccccgcagggacacaacgcccttcccctgctctttggccacccggatggtctccatcacttcctgggcgtattcaatgtcggcctgggtggggctgaagatctggttgatatcggccacatggcggggcgagatggaggatttgccggtgaagcccagcgccttggcaaaggcggcatcggcccgcagtccctcgtcgtcgttcacatcggtgaagggggtgtcatagcaatccaccccggcggcccgggcggccaccaccatacggctgcggctgtagaagatctccttgccttccttggtgcgcttgcactggagatcggcggtcagatcttcgccgcccagcagcatggccgccacacggggacagctgctggcgatggcataggcgttttcgatacccagagcggtttcgatcaagggaatgagcttgactgtgcccacttccataccgtgcttcttctccag

SEQ ID NO: 560 - DNA, 6892 bp, Unknown
  16S sequences of unknown bacteria
gtgctcgcctttttccgccgtcaaaatgggcgggcctttttccctccgctgcctatcgccgctctgctccgccgccgcttgggtgggggcgaaggtcaaatagcgcgggttgggctactttcgcgtggggtggccgcttttgcaaggcaataggccaaaagggtttccaaattatattggcctttgccgcgagccacgagaccttccgtcgagtggcggtctgtaacggccaatcagcgggagaccgcaccagaccggcgagccgcgaggcccgttgccgaacggcggtaactccgcagccaagttgctttccctcgagtggccccgcgcccatgggcgcggtgtggggtgcaggggatcatcccctgccgcgagccgcgaggcctgtcgccgagcggcggccttggggacgaaagcgccggaaacgcgaggccttccgccgagcgtttccaaagcgtcatgcttatttgcatagccctgcgcgcctatggcgcgcagtccgtggtgcagggattcaatccctgcggggagtgccgaagaagaagagggcaacggtgccggggccggtgtgactgccgatggtggtgccgatgctgttgatctccaccttgccgttcagatggggaaaacgggcttccaccagcgcggcgacggctttggcgtcctccatgcaggcggattcgctgatgtagcacttgccgctgtagtccagcccgccctcggcaaactgctccatcttgtccacgatctcccgaatgacccgcttcttggtgcggatcttttcccgggggatcagacggcccttgtcgtccatgttcagcagggggcaaatgcccagaatggtgccgatgaagcccgccgttttggacacgcggccgcccttgatgtagaaggtcaggtcggtggagaagaaccagtgatgcacgtccagcttgtgggcttccagccagtcccgcagcgcttcgatgctcatgccgtcgtcccgcaggtcggcggctttgtccatcagaaggccgtagccggaggacgcgcccagcgaatccaccacgtagatcttccgctccgggaagcgctcgccgaggatgctggcggcgttgcgggcggcgttcaccgtgccgctgaggccgccggacaggctgacgtgcagcacgtccttgcccgcctccaggaagggggtgaagtactccacatattcggacacgttcacctgactggtgcgggtgtcggaaccttccgccatgcggcggtagaactcgtcaaacgggacggatacgcccagatcgtcggggtagtccacgccgtccagcatgaagtggaagcagatatagtgaatctcccgggaatcgaaatgctccttggacaggtctgccgtggagcagcagctgagaatgtagtctgccatgagaagggtcactccttttcactgcccgccatcgggcttgttgcgagctcatgatagcacgccgccggagtcttgtgcaacctacgatcctgtaggatcgctctacgatatgaaaacgggcgatagagtttcaaaaaaggcactctacaaattgtagagtgccagaaaaatcaagggtttgcagctccactcttcggagagtgcccctccccggttctttccttgctctacccctccttcggggctatgatggagcagacttcttatgggaggtgcgcacgcacatgagttattttatcctgacggacacatccgccaacctgcccacgccggtttgtgaggaatgggagctggagcggatgccctttgcctatattctggacggcaaagaatatacctgcatggataccgaaaattttgacgacaaagaatattatggaaaactgcgctccggcgtccgggccaccacctccatggtggcgcaggagacttattatgaagccatgacccgccgcgcggcgaatggcgacgacgtgctgtacatcggtatgtcctccggcatcagcggcgcgtatgccgcgtcggaatcggcgtcaaagcgggtgcgggaggaaaaccccaacgtccgcatcgagaccttcgatacccggggcgcgtcgctgggcgagggcctgctggtgctggaggcggcccggatgcgcaaggcgggcgcgtccatggacgaagtgctggccatgctgcgcaatcaccgcagccgcatgcagcaggtgttcaccgtggacgacctgatgcacctgcagcggggcggccgggtcagccgcgtggcggccatggtaggctccgtgctgcagatcaagcccattctggaatcggacgagctgggccgcatcatcgtaacgagcaaggtgcgcggccgaaaaaaggccgtccgctatctggcggacgcgctgcggcagaagatcgaccccaacgaaaagcagctgatcggcattgcccacgcggactgtaaagaggacgcggaaacgctggaagggctgatccgggaatcctgcccgaacgcccagttcctgacggtgaagtacgagcctgtcaccggcgcgcacgtaggcccgggggcgctggcgctgttcttcctttccaaggacaggtggcggtaagctacaggaaccgcttcatttcctccacattttcttcctgcatttccagaaggcgctctcccagacggagggcgctttcgtcttccccgtcgtagtcccgaaggtgctggatggtcttggtcacgcccatggtggtgccctgaatggtcatctccgcgattttttccgggctggcatcaaacagcagcttgcccgcgctcatcatattggcggacagcttggccatggccgacgcgtcgttaacgctttcgccctgccgctccagcagccgccgggcctcctgacggactttttcatactgggtcttctgcttctccagcgtggaaaaaagctcctgatcctccgttttgggcagcacgtcctccagcccagaaacgcccatgtcagcggttttgtggatatactgcagcagttcttccttcggcatcatgtcaacatcacctcgccggtaggctggcgcgaagaagaaaattttattctgcggagagccggttaaaaaaggttcttgcaaaatagcgaaaatctgttatgctgaaagcgaaacaggctttcggctgttagcgcttccatcagccgctggtctctcggcaaaaggcagcgccgcctgtaccatcattttttcgcttcagcgcagaaaggagtccccatggcacaactgaccgtatccgccaagcaatccaagggaaccattcgccggcaccttttcgggcatttttcggagcatctgggccggtgcatctacgacggcctgtacgtgggcgagaacagcaagatccgcaacgtcaacgggatgcgcgccgacgcggtggaggcgctgcgggccgtaaagatccccgtgcttcgctggcccggcggctgcttcgccgacgaatatcactggcgggacggcgtcggccccaaggaaaaccgcaagcgcatggtcaacaccaactggggcggcgtggtggaggacaacaccttcggcacccatgaattcatggagctgtgccgtcagctgggctgcgaaccctacatcaacgccaatctgggcagcggcaccgtgcaggaaatgagcgagtgggtggaatacctgaccagcagcggtgactccgccgtggcccgggagcgctgggccaacggccagcgggagccgtgggcggtgaaatactggggcatgggcaacgaaagctggggctgcggcggcaatatgcggccggagttctacgccgacgagttccgccgctatcagacctactgccgcaactatggcagcaaccggctgtaccgcatcgcctgcggccccaacgagggcgacacggactggacgaataaggtcatgtccatcgccgggcgcttcatggacggcctgaccatgcactactataccgttcccggcggatgggatcacaagctgcctgccaccggctttaccaaggcgcagtattttgaaacgctggatcgggctcggaaaatggacgggctgatcgagggtcatctggccgtgatggatcgctacgacccggagcaccgggtggggctgatcgtggacgaatggggcacgtggttcgaggtggagcccggcaccaaccccggcttcctataccagcagaacactctgcgggacgcgcaggtcgccgccctgacgctggatattttcatccgccactgtgaccggctgtccatggccaatctggcccagacggtcaacgtactgcaggccatgctgctgaccgagggcgaccgtacggtgaaaacgcccacctatcacgttttcgacctgtacaaagcccatcaggacgcagcacaggcggacgtggacgtgcagtgcgcgcagatcggcgagaatggcgtgaccctgccccagctcagcgcctccgcgtcggtgaaggatgggcttctgaccatcacctgctccaacgcctcccccacggacgaaatggagctggacatcctgctgaaggacttcgacgccaccggcgtgcggggccgcattctgtccggcagcatggatatgtataacgatttcacttccgcgcccgcggaggttcggccgctggagggtctgaccctcacgggaagccgggtcagcgttcatctgcccgcctgtgccgtggccgagatcacgctgggatgaccccgccctgccgctgtctgctgggcgactttcccgagggcaaggaattggcggagctgatcgcggactatgtcgcttctctgccggaggagtttcgcgccgcccccgaagaaatctcccggcggctgaacgtctgccgggactgcgccgagcttttcgacggaacctgccggttatgcgggtgctatgtggaggcccgtgccgccaaggcggggatgggctgcccggcggtgccgccgaggtgggaagcggttccgccatccatcgagcgttcccgccaaacctgaccggcagaatttgccgctgttctttccagttgcttcacccggtggttttccccgccgggttttgttttgcccttcctcacgcaaaaaaacattgaaaaccgcccccgcagccggtataatcagggtggcgggatagggcttctttctttctgctaaggaagcaagcccggggcggcttttccgttcctaagcccgatggacgtacattgcggagcagggggacttttttctcccccaaaaaagaactgaatgaaaggaagaacgccttatgtggaacgcggtcgaccatttgctggaagaggccattcgtgaaaacgcgtttcccggctgcgccattgccgccgggcagcgggggaaagtgctgtataccaacgtgtccggctatctggtgcgggacggggagcggcaggtgacgcactccacccggtacgacgtaggcgcgctgacgcaggtcttcgtgaccatgcccctgtgcatgatcgccgtggagcggggactgctagggccagatgacacggtggatcgttttctgccggaagtgccgccggacaagaagaacatcaccgtggctcagctgttgacccagacctcgggtctgtcgccccactttctgctgcaggaggaagcccgcagcgacaaggacgcgctgggcgcgctgctgcggcatccgctggccagcccggtaggcggcaaggtgtccgactccggcatgggcttcctgctgctgggtttcctgctggaacgggtctttgatatgccgctggacgaagcggctaagcgctttgtgaccgccccgctgcacatgggccgcacgggctatttgccctccggcagcgatgtggcccccacctccattcgggacgaaaacggcgtactgcagcccggctgtccgctggacggcaacgcccggttcctgcacggcgtggcgggccattcgggcctgttcaccaatctggaggacgcgacccgcttcgcctccatgctgtccctgaacggccgcaccgaggacggcgtattcctgtcccagcgggccgtgcatctggtctccaccgagcgcacccggggcatgaacgccgcccgcggctacggtttccacatcactaagcggcagaatccgtttctggggctgctgtggcccagcgacggctacggtctgcgggatcccgccagcggcagcgcccttgcggtcagcccgctggatggcttcttcaccgtgatcctgatgaacggcgcgtacacccccgccaaccggaccgagggcgaacgcttcctgcggctgtgcctgaatgcggcctatgcggccttccagcacgagaccggctgcgaggactgcgaataacaagaccgtccctttcgcgtttttctacggaagggacagttttttgcccaaaaacggttgacaagtttttggttccttcgtataataccaccaacctaccaagtaggtatggaataaaaggagcgatggtcatgaggcggctctcccagcagacggtttttcgatgtcggtttccctttgcctgacgaaaaatcccctatcaaaacaaagctgaaaaaggagcgattctcatgtctaagatctatacttccgccgaccagctgatcggccataccccgttgatggaactgacccacatcgaaaagaacgagaacctggccgcgaaaatcctggccaagctggaatatttcaaccccgccggttccgtaaaagaccgtatcgccaaggccatgatcgacgacgcggaagcgaagggcgtgctgaagccgggttccgtcatcatcgagcccacctccggcaacaccggcatcggtctggcctccgtggctgcggcccggggctaccgcatcatcatcgtcatgccggagaccatgtccgtggagcgccgccagctgatgaaggcctacggcgcggagctggtgctcaccgagggcg

SEQ ID NO: 561 - DNA, 21699 bp, Unknown
  16S sequences of unknown bacteria
tgcatgcagccccttgcaaaaactcgaaaaagtggcttgagccactttttcgacatgatcaagccggtgaaaaccggcttcttatttagctattttgttcttcttcccattgttccagcagcttccggtcctcccgggtcagctggagcttctgaaagaggtcaggccgccgctctctggtgcggagaagggattggagcctgcgccattgaccgatgtttttgtgatggccggaaagaagcacatcgggcacccgccggccgtgccactcttccggtcgggtgtattgggggtattccagcacaccggagaaatggctttcatcggtgaagctctggtcatcagccagcacgccaggcaccatgcggcacaccgcatcggcaatggccacggcggcgatctcgccgccggtgagcacgaaatctcccagggagatctcctcatccacacattcgtcgatgaaccgctgatcgatgccttcgtaatggccgcaaaccagaataaaacggtcccgggccaaaagctccttggccttttcctggcagaagggagctccctggggggacatcaggatggtatgtaccttttcgccctcccgcacctcttcccaggcccggtaaagaggatcgcactgcatcaccattcccatgccgccgccatagggatagtcatcggtgcgccggtgcttgtccaaagtgtaatcccggatgttgtgggctttgatgtcgatcaggccgaattcccggccccggccaatgatgctctcgcccaaaaccccttcgatcatgccgggaaacagagtcagaatgtcaattttcatcgggcagcatccccggaatggtattcagctccagacggcggttttcgaaatccacccgattcacaaaggccggcacggcggggatgagcacctgtctccggggcgtggcgatgcagtacaggtcggaagcgggggaggggcgcacctcttccagcgtgccgatgatctgctcggtacgggtgtcgtagaccgaaaagccgatgatatcggcgatgaaataggccccttcttccagctctacctggtcccggtccaggtagaccaccttgtttttcagcgtcatggcctggtccagggaatcaatgccctccagtttgcacaagacgaaacctttgtgggggcggctttgagagatggaataggctgtgccgtcgatataaaggcagggcagctgttcaaagagcaccggggagtcgcaccagggatcgatctttacctctccccgcacgccgtgggtgttgatgatgcgtccgcattccagcagctcaggcatagagtatctcctcatttctttgtggttgtcaaaaaaggaaaagaggccgttttttcaaaacggcctccgatgactagtccaggatctccactgtagtccgcaggttttcccgcaggccggcggccttgatcagggtgcggatctctttggcgatgcggccctggcggccaatcaccttgcccatgtcctcctgggctacgcgaagctggaggttcatggtgtcgccactcatcaccgcctccacagaaacctggtcgggatgatccaccagatgctgggcgatatagacaagcaactctttcatatcggcattctcctttgattaaagagctccggctttcttcagaagggcacgaacggtgtcggtgggctgggcgccgttcttgatccactgctgggcacgctcagcgtccacgcggatctcagcgggatgcaccaggggattgtagatgccgatctcctcgatgaaacggccgttgctgggatagcgggaatcggccacaacgatgcggtagaaaggagccttcttggcgcccattcttctcagtctgatcttaaccatgattgtacctccatgtttttgtaaaaaatattctttctctatgccaaaatcgccttccaggggagaagggatgatggatcaatgaatcagaagggcaacttcaggccccgcaggcccttgccctttctcttggccacgccggaaaactgtttcatcagctgctgggtggcgttgaactgcttgagaagccggttcacatcctccactttcagaccacagccggcggcgatgcgctttttccgggagaagttcagcacttccggattgtcccgctcgtaaggggtcatggaaaggatgatggcttcggtgcgggccagctgcttttcgtccacctgggcgccctgcaaggctttgcctccggcgccagggatcatggcggcgatatcggccatgctgcccatgcctttcagctggcacagctggtcatagaaatccgtcagggtcagtttccccgaacgcatcttcttttccagctcctgggctttcttctgatcgaaattctgctgggccttttcgatcaggctcatcacatctcccatacccagtaggcgggaagccatgcggtcggggtagaagggctccagagcgtccagcttttcgccggtgccgcagaatttgatgggtttgccggtgacggcccggaccgaaagggcggcaccgccccgggcgtcgccgtccagcttggaaatgagcaccgaatcgatgcccagcgcttcgtcaaaggccgaggcggcgttgacggcgtcctggccggtcatggcgtccaccaccagcatgatctcgtgggggtggagggcttctttcagccgtttcagctcatccatcagttcttcatcaatgtggagccggccggcggtatctacaatgagaagatcgttgccatgctgcttggcatgggcataagcggcctgggcgatggccaccggatctccctggccctgttcgaacaccgggatatccagctgagcgcccaccactttcaactgattgatggcagcggggcggtacacatcgcaggcacacagcaaaggccgcttgttttcccgctttttataatagcccgccaattttgcggcgttggtggttttaccggcgccttgcaggcccacaaacatcaccacagtggggggattgttggccatatggatgcggctttgggtgccgcccatcaaagcggccagctcgtcattgacgatcttaatgacttgctgagccggggtcaggctttccaaaatctccacgcccaccgctttttcggtgacgcgggcgataaagtccttgaccaccttgaagttcacatcggcttccagcagggccatacggatttcccgcatggcggcccgcacatcggcttcggtgaggcggccgcggctgcgcagcttttggaatacgccgtttaatttttcgctgagactttcaaaggccatgggattcctccgggctgagccctattccgaaagtttggcggccgtctgcaaaatcaggtcggcctgctttgcgatctcgtaattgcgggggcctgacgcattggccgaaacgatgaggtgggcggcctgagcgatctgttccacctgggtctggatgccggcatagcggcgcaccagctggagccggtcctcggtgtcccgcagaatgctttccgcccggacaatggcgtcccgcacaccctggcgggtgataccggcgatctccgagatctcggtgagggacatatcctcattataataaaggtcaaagagttcccgctgtttgtcggtgagcagttcgccataaaaatcgaacagcatggacatatggaaagtatcgcttttcatcctttgacctccccacaatgtaaagcgttgagcctttacaacggtatgtatcttaacatggatctgcgctcctgtcaagaaaaatagtgaaaaaaggccgcgggttgaattgtggcggagggtgtgctatcctgtaaaaagcgagtggctgcgggccgcttgcgggaaaaacgcaaggaggacgagatatggtccattatgtatccttcccgggactttttgataaggtgttcaaattcaatcaggtggccttccatataggggactggcccatccgctggtatggcgttatcctggccgtggcttttctgctgggtgcgctatatctgatgaagcgggcttcgaagtttgaaaccgatcccgataccgtcattgatctgctgatcattgctctgccctgtggcgtgctgggggcgagagcctattatgtgtttaacagctgggactattataaggatcatttgaatgaactgctgtccatctggaacggtggtttggccatctatggcggcgtcattgcaggaattctggtggtgctgctctttggccggaagaaccgtcaccggttcaacatcctgtcctttctggatgtgggggccttgggactgctcatcggccagatcattggccggtggggcaattttgtcaacggagaagcctttggcacagccacaaatctgccttggggcatggtgatctctcagacggccaccggcgggggagcggcggtgcatcccacttttctgtatgaatccctgtggaacctgttgggctttacagtgctgcatttttactccaaacgccggaaattccggggcgagatcttcgcctggtactgtgtctggtacggctttggccggggcctgatcgaaggactgcgcatcgacagcctgtatatcggcgataccagcatccgcatttcccaggtggtgggctttaccggctgtatcatcggcgccatcttcctgatctggatgtactgcaccaaagcgtggaaacgcatcccagcctttgatctcagcgctccggggctggttcccaaagagggagcggaggaaaaggcggaagaatgtgagaaaacgatccctgaggaaaaaggggagacggaagaagagggagaagtgccgtctcaggatgagtctgagaattcaaaggacgaataaaaaaacgcctgcgggcgaagaaaagagggagaccgggaaaccggaacaaaaatggaaaatttgattttagccatcaatgtggtgctgccgctgtttttcactatggccatcggctattttctccggcagatccacatggtggacgaaccactgctgaaaaagctgaacagcctggtgttcaaggtgtttttgcccattctgctgttcacaaacatttaccagtccgatctggagtccatgtttgatctgaaaaccatcctcaccgccgtcatttcggtgttagccacctttgtggttctttgcctggtggtgccgctgatcgaaaaggacggccctcggcggggcgtgatggtccagggcattttccgcagcaattacattttgttcggtgtgcccattgtgtccggtgtgttcggccaggagggtctgggcgtggtgtccatcatcagcgcctttgtcattccgctgtacaatatgctcagcgtggccgctttggagaccttcagccatggcaaaatgaatgtgaagaagatcctcaaggggatcatcaccaatccccttatcatcgcttctttgctgggcattgtgttcctggtgtttcagatccctctgcctcaggcggtggaagagaccatcgtggatatgggacaagtggccacaccccttggtctggtgagcctgggcggattctttaagttttccgataccaagcggtttctccgtcagctggtcattatcgtggtggggcggctgctcatttgcccggccatcttcctgcccatctttattgccatgggcttccgggatgtggagctgatggctctggccaccatgatgggagcacccattgccgtttcctccttcatcatggcccagcagcaaggggccgatgccgatctggccggccagtcggtggcgttcaccaccttgttttctgtgtttaccatgtttttgatcatcttcggtctgaaacagatgggcctgatttaaagaaaaaaccggacgcaattgcgtccggttttcttcttttaaggcagccgtttgcggcagtagacctgagacaaaagggccaccacggcgcacagggccagataaaggggaaagagcttgttctgcacggcacccgacagaatgattaaagagccgcagaaggccagtacagggattcccaccccttgccaccggcttttgatctgcccctttttataaaggcggtagatggcaaaatagagtaccgggtagaacagatagctgatggcgatggcgatttctgacacatcgctgttgggaagcaggttaaagcgggtggccagatagtggagagccatccagatacagcagatgacaaaggagaacaccgcagaatgtaccgggatgcccagtttgggatggacgcgggaaagggtggaggaaaagggcatcatcccctggcgcagggagagggaatagggcatacggatgtagcccatcaccaggccgttgacagtgcccatcaccgaaaccaccacaaacaccgtgatggctttggcgaaggtgtcgccaaacaggctggccgccgcctctgtcacatgggcatcgctcagggccataacctgttccggccccacatagcaggtgatacctacaaaataggtgacatagatgagcaggatgatcaggggcgccgccgtcagcgcaatgggcagattccgccgggcatttttcacctcatgggagatggaggtggacaccacccagccgtcataggaataggcgacggggcctacggccgccagccaaccaatgccggaaagagaagaggaggacaggctgcgcaatccgccgatgggatcgccccagaggattccggcaatgcccagaagagccagagggatcagtttgacaacggtggagaagttctggaagaagccgcccagtttggcccacagcacattatagagaaagcacagggcgcagaatacaaggccaatgaggatctgctcttccagactggcctggatattgaagaggatggaaccatagatccccaccacccagctgaccacaatggtgatggcggggtagtagacgaagacctggaaccaaccaaaggcgcaggcccagcgagggccggcgaactgctcaaaataggtgaagatgccgccgggcttgtcggtgagagaggccagctggcccatagccaggccgccgaaaacaatggcaatggcagccagaacaaagacaaaagctcccagaaccacgctgccgccagtggccaccagcacattgtcgcttttgaagaaaatacccgaaccgatgcagatgccgatgatcatggtaatggccgtgaaaagtccatagcgtttgttgttgcgttccatcgtgaatcacctctgtttttacagaatgtgtacattatgaagggtggaggtctttttgtcaattccaaatgaaaaaaggaacggttgcagagaaaggcgggctatgctatccttaaaagtacagaccggaaaaagaaaggatgacaaaggatgatcaccagagacgaagcctgggcgctgctgtgcaaatacaatcaggagcctttccatctccgccatggagaagtggtggaaggctgtatgcgatattttgcccgggagttgggatacggagacgaagaggaattctggggcattgtgggtcttctccacgacctagattttgaacagtggccggaagagcactgccataagtgccgggagctgatgcaggaagccgggctggatgaaaagatgatccacgccgtggccagccatggctatggcctgtgcagcgagatcgagccggaacatgagatggaaaaggttctttttgccgtggacgagctcaccggccttttgggagccgccgcccggatgcgcccctccaaaagcgtttccgacctggagctgccttcggccaagaaaaagttcaaggacaagaagtttgccgccggttgctcccgggaagtgatccagcagggcgccgaccgtctgggctggactttggatgagctgatcgaaaaaaccatcctggccatgcgggaagatccgaagaactaagggcattctataataaatagtaaaaagctctcccattgtgtaggagagcttgagcgtgtcgaaaaagtggcctaagccactttttcgacacgctcaacagtcatcgacaacggtcgatggctgtttttatatgttgcaatggaagaaaaggagctagaatccccggcccatgatctcatgggtggtggagatcatcacaaaggccgaaggatctgcatcggcaatgaactgctgcaggcggcgggcctcccgaggggtcatggcggtaaagaggatggaacgctcttctccggtaaaggcaccggtgccggaggacaaggtggcgctgcgtttcaggtcctctgtgatgaagcggcagatctcttccgggtgagagcagatcacctggagccatttgacctggttcatagaggcgattacattgtcgatcaaaagggacttgatcagaagaccggcaaaggagaagaggaaggtctctacgccgaagagcaggccgcccatcaaaacaaagagcaggtcggagaaaaacagggcctggccgatgtcaatgctggtgtattttttcaggatcatggcgatcacatcggttccgccgccggaagcgcccacagagaacaaaagggcagcgcccacagcgggcaaggcaatggcaaagcccagttccagcaccggttcgctggtgagaggtgcagagaggggaaagattcgttccagcagggtgagggatatgctcatgagcaaactggtgtaaatggttttgacgccaaagctccgtcccaaaaagacaaagcccagcaaaagcagcagcacattggcgataaaggtgaaatcactggcgctgatgggcaggtagggagccactacaacggccaggccggtgacaccgccaaaggaaaagttgttggggaatttgaagaaatagacgcccagagataccaggagcgtccccactgtcatggcggcgaaagggggaagggtcctttttttctttgccataaagcaaacaccttctttgaaagtttgggccattgtaccgcaaaaattccagtgaaacaaggggtaaaacaaaaaaataccggtatacatttgcttcctggggaatctgacaaaaatgtcaccccatagagagaaaaaacgggtataatggaggaaagaaaacgggaggagccgcagggatatggagcatattttgctggtggaggatgacagagccattgtgatggggctgacctattccttggaacaggaagggtatcaggtgacggtgcaggaggattgcccatcggccctgaaggttttggaggagcaaacattcgatctgtgtctgctggatctgacactgccgggaggcagcggttatgatgtgtgccgccgggtgaaggagctgggagacacgccggtgatcttccttacggccatggacgatgaggtcaatgtggtaatggggctggatatgggagccgatgattacatcacaaagcccttccgggtgagggagctgctcagccggattcgttcggtgctgcggcgggcccaccgaggcggggaaaatctccatcagctgaccattggctccctgacggtgaatacccaggaggcccgggtgtggaagcgcggggaagaggtctttctcacggcgctggaataccggctgctgcttacctttctcaatcatcccgggcaagtgctcacccgcagccagctgctggagggcatctgggatgtggcaggggattttgtcaatgacaacaccctgacggtctatatcaaaaggctgcgggaaaagctggaggacaacccccaggcgccccagatcatcaaaacagtgcggggcgtgggctataagctggaacggggggagaaggcgtgatacgcaaccgggaactcttttattattttttggcccaggccctggtggcgggagtggtcagcggcctggtttctttgtgggcccctcaggcggtgcccgcctttttgtttgggtttttgctgcttatcgccatttccatgggttttcagcgcttgcgctaccggcagattgcccagctgaacgactatctccagcaggtggcgactggagatttttccctggatatccaggatcacaaggaaggggaaatgggccttctgcgcaccgagatctataaagtggtgctgcggctatcggaacagagggacatcatccaccgggagcggcaggcgctctccgatgccatttccaacatctctcaccagctgaaaactcccatcacctccatgctgatgatgactgatcttctgcgccaggaggagctggaaaaagagaagcggcaggaattcgcccgcagcatcggctcccagcttcagcggacccagtggctggtgtcttccttgctcaagctggccaaggtggatggcggagccatccggttccagaaaaagccggaggcggtgggaagtttgctgcgtcaggcgttggagccgatccagattccgctggatatcaaggggatcgatgtgaagatcacaggggataccagcacccagcttttctgcgaccggcagtggacggtggaggcctttttgaatgtgctgaaaaactgcatggagcatacgccggaagggggacagattcaggtgcaggtacaggacaatcccctgtatacccagctggtgatcctggactccggagaaggcatccctcgggcggaagtgccctatgtgttccagcggttttaccgggggcagaatgctagtgccgacagcgtgggcataggcctggccatgacccgcagttttctcaatgggcagaacggggatatcacggctctgcccgggccggggggacattttgtcattcggttttatcaccaggaagcagtatgatgtttttcaccggagggatatctctccggtttttcttttgtgacgaaattgtcacaaaaaaagtcactgcaatgtcacttgcaggggatatactgtactcatcatattagtacagatagggaggacgcgacatggaaattttgcgcgtagaacatctttccaaggtgtatggcaaaggggagacccaggtgtgcgccttgaacgatgtgagcttttcggtgaacaagggggagtttgtggccatcatcggcccctccggttcgggaaaatccaccttgcttcatattttagggggagtggaccggccttccgggggaaaggtctatgtggagaataccgacatttaccggctgaatgaaagcaaactggcggtgttccgccggcggcagatcgggctgatctatcagttttacaatctgatccccgttctcaatgtggaggagaacatgaccttgccgctgcttctggatggacacaaggtggatgaaaaacgcctttcggagctggtgcaaagcctggggctgcaaaaccggctgcggcatctgcccaatcagctgtccggcggccagcagcagcgggtgtccatcggacgggcactgatcaacaacccagccattgtgctggccgacgagcccaccggcaacctggacagcaaaaacagcgccgagatcatcgggcttctgaagatgttccacaaagaataccagcagacattgatcgtcattacccatgatgaacgcattgccctccaggccgatcggatcatttccattgaagatggccggatctccagggatgaggtgaaaatgcaatgaatgtgattcaaaaactcactttgcgccatatgttgctgaacaaacggcggacactggtgacggtgctggggatcgtcatttcggtggccatgctcacggccgtttccaccttcaccggctcctttatggatctggcccgtcgggataccctggcccgcaccggggactggcaggtgaaatatgtggacatcacccgggagcaggccgatcggctggaaaaatccccggacaatgctttggcagggtgccattataatgtgggctatctggccctgcccgacccgggaagggagtccagaccctatctctattggcagaattacgatgaaaacggcttttctcttttgcccatgaagctggaagacgggcgtatgccggaaaaagaaggggaagtgattgtgctttcttccttccttcaggacaatgaacagtataaaatcggcgacaccatccgtttgccccagggcatgcggacgggcattcaaagcggtatgccggtggaatatgccgatcagagccggttaaacccggaggaggtctttgaaaaaagcggagaggccttgtcttttaccatcgtgggcactttttcccagctgggactgaaccggaacgccgcaggctatgaaatctacggtcttttgcagccggaacaggagcctttgaccatgcagatgaaggtcagacaggtgacggcggacattttccagcaggccaaggacaccggcgaggaagcggggctggacagccagggccaggtgtatttcaacaatgccttgctgcgcaccatgggcgtggtcaatgatggcgccaccatgaatactttgtatatcctcatcgccattgtggtggtcatcatcatgatcggatcggtgtctttgatctacaatgcctttgccatctctctttccgagcgcagccggtatctggggatgctctccagtgtgggcgccacccggcagcagaaaagcgccagcgtcttttttgaaggagcggtgctgggggccgtagccattcctgtgggactgttgggaggcatcctgggcatcggcatcaccttttcctgcatcagtcctatgatgcgggagtccttcgggatggaagccgatcttcgcgtgaccatcagctgggcttccatggcgctggccgtggcgctttccgccctgaccatctttatttccgcttatattcccgcccggcgggcttcccgcatttcggccattgaggccatccgtcagacgggagacatcaaactgcgccagcggacggtgcgcacatctccgctcactcgctggattttcggttttcccgccgatctggggctgaaaaacttaaagcgcaaccggggacgctaccgggctaccgtcttttctctggtgatcagtgtggtgctgtttctcaccgcttccagcttttccgcctatctgcaaagggcctattccatgaccctcagcggggtgaattacgatgtgtatgtttcggcctatggggatacgccggaagagacccaggcccaaaagcagcttttcgggcagctggcccaggatgggatggccgatgatgtatccatgagtcaaagggcggaaaatgtccgcattgctttgacgaaagagcagctgacagaggaaacgctgaaccggcttcccgagggaatggaaaaggaaacaagttttgagaccgggctgtatctcatggctttggacgacaaaaccatggaggcttatctggagaaggccggcgttcagagggacccggggcagggggccgtgctggtgaataccgtccagcagcggaaaggctaccagtttgaaaaataccaggcttttcatctggaagcaggcgatcaggtaagtgcagaacagatcaccggttatgacagtgagggcaggatggaaacgggggcctctcagaatatcaccgttgcagccaccaccgatgtgatgccccaggggatgccggaatatctggaagatcccctggccatggtgctggtgatgaaagaagaagccctggaaggcctgatgcaggagctggtctccacaggcggagaggtgggttacagcgtcagcacacagatgttctttaccagccaggacccggatgccttggccgaaagcctggaggagcaggtggcagacagcacccagagcggaatctttatcagcaacatggcggagcagcgccaggccagcgagagtctgaccatcattctccgggtgttcacctatggatttgtggtgctgctggccctgatcagcgtggccaatattttcaataccatctccaccagcatcgctttgcgcaaacgggagtttgccatgctgaaaagcgtaggcatgacgccccaggccttcagtcagatgatgaagtatgaatccctgttctatgggctcaaggcgttgttttacggtttgcccctcagttttttggtgatggtcctgctgtaccgcacggtggaccggaacttcggatttggattttttgtcccctggggaagtgtgatcattgcggtggccgcggtttacctggtggtgggcattaccatgctctatggcagccggaaggtgcgcaagcagaatatcatcgacggtttgcgtcaggaaaacatctgatatgggtttaagaaagttgtaagaattcccgtaagggagctgtaagaaggggctgttatactaaaaaacacaaggagggaacaaagaatgaacattttgattttgacaggaaaatttggtatggggcatcagagcgctgcgttggcgctggaagagcatattcgttcggcgttccctcaggcccaggtccgggtggccgatctggtggaagagactttcccgggaaaaagccgggggatctataagatgtttgccatggtagcccgtcacggcgggccggtgttcaaccgcctgtaccgttctttggatcgggaaggtccggccatgcccgtgccggcccagggcaaattcctcaaagccctgcatcgtctggtaaaggaaacaaagcctcaggttgttctttccaccttgcctctttgcactcgtctggcttcggaatacaaagggaaacagggaggatttcagctgatcagctgcgtcaccgacatccgctgtcacagcgaatggatcgctccccatgtggatctgtactgtgtgccatcccaaaagaccttctgggagatggtgaaaaagggaatcgacccccagcgggtgctggtcaccggtattccggtgcggcctgcgttccatcccggtgaaaaagaggaaaaacgggagaaggaagtgctggtcatgggcggcggcctggggctgatgccggaagatccggaattttaccggaatctggctcggcttcccggggtgcatgtgaccgtcatcaccgggaaaaacaaagagctttacgcaaaacttcagggagtgcatccccaggtggaggtattggggttcaccaatcaggtggacaagtatctgcgccgggccagcctgatgctctccaagcccggcgggctcactttgtttgaggccatggccgcccaagtgcctttgtttgccttccatcccaccttggaacaggaaaaggaaaacggcgcttttttgaaggaagaaaaaattggcttggtgcttccggaaaaccccaaggccatgtcctggctgattgaggacgccttgtgtcaaaagggagccttggaagagatgcgtcggaacatggcccgtttgcaggcgggaatggatctgggaaaattgatggatgttttgcaggctccttctgtacaaaaagctggataaaaacaatgggctcgggaactctcccgggcccattttgactttgttcctccatccggggattttccttgaaaagagagggcaggttctatattatgaaaggaggaaggccggaatggtttagtgaaagggaggatgaacaatggattttgtctgttccaaatgcggaaaaagggtgagcacccgtaccatgcagcccaagtgcgaatgcggcggcttgtgggacctggattttgtgccgccacggttctctccggaagatatcgacagggatgagtggagcatcttccggtatcgcaaattcatggcgctgtccgggaaggcctggagacaggtttctctgggagaagggatgacgccggtgattcctctcacccagaatgtgcttttaaaaatggactattttatgcccactttgtcctataaggatcgaggggcttctgtgctcatggcccactgcaaggagctgggagtgaagcgggtggtgcaggacagcagcggcaacgcaggcaacagcatcgccgcctatgcggcccgggccgggatcgattgcgaaatattcgtgccagaaggcacctccccaaaaaagatcgccatgattcgggcccatggggcagagtgtacggtggtgccgggcaatcgggaccattgtgctgaggtttgccgggaaaaggtggagcgggaaggggtctactacgcaaatcatgtgtacaacccctttttctatgaagggaccaaaacttatatttatgaggtgtgggaacagcttcaccgcattccccggaatcttgtgatcccggtgggaaatggcaccctctttctgggcgctatgctggctctggagcatttgctggaaagcggcgtcatttcccagatgcctcagatctgggcggtgcagagcgagcattgcgacccattgctgcaaggggcggagagaggggaaaaagacccagcccaggtgacgcccaagcccactctggccgaggggattgccatcggtgttcccatgcggggccgggagattctggcgtatgcagaaaaatatccggtgcagttcattcatgcgccggaggacagaatcctggaagcaagggagattttggcccgaaaaggaatctattgcgaacataccacagcagccaattatgccgcctatctggcccagcaggaccagggaaacgccatggaagattgcctgatcaccatgtgcggggccgggctgaaatccgattattgaaagaaaagctccgggtctatggtccggagctttgagcgtgcccccaaagtggcgaaagccactttggggggcgcaaggggcggcccggtgcctggcaggcaaactttctttgcctgggtatatacaatcacccaggacaaagagaggaacgggagcggcggctcgccgcccggagtttttttgcagcatagaaagggagatggtgggaaaagctaaagagaagattgaatttgaacaggcgggcgcttataataggaggaaaggcaaatgcttactctgcaccatgtgaccaagacctatggcaagggccatctgcgggtagacgcgctgcgggatgtggagctgcaggtggacacgggagaatttgtggcggtcatcggtccctcgggcagcggcaaaaccacattgatgaacattctgggctgtctggacgatcccactcaaggggaatatttgctggacggcgtgccggtggggcggttgtccggcagggagaaagctgttttgcgcaaccgggaaatcggctttgtgttccaaagtttcaatctggtgtcctccctcaccgcccaggaaaatgtggaactgcccttggtgttccggggaatggacggagaaaagcggcgggagctttcccggctggctttggagcaggtggggctttctcgccgggcccatcaccggccctgggagctttccggcggccagcagcagcgggtagccatcgcccgggccattgccgctcatccaccgctgattctggcggatgagcccaccggaaatctggaccccccttcggggcggcaggtgatggagcttttgcgccggatgaaccaaaatgggcacaccatcgtcctcatcacccacgatgcccaggtggcggctatggccgggcggcggctgcggatggaagaaggacagctgcaggagcaaaactagaaaaagagaaaagaggctgcgggatggagcggatcgataaacggaattattatttggatatcgccgaaagcgtgctggaacggggcacctgtctgcggcggaattacggggccattatcgtgaaaaacgatgagatcgtggccaccggttataccggcgccccccggggacggaaaaattgtgctgatatgaatttttgtatgcgggaacatctgaacattccctctggacagcggtatgagctgtgccgttcggttcatgccgaggccaacgccattatttctgctcagcgcagtgatatgatcggcgccacattgtacctggccggccgggatatgaaaacaggagagatgatcgattatcctgaatcctgcgccatgtgccgccggttgatcatcaatgcgggaatcgaaatggtggtcaccagagataaagaaaaacacatccgggccgtgccggtgtgggagtgggtggaaaacgacgacagcatctataagctggaagactaggaggaaacatatgctggaatatcgttacgatacacagttgctcatcgaaggggagaacctttcggaggatgccattcaccagtacatcacagatcacattcctggagattgtttgctggccgtgggggatgaaaacctgatcaagattcattttcacaccaatattccctggaaggtgctggagtattgcgccgggctgggagagatcttcgatatcgtggtggaggatatggaccggcaggagcggggcctgaaaggttagaaaaacagcctgacccattttgagggtcaggccggggcgtgtcgaaaaagtggcttaggccactttttcgagtttttgcaaggggctggcggagtgcctccgctcccatactgcgctcccgcgctgggcaggtccgatgcagaaaggcaaagaaagtatggccgtccggccaccggatcagcggggcgccccgcccttgagaagtgtaaaaaccgacgcaccggtcgccggtttttacggattgatgaggggtagggcaagtagttcccccctagctagataagttttttgacagcctgagcctgacccattttgagggtcaggctgtttttatgcctgcttatttttctttttccgacgccagaggaaaaacaggattgccagcagcaggatcaagagaaatggggagaacatcagcagcatcatgggcagataaggattgcgaaaggtgctgaaaatggtctggaaccagctttcgtcaatggtaatttccagattcccttccggaagggtagaggaggtatattggtactcccgctttcccgccttttcaaagtccaggttgctttctttcagcacgggaagggcttcatccagctgcaaatggatggtgaggttcccaaaatccttccacatggctgccggggccagatagtagcggatgcggccatatttggtgttgtaatccagatcgggatagccgcccaggcggtaccgataggaaacgaccacatccagctgttcttccggctggaaggtcatttcaaaagtgatgctgtccacctgttctcctggggcactgttttcttcatcgccaggagagaggacagcatagcgccagtcctgggtggtgatgcgggtatcatagctgatcccataatgttccacagagaagggaacctcctggccgcctaccgtgacccgggtgccgctttcttccacattgggagagagaaacatggtttcggtggttacctcttcctgggtggtgtttttcatggtatagcaggccgtgatggtggcttgggagccctgcacttgaatgtccagtacctgggacaaaactgccagctgctgatttttttcaaaggtgatggaagagcccacatcctctttctgaggagcggccatgttggcctgggcgggggagagcaagaagggcatgagaaagatccaggtcagaagcaaagagagccgtttcatagccatacctccttggaatccgcaggtgggttttattaagaatattttatcatagttttacactaaagtaaagggcgggaaaaaccactggttgcaaccgctggttgacagatttccaccccgcttttgctggcaagaaaccggttttcacagtataatgaggacagaatccaccgagggagggaaagagatgatattggcggataagatcattcgattgcggaaaaagaacggttggtcccaggaagagctggcagaaaagatgaatgtatcccggcaggccgtggccaaatgggaaggggcccagaccattcccagcatggaaaagatcttgcagctgggggagctgtttggagtgacgctggactatctgctgaaagatgaacgggagaccgaagaaacgactggtacagtggcggagacttcggtacggcgggtcacattggcagaggccaatgaattcctggcatggcgggagcgggcctccattcggattgcagcaggggtgttcctctgtattctggcagtggttcctctgctgttgttggcggcctgggcggaatacagccctacgggtatttccgaagagttggccggagtgggaggattgatgatccttctgatgatggtagcggccgcagtggccatatttatcttttgtggttttgaaaacagatcctatgaatttttggacaaggaatttttcgagacggagtatggcgtgcggggcatggtgcagcagcggcagaaggaatacaagaccacctatgcacggtgcaatgtgatcggcgcctgcatctgcatcctttcgcccattcctttatttctgggggcactgttgaaagatcaattctatatgatggttttgctggcggttacctttctgctggtggatattggagtgatgtttttcctggtgcccggtgttcgctgggccagcatggaaaaacttctccagcaaggggattttcagccggaggaaaaggaaaagaatcggacaatggaaagcatctcggggttttattggaccattgttaccgcgatttacctggcctggagctttgtcactggccggtggggaagcacctggattatctggccggtggccggggtgttgtttgccggcttgcgtgtgctgctggatctgcttccttcccaaaaaagaagataaaaaacacccaggtttcgatttgttcgaagcctgggcttttttattgttttgcttcttcggaagcattctggtatttcgcacctagaatttggggcatttcgctgtaatccagcccgcaaagggcacagaacacataacacagcggcagatcttcttcatagaaccgacgatagacagcatccaggaaggacacatagccgtgctccaaggtatcgattcccaaagcgtcggcatggccgtcccgcagggcgtcgcagcgccagtggccggaaaaaccgttcaggtaggtctcgcacagataagcattgatcccttccatcaaatcggcgatcaccttgtcgtccacataggaaagaagctgacgggggccaaaggcttcgcttttcagaagatctttcagctcatcgtgatgcactttaatggtataggtgagcagaagctgcatggcagaatcgtcccagtcatggggcatattggcatctcgatagagaaggcgggtgagtttggtctcgtccagatccagagcgcacagactggtgacaacaatatccagatacagaagattttccggggtatagtccatctcaaagccaaaacagcgtttgcaaagggaggcgaacttgcctgcgtccagatattttaaaagccgtaccgcttgctgctgggtcagatccagctgttccagggggtggcggcgaaaaaagtcctcgctgcggccctggtctactaccggcttgagtatggcaaaaaaatcatcaaaatcagcttgattcatgagagtcctcctgagtgatatagggatattgtatcccttgggaggggaaatgtccagcaaaaagcatgagacaacaaaaaagaccgcttgttcgttttaccaaacaagcggtctcaggaattgtaaatcacttttttccagtcctttctgatttgctctatgtaaaaagaagaacggtgaaaaatgaacaggtccagtaaaaacggacagtgacaaaagaccccctgatgtaggaaaat

SEQ ID NO: 562 - DNA, 4148 bp, Unknown
  16S sequences of unknown bacteria
tcttattattgttcaattttcaaggtcctgcgtcagcctctctcgctgacagcttagttattatagctcattcaccatagattgtcaacagtttttcgcagcttttaccttttttctactttttttacagctttttcattattttttgggctttttgcaacctttttcgcctttttctttcgatttttgtggttttgtcactctttttgttgatttttattccataaatctttttcttaatttttcaattatttttctttcttgtcttgaaatttgcacttgggttttatttaaaattgcccgggtagaggattgtgtttcgtctttataaaatcgcaagtataaaattttcttttcttcccctgtcaaatccgacattgcatatttcaatcccattatattcagcaagttttcttcctcactgtcaacaggtacgtcaaattcattttggccctcatcatcttcaaaagccgatgtaagggacattggcggtgtggcggcggaaatagcctgtgacacatcttccacacttacacctatttcggcggcaatttcttttaaacttggttctgtgccgtttttcctttgcagtgcatcttttgtatagttcacttttatagacagttcttttaggcttcttgtaaccttaataattccgccatctcgaaacaacttctttatttcacctaaaataaccggtacggcatatgtgctgaacttaactcctctgtcggtattaaaggcatcataggcctttataagccctacacagccggcggcataaagttcttcatattcaacacccttacccctaaatctgtttgcgcaggaatgtacaagtcccaagttgctttcgataaattcatcacgggaaatagttttctcattgagagcagatgacataaaaacctcacttagatattattttagtcataacaacccttgtaccctttccgggatttgaaaacacctttaccttatccataaacgcctgcataacggcaaaacccaaacctgcacgctcgttttgagtatcggtagtaaacataggctccatggccttttttacatccgatataccgacgcctttgtcttttacagatataataagtgcattttctttaatgtcggctgttatgtaaatagtacctatttgatcgggataggcatggacaacacagttggtaaccgcttcgctcaccgccgtctttatatcatttatttgctcaatagtagggtcaaactgcatacaaaaagatgacaccgccattcttgcaaaagattcgtttattgattttgacggaaaagacagtttgaatttgttttccgataacatacattttctcctttactttcttattgtttttattcccgcaagagccaatattttagaggactgcctgtccaccgattgcacataaacggaaatatccatagcccggcaaaatttatttcttgcaagtaccaaacctacgcctgacgaatccataaatgttaccccggtaaaatctataacaagaacctttggcatataggaaatcaatttgtcgtctattatatgatttatttttgctgcgccgtggtggtctatctctccggacagctttgccgtcagcacagatttttcgtattcaaaatcaacgcaagtcattatacacgccctttcttttttctttaaaaatataatactatataacataaaaatattttgtcgcaaaaagaaaaataccttgattttcacaaggtatttttatattaatcaatctgtattaaatttattttaaaagcaatcctcttgcctccgaagccagatacagtgaaccaaacacaagaaatcctccggaaatattttcttttgcaagttccacagcttcctccgtgctctgagcaacatacaccgtttcaatttttccctttgccatttccgcaagctgccgagcggttaaagcccttttatttccctcaagagtaactgtgtacagtgtttttacatacggcgctatcatctctattattttttccggttgtttgtctgacaaggtccgccaaacagctgtaagatttttaatgttattttcttttagcaccgctgtaagggcacttacgccgtcagtattgtgtccgccatccaatataataagcggatcttggcttataacctcaattcttgcaggaaacttggtattttctattcccttaactatattatcatcggtaatattaaaaccgtattttctcatggctttcattgcctctataactaccgaggcgttgtaactttgatgcaaaccggtaaaactttgatgtatttcaaaattttcataaatcagctttgtttgcataaatccttcatttatgtggataatatcgtttttgtttggcacaatcaatgttgcgtttttctccgctaccacctttttaataacatctaatgcaaatttatcctgtgccgggtaacatacaacatcctgtccgggttttattattcccgctttttggtaagctatttcttccaatgtatcgcctaaaatattttggtgatcgtagcttatattcataatacaacttacaaggcttgtttttataatatttgtactgtccataaggccgcctattcccacttcaaggcagactatatcgcatttttctgcggcaaaccaataaaaagcaatggctgttacaatttcaaattcaagaattataagtccgttttctttttctattttatcccgatagaattttactttctcggtaatttcggccagtgtatcattcgggatatattttccgtttatggaaaatcgctctgtaaaatcaataacaaaaggcgatatatttaacccggtcttatacccggcggttttcaaaacattggcgcacatggcggcacagctgcctttgccatttgtgccggcaatatggatataccttaaatcatcctgtgggtttcccaaatagtccattagttttctcattcccgcatggccgtctgcgtttttcaaccttggacgagaatgaatatagtttaaagcctcatcgtatgtcattttatcctccaatacagtgttaaatttattgtatatattatatatagtatttcttgcaaaaacaagataaaataaaaatcggctcaaataaaattcatattataaaataaaaagcgatattcaatttcttgaatatcgcttttggtgccggtggtcggggtcgaaccgacacggtatcactaccacgggattttgagtcccgcacgtctgccaattccatcacaccggcatttatctgacagcttttatatgatacaccacaaattgcattttgtcaatatttttttgaaaaaattttttaaaattcgcaaaaattttgccgttcttttcttgaaacaaaaatacaggcgactgttacatcgcctgtatatttattttattttacgaaagctgtaccaatgcctcggcaggcaggcaggctataaaggcgcatacagcgtcttgtatattctgtcgttccctaaaaagtccctgcaaagacggatttacattttcataatattttttgtaagtttccacaagcttaacaccctctggggtgaaactcaccctgccgtaaggcgcctttgatataattccctgttttgaaagagaatttaccattgagtgaacacttggttttgaaacattcaacctgtttgaaatatcaacgcatttaaccgctctttctccggctcctatttcgtatatggtaaacaaatatttaagagccgtaccggttatgcgtgtattgtttgtattttccatgtgtatcaccgatgtttgtgggacgaacaatgtccgcatccgccgccgcaagcagagcaatttccgccgcaaagacttttaccgcttttcaactcttttaacaaatacctgattatcgcaaacacgattaagccaagtataaccccaacaattaaagtgcccatatttcacctgcgatattaaatcgcttctcctttattctgaatatttcttttcaggtcttacaagggcataaatcaatactgccaaaacagcaatacctgctacggtgcccactgtaaagccccgtcctgtgaacaagctgccaagctggtaaactataagtgcgattgcataagcaaatatacattcgta

SEQ ID NO: 563 - DNA, 3891 bp, Unknown
  16S sequences of unknown bacteria
agaggctcagacgcctgccccttgcacttactatgtaagtgcggagttccggcttgccggtttcgtgcagtcgagcaattaactttggctgtcgcccccgtttacttccggcgaaagggtcttcttagattttggctagccgccggatttataccaaaggtattttgtagcttgtagccttgagaaagccgaaattttagcactgccaccagtcttgttaggcttaaactgtaagttcagttcgatatctgctgccgcactggattgattcaacgttcgctgacggaagcaaaacgaaattggacgttcgctgcatttcaacgcacaaactcccgacaatccgcggttagcctaatcaattcactaatgatttggtattctcccatacgcgcgatgaagaaaggaatgatttgtacgaactccccgcgtctaactccaccgcgcgaacatgctaatgccactactaaggcttatgtgtacccgcgcgactgatctgttaacgggggcgacaccagtagagtatggtttaaaccgatctccaccgcgagccggaactcacagaggtgcggcgtttgatgcatcagaacgagcttgctcgttagtgcgcacctccgcgtaggagcgtcccctcaccgcagtgagatataattaaatcgaaaagacggagtcttttcttcttctcagataaggagaacgcatattttgtgtgttcttttcatacttttctataaagaaaaattttcccatcgcggaggtgctttcccatgtatttccagaaatacgaagcctgcggcaacgattacgtcctcgttgattcaagcgtctgcggtgaactcgattggccgcggctcgctcaagagatttgtaaacgtcgcttttccgtgggtgcggacggtcttctcgtcgtctcctctgcggatgctgatgtcgctcacgctcagatgagaatattcaattccgacggttcggaagccgatatgtgtggaaacggcgttaggtgcgttgcgaaatatgtaatcaaaaacggcgataagtacggtatttcggacgttgattcatcggtttcccgcaatattcctgctatagtgaaaattcagacaaacagcggcgtgaaggctgtgacatggcttaagagctccggcggcgagtgcttttccgtgaatatgggctccgcacaggtcgggaaacgattcactcttgctgtgctcgaccgcgttttttcggttattcccgtggacgtcggcaatcctcacgccgtgatttttctggaagaaagtgttaatgacttcccgcttgaaaaatacgcaccgcttattgaaaacgacgccatgtttccaaataaaaccaacgtggagtttgcttttgtctcttcgcgggatgaagttgtctccaaaatatgggaacgcggggtcggggagactctgtcctgcggtacgggagcctgcgctgtttttgccgccgctctgtctctcggggttgtcggaaaccgcgctcggattgttcagccgggaggaacgctttttacgtcttctttcggcagtgacatcttacttgacggtgaagcgcgtcacgtttacgacggagaatacatttctattcatttttaaggagtttttattcgttatgataaagaccgagccgaacattaacctgctctctctcgagggggactacatctttgtcgagactgcgcgggcaatacgggagtttgaaaaggagaatccgacgcggcgcattataaagctcgggataggcgacacttgcctgcctcttccgaaaattgtaacctacgccatgatgaaggccgctgccgaaacaggcgagagagctataggttatcagccggaatgcggcagtttttcgctcagagaaaaaatctcggagttctacggacggcgcggaatttcgttctctcccgatgaattttacgtcagcgacggggcgaaaagcgacatcggaaacctgtttgaccttttcggagacgtgccggttgtgatgcagaagccgtactatccgccgtatctcgggaatgttgtaatacacgggatgaggtgtatttttattcatgcgaacgcgtcaaataattatgtcatgtcgcccgatgagctgaaatcacacgagcctgcgctcatcataatctgctcgccgaacaatcctacggggaaaataatggagcgggatttgcttgaaagctggcttgagcgtgcggtgagggacggttcgataatcctctttgacgcagcctacgagtgctttgttgagaacgggtgcaggagcatttacgagataaaaaacgcaagaaactgcgcgattgaggtggcaagtctgtcaaaaagtgcgggatttacgtctctgcggtgtgggtggtgcgtcattccgaaggagcttgaattcgctgagaaaaggggaaatatcggcaaaatatggaaaaggcggcagagcgaaaggttcaacggcatctcctacgtaacctcaaaagccgcagaagccgcgctgtcggatgatggagttcgcgcgtgtcgggagaatatttttgtatacaagcgaagcgccgccgaaatctgccgttttctcagagaggtttttcctgaaattggttttgtcggagggcataattcaccgtacatctgggtgaagctgccaaatcggttcaaggattcacgcgaggcgttccgttatcttctggaaaaatacggtattgctgtcactccgggatgcggattcggcggcgagggatatgtgcggataagcgcttttgcgcccgaggacgacatttttgaagctgaaagacgtatgctcggtcgttcatatgattgacttttagcggtttttttgatataatataggaaaaataatcgaaaaacaggtcgaaaatcaaatgaaaattctgagaaacatgctctccgtgctgcttgttgtcgtgatggtcgtgacgacggtgtattccgcggtgcttttgacagtgcgcgtgaccgtgacggaaaatctcgtgcgggaagtagccgaaaacctgaattacgccgctcttcccctccctgacggtaacgaaaacggcggtacgactacgataaccgaggtgctgaactcttccctttcgtcactcgacattaccatgacggaaaacgaagtcaacgacgcgcttcgctccttctctgtaaacaggattatgtcggatttagcggcagaaacgcgcgaatggctgctcggagacggcgcggaacccactataagcagtgccaaaatcgcaaaaaccgtagccgcgaatatgccggaaaacctgagcggacttctctcaatgttcggaaatcccgaggaagtgctcgcagaaatgctgtcggaatacacgtcgcagctcgatttgcacgaatatttcgctaagctcgaaccgtacagaccgtttttgtcgcagggagcactctatctcgccctgtccgcgacgctactcattgtgatgctcgtgcttgtgtgccaaaaaatgcgcgtcgtaccgtggctcgtgagcgtaggattgggaatttttctcagcggagcgtgtggaattttcctgcggtactacctatcgggagtgcgggagcttttcgtctcgccggtgtacgagtttaccgcacccgtccttgccgcgctcttcagaaacgctgtcatcctcacggcgggaggacttgcagcagcggtggtttcggctgtcgcgggagcgttggtttcttccgtgaagaatgcaaactcagacgactaaagccttctcagagacttcccttgggaagattcacttaagttttaagtgagaaaatagaagaaagagcttcgccctttcggattcattaaatctcactgcggtgaggggtcgctcctacgcggagggcgcacagagggattcaaacgcctgtcccttgc

SEQ ID NO: 564 - DNA, 4634 bp, Unknown
  16S sequences of unknown bacteria
tgtgccgggcagtcgctgttttgacagcgttttgccgcttggtctccctcaaaaaagacaggtgaaccgcaggccggacagatgtcggggatttgatacacaggattctcatgtccgtgagaaacgactccaatcacttcgggaataatatcccctgctttccgaaccagaatcgtgtcgcctatggcaatctgtttttcatcgataaacgcctggttatgcaaaaccgcccgactgacagtggtgcccgcaagactaatcggctcaaataccgctgtcggcgtcaacacgccggtacggccgactttgatttgaatatccagcagtatggtcggcttttgttccggcggatatttgtaagcaatcgcccatttgggatatttggctgtacttcccagctgctttctttgcgaaaagctatccaccttaacaactgccccgtcaataccaaacgagtagttttcccgattctctccgatccgttggatttcctgcatcaccgctccaatggaggaaaaagtctgataagatggagaaaccggaaaacccagacgttggagaaaatccaaagattctttgtgtccggttagatctttaccttcaatttgctgaatattaaatacaaaaatatccaaatttctctgcgccgctatagcagggtctttctgtctcaaggagccagctgccgcatttctcggatttttaaagggcttctcttctctattttcctgctcttccgtcagcttttgaaaatgttcttccgacatataaacctcgccgcgcacctccaaaaaaggaattgcttccggcagcttttgaggaatgctctgaatcgttttcagatttaaactcacatcttcccctacaaatccatcgcctctggtagagcctcgcacaaaaatgccatcccgatattccagcgataccgataacccatcgatcttgggttccaccacatataccggatcggccaccaattcttttacccgctcatgaaaagccaatacttcttccggagaaaaaacatcctgcagacttcccatctgcactttatgctccaccggctcaaaagtatttttcacccgccccaccactcgcctggtcggagaatccgcatgtgcaaactgtggataagccttttccaaattcattaactggtgcagcagttgatcgtattcatagtcttcaatttccggcgcatcctgctcataataacaccggctatggtacaagaccaactcagtcagacgatctatggtttgctttgcctgtttttcatccataataggacctccgtataccgtgcagcccctttcattttcataccggcaacacaaatcaaccccattctgcgggaatttctgtttcaaaacagtcacattcatcttgcatatccgccttcatctaagccgctgatacgtccggtctgtgtgcctgccttttgataaagccgttcggggtacacctacacaatgaatttattatagcatattttgctctatttccaaagcctataagcaactttttgtgatatctcggaaaaaactgaagtttctatagaatccatatgctcccccacattttaaagacattcaaattcaaaaggcaaagaaacggtcatgacttccgaaagaaaaagcagggaaggcccctgcttctttgctgcccagtctttcggcgcgtccgtattcctgtctgagtatacaaccggtcttatttactcgccccatacttaggatgtcttttccaccattttcttttccaacatcctggcaatagaacgaacggttttccattcttccggcggcacctgagtaggttgaatctcaatcctccagcgaacggcaatctcctccaatagcgtgataaatgccagcgaatccaaaatacccgactccaacaactcctgctccggaccaatgttttccccgttatttccgatatcctgaatcaatttcaaaatctgatcttccattggcaatctccttcaatcgtttccgatcgcactttccgttttcagtaagtggaaaatttttgatcaactgaatggacggacgcatataatcagggagccgatgcgccaaaagcgcctggatttccgctcgtgttggcggatcttcctgttttggaatgacaaatgcaatcaatcgaagcgcccttcatctgcccgcttcccggcacacgacaacagcctgatcaacacccggcaaagcacacaaatttttttccacatcctgcaattctatccgatatccctgtattttcacctgctggtcacatcgtcccgcgcaatacaaaactccgttctgcatccagccgatgtctcctgtatgatagcttctttttccttccaatctgccaaatgcatgggacggatcttctaaaacatagcccgccgcgacactgtctcctaagatgacgatttctcccggctctccatcttctaccgggaccttatttttttcaatgcgtattttcacgtctgctttcggttttccaaccggcaaaagcggcaattttgcctcttttggcccaatttcagcggccgttactgcaaccgtacactccgtcggcccataagcgttgagaattcgtataccgggaaaacgctccagaagcttttgcgctgtcccgggaggaattttttgcagttctttcccatcagaatctgacagcacctgatatacgaagctgtttcgataatagccgtctgtctctttggtataatgatgattctcttctttcagtcgatatcgttctttcagcgcctcgttggaacgaatttctcccatcagcataccgtcttgcagccaaacctttatctgcacaggataaggcgtggtattttgaaaacggtaatcacagtttttataaacaatggaggttcccgttccaaagggaactcgccgaccggcatccggaaaaagtgcgtcggtatggtgatgcagttcggtcactttcatcggcgtatgtaaaaccatatagtggattaaattggcaagctggcacaatccgccagcaactccccttcctaagcggcccctcgaaatgaccagcccgtcgaggtatccttttcgcctggtcggccggccaaccagagcccacaatgaaaacgtttcgccgggggtaacaaccacgccgtcgatctgttttgcggccagacgaagattttgcaccttgtttcgttgtagctgcatatcgacccccgccaacggtctgagcatcatggacatgtggcctttccacacgtaagggagtgttttttcctcgaaattttttgcgaaatgacttctgccaagccaatcccggagagtgcgtttgcaattttctttccaaagggaaatggcatagcatacagggccatgctcgcaaaacagttttctgcgttttttcacccaatcacacacctcccacaaatttttcagcttttcatcacataatgcaaaaactctccgacaaatgtaattatttttattatatcggtttcttccagattgtcaagcgccggccgttcctcagccaattccaatatttccgaaaaattccggtacttctcccacgataacggtttgtcccaactccatgttggtcgatacttttgtctgcatggaaaagcccggcaataccgccgaaatttccatgtcgatctgcaaataaatccggtgaagcgtctgattgacacctgcctgggaaaattcatgatataaatttgtcatgaccactccttccggcatcagacgaaaggaaatagacggtccccttcccgagaagatttttactccggtcagggaacccaacggaatcgataagtcgtgggaggacaaatcctgtaatcgttcccccacttgctctgtaaccgcacttttaatttgattcagcagcactgtatccgcttgtaaagcagtcactttcccagttccatcccgtgtcagccgcaccatttgatgataggtaacccccatgcgctccagctcttcagccactgcctgattgactgccgccgtcaccagtacccttgcttgataagaaagtttttcctcaatcgtcggagtgatccaggagcgaattcccaaaattaaagaaaggagcagaaaaaatagacccgcccggaaaaatatttttttcatttttcttcttttcgcccgcagcatgttcccactcccttttttcagtatatgatgtcaacggcgctctgtgtcttattttcacaaaaaaagaaaacgctttcgggtgcggtccaataaaacagtatattgtttcgggaagcggcatgagtaatcatgccgcttttccgttcataacgtcatagagtaaattggcggggagtatgccgatatagttgtagctgattgtcacatcctgcactcggtgtccgctggacttgtccggtgcatgaacatatacggcattgaccatatcgttcagaatagtgggcgtcagcttttccaagtacaggtatttctttgcctgtcggataaacctatcaacattctccgcttgatcttcttgattctgtatttcgttttcaagcatttcaatcttggctctcaggtctgcctgctcctgctcataatcatcagataacatctgaaaacgagcttcggacagctttccgttgaccatgtcctcataaa

SEQ ID NO: 565 - DNA, 2661 bp, Unknown
  16S sequences of unknown bacteria
aatactttatagagttcgtagttgatatccattttattagtcttccttatgaaaattgtgtattcttagtaatgataataatagataccactgcttttttcaagcgattcagcggataaaatacaaataaatagcaacttctgcgattaagatcattggcatgccgatcacaaagtaccagtgacgggtcttatgatggaaaaagtacatgccgataatggctccggcgccgcctccaagcagtgcggacaagaataaagtcttctccgggatccgccacaaatgccgttttgccttggatttgtcaatgcccatcagcgcaaatgcgagaacattgatcacgatcagataataataaaatagatgttccatagataaaaattgcctttctttttttcgggattgcctgttcattgtaacatggtttcatggtatagtatacacagaaaagaggaactatgaaacaggaggaaaaagcatgggtgagatcctggaagaatttatcagcggtttctgccggaccagcaacgagacgcggaccatctgctgcgaatatgagcagggggacgatggaagcgtgacgttgacagaatttgactgtaatccggagaaatgtcccaacagtgcagcgtgcaccatctgggaagaggcaaagagcagggagagaaaggggtaactatggcaaagagaatgttggactgtgtcacatcagattttgtgactttcaaaaaagaggactggctgtccagtatcagcggaagcgaagggcgtgtgatcgcctgtgagagcatcggaaccgtgcttcccatgcttggaaatattaccaatgcagagtttacggcatccatgggagcagatattctgctgctcaacatctttgatgtgcaggatccggtgatccagggtctgccaaaggtgaagccggaagactgtgtccgggagctgaagcggctgaccggccgcatggttggcatcaatctggaaccggtggaggataacgccggtggagaagatccggataatatgtggaaaatgtcaccgggacgccgggcgacagtggaaaatgcagtgaaagcctgtgagatgggtgtggacatgatcctgcttaccggaaatcccggtaacggtgtctctaacggagcgattactgacactttgcgtcggctgaaagcggcagtgggagataagatgatcctggcagcaggcaagatgcatgcgtcaggtatcccatcggaggctggcgagcatattgtaacggcgcgggatgtggaggaatttatcggcgcaggtgcagatattgtcttattcccggctccgggaacagttccgggcatcaccatggaatatgtaagaagcctggtcaaagaagctcacagcagaggcgtgctgaccatgacttctattggaacctctcaggagggagctgatacggagaccatccgtcagatcgctctcatgtgcaagatggcaggaacggatatccatcatctgggagactccggctacaccggcatggcactgccggaaaatattctggcctattccaaagcaatccgcggcgccagacatgcataccgccgaatggcatattcggtaaatcgataaaaacattacaaaagattatgaatgaggaaaactgatgaagagagaagaatacaaaagagatctatggcaggagtatgtggaaaatgcggattatattgaacgggtatggaaagaaggagtcatagactttggagaaaatttcctgaatggaaatgttacctttttgtatgaggtatatcaggcatttatcgatcaggagcgttttcggattgatgaacagcgtggaattgaatatgagaaagaccaggatttgtattttatcagatatcagggcgaagagtggagttttgaatataagcctatgaaagaattgctggagcgctcaataggaatttttgaggacatgcttcctcttggttcggtagttgacctgaaaaaagaatttcttcagaaaggatcagaggtggaattgccggatacgattcgcatggtaattgttcagaggtatgtaggagaaagtccggaaggtttttattacccatatgcaggtgcagtgtatcccataggaaatccaggaaatacaaaactgttggaattcacaccggcattgattcagacagtggtcagcaggggatattcggatgaacaggaagaggcatatcagtatctgatgaaacaggaagtattcttgcatcgagggctgcattcaatgggatttgcagatgaagaagaacggagtgcatatcagaagtttgtagagcggagaggataaaatggaactgttacaggttgatattgatgaaatgaaagaacacttgcagacattagaaagcgagatcgaagagttcagaccttttgtggaaaatggatttgcagatgagataacaatggttcaggcgatgcgttcggattttacaccggcattggaagatattctgaaaaatatctcagataaggatgcagtgaggcttctggaaacattggaaaaatataaaaatgcagcgatgttcattgtagaatctctggagcagacactggatcagaatatggcagatcaagttggaaatacagggaaaagcagatgaagagaaaactgaagattacctatggccagtt

SEQ ID NO: 566 - DNA, 7664 bp, Unknown
  16S sequences of unknown bacteria
gaaaatatattctggccgcaatgggactactgggacaatattacccggatactgctcttcgcattatgaaaaaaggactggccgaagcgactgaataataatatggaggtaaccccatggatatcaaaaacaaacgcctgacggatgacgaattttacgaaatccgcaaaacaatcctcaatcaatggcccactggcaaagatgtggatttggaggaagcctttgcatttcataaatccctgccggacagcaaaatttttagtaaaaaactcaatgaggcaaaagccaaccggactaccctggttcagccccgtgctggtgttgcgctggtgcagaaacacattgaacttttaacctaccttcaggataaaggcggcgcagacttgttgcctaccaccattgacagctataccagacaaaatcgctataaagaagcagaggttggtatcgaggaatccattaaaaccggtaaatccatgctgaatggtttccctgctgtcaaccatggagtagcagcagtccgccaagtcgtcaatgcaattgatgtgccgttgcagatccgccatggtacccccgatgcgagattgttgactgaaattgttttcgcgggcggctacaccagctatgaaggcggcggtatttcctacaatattccttatgccaaaagtgttccgctagagagaaccattgccgattggcaatactgtgaccgtttgactggtatttatgaagaagcgggtatttctatcaaccgggaaccgtacggcccactaaccggcacgctggtcccccccagcatctctcacgcggtggctattatcgaggctttactggcagctgaacagggcgtaaaaaatatcacagtcggttatggccagtgcggcaacctgattcaggatgtggctgctattcacaccttggaaagcttgacagaggaatatcttcacaaatacggatataacgatgtggtcgttaccaccgtactgcatcagtggatgggcggtttcccgcaggacgaggcacaagcgttcggcgtaatttcctggggtagtgccgcagccgctctttcgcatgcgaccaaagttatcgttaaaactcctcatgaagcaatgggcgttcccactgccgaagccaatgcgcaaggtttacgctgcaccaagcaggtcatttccatgctgtgtgatcagtatgttgatgagaactctctgaaagaagaaaaagaaattatcattgccgagaccaaatgcctgttggataaatgtttcgaactgggcaatggagatattgcacttggtactgtacgcgcattccaggcaggcgtactggatatcccctttgctccttcccgctataatgcaggtcaaatgcttccggtgcgggacaataacggggctgtgcgtattttgaccatgggtaatttgcccttcaccaaagaattggtcgactttaaccacggcaaaatcaatgagcgggctaaatttgaaaaccgtaaggcttccttccagatggctattgacgatgtttacgctatcagcaaaggcagactggtcggcagacccagaggctaattgtaaaaggagtgtcaattatgaaaattaccaaagttatttgctccaaaggcagaaccggtttcttctttgatgatcagcgcgccattaaaaaaggcgctgtttccgacggcgctgcttatgttggtgatccggtaaccgacggcttcacttctatccgccaagctggcgaagctatttccgtcatgcttgtgctggaagatggacagattgcttacggcgactgtgctgctgtccaatattctggtgccggcggccgtgatccgctgtttctggctgaggatttcatcccggtaatcgaaaacgagattgcccctatgctggtaggacaagaagcagacaacttccgtcgcttggcagaaatgattgatcatccggaaaaagcgggcaaaaagttccacactgccattcgttacggcgtaacacaggcaattctggatgctgttgctaaggcgaaacatcaaatgatgtgcgaagtagtggcggaagaatacggcaccactgtttccgataaggaaatcccgattttcactcagtccggcgacaatcgttatgaaaactctgataaaatgatcatcaaacaggccgacgtattgccgcatgctttgatcaacaacgtaaaaaccaagctgggcgaacacggagaattgctggaagagtacgttgcctggctgcgggatcgtattttgaaactgcgcactcgtgaggattatctgcctgttttccacattgacgtgtacggcaccatcggcgctgcttttggcaatgataactttgaggcaatggccgattatttggccaaactggaagaaatcgcaaaacctttccacctgcgtattgaaggccccatggatgttgaagaccgtgagcttcagatgaaagcgctggccgaattgacccgcgtagtagacgagcgtggtattcatgtagagttggttgctgatgaatggtgcaatactctcgacgatatcaaatattttgccgatcataaagcaggccatatggtgcagatcaaaactccggacctgggcggtatcaacaacattgccgaagcagtcctctactgcaagaaaaaaggcattggcgcttaccagggcggtacctgcaacgagaccgaccgatctgcacaggtttgcgtcaacattgcaatggcagtacagcctgatcagattttggcaaaacccggcatgggtgttgatgaagggtatatgatcgtttataacgaaatgcagcgcattctggctgttcgcaaagcgctgaaataaggaggcgttcatcgtgaaagaggaattccgtattttatcaaccactgctattttgggttatggttttcccaaagagtcctttgacgaaggcatgaaacgcaaaccggatctgattgcagtagacgccgggtctactgatcccggccccttctatctgggcgagggcgtttcctttaccgaccgcggcgcggtaaaacgcgacttggaaatcatgatctgtgccggtgtgaaagaaaacattccggttgtaatcggaactgccggtggttccggtgcaaaacctcacttggaatggtgcgccgacatcatccgcgaaattgccaaagagcatgatcttcattttaaaatggcaatgatccatgcggatatggataaggaagaaatgaaaaaagcactgaccgagggaaaaatctctccgctggagccggctccgcagctgaccgttgaggatattgacgccactaccaatattgttggccagatgggcattgagccgatcatgaaagctctggacagcggtgttcaagttgttttggctggacgcgcttatgaccccaccgtgtttgcggcccctgcgatccgtaaagggtatgataaaggccttgcgattcatttgggtaaaattctcgagtgcgcttcgatttgtgctgttcctggcagcggttctgactgcatgtttggttatttgggtgaagactatttccgcgtagagcctttgtcctctgcacgtaaatgcaccactttgtctgttgcggcgcatacgctgtatgaaaaaaccaatccttacatcctgcccggccccggcggccatctggacttagccgaaaccacctttgagcaggattcggaaaatacagtaaaagtaaaaggcacccgctatgtaactgccccccaatataccattaagttggaaggtgccaaatgtattggctaccgcaccgtttctgttgccggcacccgtgatccgatcatgatcagcaaaatcgatgatatcgtcgaaggcgttcgtgctcgtgttgcagacaactaccgcgataagggctacaaatacaatctgaatttcacgatctacggtaaaaacggtgtcatgggcgacttggagccagtcaaagacgcacatccgcacgaattaggcattgtcattgaggttgtagctgatacacaggagcaggcagatacgatctgcgcttctgcccgttccaccatgctgcactatggttacgaaggtcgtcgtgctaccgctggcaatctggcgttccccttctctccgagcgatttccacgccggtcgcgtttatgtattcagcatgtatcatatcatcgaagtagaagatcctacttccctgttcccgattgacattgttacactgtaaggaggagcgattgctatgaaaaccaaactgactgatatcactgatgttgtccgcagcaaaaactccggcccttatgagttgacgctggacattatgttcaaaaccttcgaagattttgaaaaagtttgtgccgccaaagcgatcaatgaaaatttgatttgtgatctttacaaaattacgccggataaaatcatcaatatcattgaattcaaacctgcaaaatctatcaaggttaccatcaaacgccccatttgttctggaaacctgggcgaaaccgatgtatacggagcacagcaacatgcgccgctgttagacattgtgctggatatttaaaagattgctggacattatctgtttttgcctctaaaataaaggtgggcagtttgcccacctttttcgttacaatttaaattttgacatttctgaatcatcaactgaaaaaaggaggtttttatgccttattctgcacgtatgcagcaaagtcacttatacagcgtttattttgcgccccgtggactaaccagaatggctgatctggggatgcaaattgcacagcagtacctcagtccgttcgataagcttatcggcatcatcggagaagccggttccggtaagagcatgctggtcaaaggtatgtttcccggcctagaactgaccaatgacgatgaaggcgtaaatgttcgccctcttcctattttgcatctggataccggcgcattttatagtcctcatacttatcatttggatattcgttttgaatctgcttttacccaaatgtggcagctaaaagatgcgattctggaagcaatcgatgccgggaaaagagttgtagtggagcattttgatttgatcttccctattcttggtgtcaatgcccatctgctgattggagtggggagcgaaattatcgtcaccagacctaatatgttcggccctgaacctcaagacattgctgatagtgtattccacaccatccacgatcgaaagatggcccattccgcagaggacttgtgcggccatatcttagaatcccatggtatcaaccggtttacccaccgggatgtcaagcatggttttattctggtattcgacgaaaagcctaacatcgacctgatggcactggaaatggatgcgaaagcggcgattcaaatggatttgccaatttcatacgtagatgacaagcatatttctatcggcgacgatatttatcattgcaccgggccgcgtatgcatatcggctctactggtgacattaaaaattttgctttgctgcatgaatttatggaagatcccattaccaaagaacattacctggttggggttgttagctccaaaggtgaactgcgcgctaacgatctgaaccgaattcacgtggaggactaaaaatggaacccaaaaaaaataaattcggtttaattcatatttattgtggcgacggcaaaggaaaaacaacagcggctgtcggcctttgtgtgcgagcttgtgggcgtggccgcaaatgtctttggacttcttttttaaaagattacgactcaggtgagttcatgggaacaaccccattcaccatttatccgggcgaacctgtgcggcaatttgtttttactatgaccgaagagcagaaacaagctactgctaacgagcatacccaaagactcaaggccgtattttccaaagcagagcaagaaaattttgatctgttggtgttggacgaatctatcgcttcttgcaatttaaatctaattccgacggaccttctggtgcggcttcttcaaaagaaaccttctcatctagaggtcattctaaccggccgcgaccccaaaccggaactgatagagcttgcacattatgtcagcgaaattcgtcctatcaagcatccttatgacagcggtattcccagccgcgaggggattgaaaattaaaaatcaaaaatttcagtataaaaaatggtcttcactctaagagtgaagaccattttttgatatgccttttaaaaggaatcaatcgtctaaactggcaaaagcttcttcatccactttatgatggagtgtttccggaagactgaaaagcaaaggcaaacgaatgcagatctcgcaggcaatataaatgatgaaaatccactgccctcctagctgatcgtagataataccgcctaaagcagccattaaagcgctgaacatggaactgaaaaaacgcacaacaccaacccagcgtcccattaccttatgcggtactagctcattttggatagacgcagccaaaggccctccgatttcctggaatccctgtaaaataccgactatcaataacataacaggatttttagttgtcacaagcaaaactagcccaatcaagtacaagacaatggttaacgttaatatcttcttccggccaaaacggtcacctaaaacgccaaagaaatagccgcatacaactgaggtcaatgctgttgctgtgaccatacccgacaatgtagctacactggcatttttagtttcagcagcaaaaagctgtacataaggaatgaccatggctactggcatattgcctacaattgccatgaaaatccacttcacacagtttttatctgcctttaaaatagcaaccgcatctttcaaaacgttacgttttacattagaattgctagtggtccaacgggaaaaagacagtttaaatactacaacgagcagagaaatgattgtaatcgtcagcgtaatgaaaaatagtgggcgaatactgttgggatctgtaggagtatcttccacacccataatactcaccaaaaaccaacccgaaatcatcgggccaaccattcctaaaacaccggcggccaatgactcacagacaagcatgcctttcgctctgtcacaattggcaaggcagttaccgcagatagtagcacagctctgtccgccgacacctccgcccaactggtgtaaaaacatgcccagtgccgcaacctgccaaactggggcagaagcgaaagccaaatatcctccagcgaggattagaataccgacaatataaacctttttcggaccatgacggtcaataacctgtccaatataaggtccgatcaatccgctggcaatcagccccaagcttgttacaaaacccagctgcgtcttagtcgcacccagaagaatgatataaagcgttaagtaaggcaatataattttgtagcccagtcgctccaacgatgttcgaataacggtaattctccagtctttccgctgtgctttccaaaatgcaggaatattaagcgcagtcgttgtttgattttgtgtcgtatcagtttccatctttctcctctttccatttttatttcccaggttcccaggacaggaacagcatcaaggacctattgacttataatatattatgataagttatttctcttcgtttgtcaattattaatgtacatttattctattttaaattattttcaaatttatgcattat

SEQ ID NO: 567 - DNA, 25764 bp, Unknown
  16S sequences of unknown bacteria
gggtaataacccaatggttggtgcaaccgttgcttgcgcggttgcagtgtatgagtcaataaaataatcaaaataaaaaagctgctcatttattatgagcagcttttttattttatctgatttagatataaagagttgccttggaataacatacagcagaaccgccaatatttacacgatttcccaagttttcgcaatataaagtgccgcctctgggagaaagttgttttgcaatcatttgcttcttttgcagtctttcagaccagaaggggatgagagaactatgagaagaaccggttacagggtcttctgccacaccaacgtttggcgcaaaaaagcgtgatacgaaatcacaagagattcctttggcagttaccgcaatgccaacaatatcttttatggtactcagtttgccgatgtcaggctgtatcttttgtaccgtatcttcgctttctaccacaacaatcaaatctcgggacagatgcgtttctaaaacggaacagcccaaagcggtttccaaacctgcaggcgttataatctgtttcggcatacgactgggaaaatccattgtataaatatcgtcctttttgtttacagttaatgttccgctcattgtttcaaaggatacagcgttgcaatcaggatttacctcattcatccaaacaaaagctgctgccaatgtggcgtgtccgcacaaatcaatttcagattttggtgtaaaccaacgcagtcgtaagagttttccttcctgaaaaacaaatgcggtttctgctaaattattttcgaatgcaatttgctgcatgatttgttccgaaagcggggtttccaatatgcatacacctgcaggatttccatgaaacaatcgcttggaaaaagcgtcaatgacgtaatatgatatcataatagtacctcttttttatccacatatggtatctgcagcttccgtcaaacagctgcagatttttaaatgaggatatgctttcaaatcctcagctgtatctgtccctgttgtaaccgcaatcagtgcaattcccgcgctttgcgctgtttttgcatcaataatgctgtctccgatatacaccgtgttctcaggttttgattgaagttgctccattgcctttaaacagccttcaggaaagggtttggctatggatacatcttcgccgccgatgacagcgtcaatatagctatgcaattgaaatttttcaatactttcgttaatacgaaaacgatatttattcgatactatggcaatttgacagccggtctgttttaattttttcagcacagcaatggtgtcgtcaaataaaactgtattcttcgtcataattgcattggaactggttacaaaatagcggcgaaattgctcttgcaaacggggatcttgcagtcctgttaatgcagtaaacgcagcttttaaaggcataccgattgttttcttaatggaagcttcttcttttcgttcaatatttaagcggtcaaacgcgtagtgaaaactgttaacaatacctacactggtatctgcaagtgtatagtcaaagtcaaataatactgtatgaaaatgcatgcaaaaacctcctgattggtcatttttatttattttactatggaacagaatgtgtgtccagattttaaaagtaaataactgtaaaaattcgtggcgttttatgcagttttgttgtaaaataaaaatataagattgattgaggagaggacgggattgtttgtgaatttgacagaagtattgtacgataatttaatggaaagcggctcactggaattaagtgaaatgacattaaagcgcaaagccgaatgtgaagaacttcgggaagagattttccgtcatggggatgaaacgaccaaacaagcggtggtggcttatgtagaggctattcgcagatatgccaaaagctgccatagagatggttttatgagcggatttcaagttgcagcaaaggcagcggaggaagcgtaaaagagcagcaaaaaagcagggtatctatttttagataccctgctttttattattttatttacgcctgaccgtcacagcccaatacatttttaattttatgtgcaaccatttctttaatcgcagtacgtgcaggaccaagatattgacgtgggtcaaagtgttccggatgttcgttaaagtatttacggatagtacctgtcattgccaaacgcaaatcggagtcaatgttaattttgcaaactgccattttagcagcttcacgcagcatatcttccggaataccgattgctcccggcatatttccgccgtttgcgttaatcatctccacaaattcggggataacggaagaagcaccgtgcaatacaattggaaaacccggtaaacgctctgatacttcctgcaaaatgtcaaaacgcaattgcggtttttgtccgggtttaaatttatatgcaccgtggctggttccgatggcaatggccaaggaatcaacgcctgtacgttctacaaaatcttgtacttgtgcagggttggtataagaggcatcttcatcgcttacgtttacatcatcttcaatacctgccaaacggccaagctcaccttcaaccgttacaccatgtgcatgtgcatactcaactactttgcgggtaagcgctacattgtcttcgtagtcgtggtgggatccgtcaatcataacagaagtaaaaccaccgtcaacacaatctttgcatagttcaaaggtgtcgccgtggtcaaggtgaagtgccattggaatatgcggattttcctttaccgctgcttctaccaatttaagcagataagtatggttggcgtatttgcgtgcgcctgcggaaacttgaaggataacaggtgcgtttagttcactgcaagcctccgtaattccttgtacaatttccatattatttacattaaatgctccgattgcatatccgtttgcatatgcttttttaaacatttctgtggtatttacaagagccactggaatcacactcctagtcaatttatgtttatatctatagtataccatagatttctgcataatggcataccatttgtagaatattaccatggctgaaaaaaatcgtgggttttcacaaattcgaaatcaattttttggtcagcaaagtatttttttacagattgattataacacaccaaaatactttgttaaacattacgttatttaggaaggaattgcggttttgcaagtgcgcgcatagtgaaaaatatattgctgggcaatgccggcgtaccgaccgaagtctgccgctgttttattggggaacagaatcgccattgctcgtttcatccacacatccataggaaacgcttccaagcgatgtaatccatataaagctgcacattccgctacttttggacctaccccttgtattgtcattaattgttggcgtacttcttccagcggcattgttttcattgcatccaatataataattccctgagcaactttttgtgcagcgttcaatatatactttgcccgaaatccactgcgaagcggtgctaaatcttccactgtgcagtttgcaagaacttccggtgcgggaaatgcaaaaccgccaggtatcttctctccaaaatgttcacataagcgtgatacaattcctttgatacgaggaatgttgttattttgtgaaataataaaacagcatagcgcctcccaagggtcctgctgtaaaatacgaattcccggtgcatattgtgctgctttgcataaaataggatccagttcagacaagtcgtctttaatagatttataatccaactccaaatcaaaatatgggacccatatatgtaaaaagtcgtcttcttccgtatcgcagaatagaatatgcttgtccgattcttccagttctaaatatcgaccaaatgctatgccgccaattcggttggatttttcattacatggttcccaacggaaggattgtccgcaatccagtgtttgcatcaggtcgaattcattgcttttcggtatcataatacctgccggtgtttttgtatattccataaagcctccttttttggatatcttataaaaagtgtcgaaatatctgatatggtactgttatactaccatatttttatccatacagcaaagaggaaaataatagatgcatacttttttgaaaacgtcaagtattatttttttattgagaattttgcagaaagatttgttttcccgtgaggttatactaaatgtttttttattttacaaaatactaccattttcggtttacataatatttaaccgaatacagttgtttaaatgtttagaatcgctgttttcgcagttattaacattttccacagagttttcaacagaactaacaaagttgttaacaaatattatgtaaactataaaatgttacaaattgattacaaaaagtataacaaaatagtagtcaagtaaaaaataaaaaaagttatctaaaaataagataaaaatatggcataaaattttacgaattactaaattgcaattttacaataaccaataaaattttagatgaatttgtcagaaaaagatgaaataggaaatgctggtataaataaaaataagatgccaaaaataggaatagcagattcaatattaaagagaaaaaggaagtaacagtatggtaagaggagtaagcagacaaattatagaggtaccagatacagggaatatttactatgaaaaggcatatcttgtggtaaaaccggaattttcagatgcacagcgcacgttgttggagaaagaggccaagcgtgttttgcgtgcaatggatgcgccttcaggtatcaaacgaaagaatataaaatggatgacggctctgcgttttttggctgcagcgctggtaggtgcaggaattatggccggctgttttttcttattttaatggcggcttgatacaatgactgaatcattgtattggtactgaaacgatgcacgttttttatgctgttaaataaaaaaattctgttttttgtgagctatgcagatacaaattctttaccattattacaattttgtaattaagagaatctcacacatttttcttgtgagacgtagattttgtatttgattgttgaaaatagatgtgtcttgtttatcatggtatcacatttatataataaaaattgcatagcgatttttttatgttataacaaccttgcgatagcaacaaaattaaaaatttgggctattggcaagaacgttttagcgttaatcagttagaaattgcatagcaatttctttaatgctataacaacctcgtaacaataacaaaattaaaattttggttgttatgagaacgttttaacatttatcagttaaaaattgcgtagcaatttttttaatgttataataaaacacaatgcaaataaggagtattgtgaattatgatagataaaacaaaaaacgaatctgaaaaaaatacagggacaaaaggtgaggatattatcgcaggcagaaatgccgtaaacgaagcgttgcgttcgggaagaaccattgacagtttatatgttgtacgtggacaaaaaacaggttccttaacagcgctgattgcaaaagccaaacagaaagacattaccattaaagaagcggatgcaaaaaaattggattttatgtgtggaaacgccaaccatcagggtgttgtggcagtagcggcaatcaaggaatatgctgatttggatgatattttccaattggcacagtctaggggagaggctccgtttatcatattggcagatgaattggaagaccctcataatttaggcgctattttgagaactgccgaatgtacgggggcacatggtgtgattatacccaaacgccgtgcagttggattgacttatgcggttggaaaatcttctgcaggtgctgtagagtatgtgccggttgtgcgtgtaaccaatatggctgcaaccgtagacttattaaaagagaaaggtctttggatttatacaacagacatgaaaggcgaaacatggtgtactttggattataaaggacctgttgggcttgtaataggttctgagggaagcggtgttagccgtttggtaaaagaaaaagcagattttactgtaacattgccaatggttggacatattaactcattgaatgcctctgtagcctgcggtgtgctttgttatgaaattgcgcgccaaagacagggaatcaaagccgattaaaagaatcttgcccgtcatattttcgtcacacatttatgttataacagtcccataacaataacaaaattaaaatttggctgttaagagaatgttttagcgtttatagattaaaaattgaaaagcaattttttatactataacaacttcataacaacagcaaaactaaagttctggctgttatgaaaacgttttaacgcttatacatttagaaattgcttttcaatttcttttatgttatagcagtttcattcctagaaaatgggtgtaaagtttggtaaatgcaagaaagctgtaagaaatcgcgccgaaaaattgcggcgaaattgttcttatggtataatattaacgtatttttttgtaataataagttagaagatattaagaaactgattaggagcgatgaaataaatgagtaaagataaatataatgctcctcagggttcagacagtgaatttgtagatgaaattttagcagaggcacgcaagatgcgtggcaatgtaacagaagagctggatgatcaagatattccactggcacaggcaagacctgttggcaatatgtataaacagacgaaaaaacctgcagagcctgttccaaagccaaaaccggtggtaaatccccccacccctgagatgaatccgcctgcaatctcaccggaaatgcctcagcaacctgccccacagcctggcagcaacgtcataaatcaagaagatgccggtacaaaaaagaaaaagaaacgttttggtaaaaaaaatcgtcaggaagtaactgccggtgaagatgatatttattttggattaaaattaaaaacagttgaggaagtaaaggcgcagcgtcgcgaagaattaaataaggaaggctattcgggaggccctttacaagtatcgtccccaacttcaacattcgcacatttatttgaagataacgaacccgataccagtcctgaatttgaagaaaaattccgtcagctgcaccgtcaaaggcaggagcgtgtaaaaagagctgcacaggaagcaggagaagaagtagaggatgtattttctctttatgaagaatcaaaagaagcagaaccggtctattctgacttaaaaattccggaacccgagtctcccgaaaaaattgtggaagaattggtcagcgacacattccgcaaacaggagcagcccgctatatcagcaaagcgaaatgatgatgtgattgaacatcaactgtatgaagaagacttgcaggcagaaaagcaaaatgcagagctgcgacaattgattgatgatgttttggcaaaagagacagttgtggaggtagatcctccgttacatacggaatctatatttggtttggttgccaaagaacgtacacaggataccgtcaatgcggaaatcgctgaagaagagaaacgaaaagaggtccctcagcctgttgagatagagaaggaagagatgcaggaatcgagtgccgaatcatttgagcctgttgctcaggttgaacaagaggacgaactggatattcctaattttgtatcttatccttcttccaaaacagcacctgttcatgagacgccaaagaaagaacatgcgcatcagaatgcccaaactgcagaaattgtcgaagaatcggatgtgatttctgaggagcaatccgcgaaagttgttgttgaaccgatgcaagaggagccgtctcaagaacatctttctgctgagatacaatcggaaacatttgaggagccattgtctgcagaacagacagaaacagcgcagaaaatagagcaaccaatagaaatgtctgaggtggccaaggaaacaacagatgctgtccagaatgagacatctcaagcagaacagctgtctgacgatgtaccattggaacaaccggtagagatgccgcaagcgtcattgtcgcaagcatcaaaagcacaggaagcagagtcattggaaagagaggccgcaacagaggcagactctcaaaatgttgaacagacagaaccatctcaagaggaacagcaaacggtagcggctgctgaagttgtcgaagaaaaagacatagatttagtaactaagccggtacaatatgtatttaataaaagacctgttcgcacattttccatacatggtattggggatgttttagcacaggaagcagagcaatttacgcaattgcttcatcctgaaactatgacgaaaaaagagcaagcagcaattcctgcggaaccaaaagtgacgcaagtgaaagaagataaaccgaaggaagcgcatccgcaggagtctgctaaaaacgagacttccaaaccacagaaaaaagaggattctcatcaagagtctgctcgtaaaccttccggtcccagaatcattcgaaccgctcgtttccaaattattgataaaaccaatgcaggacaacctgatgaggtttccaatatagagcacattgagccgcaagaatcaaatacttccgtaccgtcagattcaaatatggaaacagacgttgctgagcagaaatcagaaatccctgaggtaaaagataacaaagcatcatctgctgaccaaaatacgaaaattgtcaatttacaggatatcaaagcgaaaaaacaacaacctccgattgacttaaatcatatggagcaagtgccggaatatgttccaaaaaagaaaaaaaacatattcagaagagaaaaaatcaatctgttcactgatatcgaagatgaagaggaaatcattccggaagaagcacaagaagaacagccggaattggaggactttacatcaaaagaagatgcacgttccattgcgggtgaattacgcaaaaatattcgtaccttgttcctacgttccgtagtaacaggcatttgcacagcagttttgcttatttttggtttctttgcggagtaccatatttttggtgctgatatcagtcctgttgcatatgcagccaccagcttggtatttttggcaattgcaatcggtgcatgtgcaaccacggtttttaacgggttaaaagcgctggtcaagcttcgtgcaaatgctgattctgccattgcaatagcaacagttgtaattgcgattcaatctgtggtactgctatttatgcaggatgccttggctgctggagaggtacacatttattctgcgttgattacaggcgggttactgttaaatacactggggaaacttaccatggtacgccgtatcaaacaaaacttcaactttgttgtttccagtgcagataaaaatacggttgagttaattgaaaatgctgaaatagcagctcaaatggccaaagattgtgttgccggtatccctgttgttgcatatcagaaaaaatctaaatttttcagcaatttcctgaggaattcttatgcgcaagattgcagtgagctgacttctcaaatcatcgcgccgttaggatttatttcatctttggtactgttcattgtaagtatgattatcagcaaaaatgtaggtacaggatttactgcatttgcagcttctatgtgtatctgtgttcctatggcaaatatgctgtgtgttcatttacctgtttcccgtctatgcaaactagccagaaagaatggcggtatgctggtgggttatgaagcagtagataaattttcagataccaacgtcattatgattgaagcagatgatttgttcccaaaaggcactgttgagctaaagggtattaaaacatttggagaacaaagaattgataaagtattgttagatgctgcctcattaatggcccaagttggcggacctttaagcgaagtgttcttagaggtggtcaaaaatcatgaagacattttacctcatgtagaaaatgtagcttatgaagatgaatgcggagtcatcggctgggtgtccggtcgccgtattcttgtgggaaaccgagacttaatgaatcattacagcgtggatgttcctgctgtacaaattgatagagagcacggacatcaattggtatatttggcagcaggcaatgaagtggtgggtgcatttgtgcttgcttatcacgtaagcagtgagaagaaacaagaaatgcagcgtatggccaaaaatggaatcgggattattgtaaaaacaacagatccttccgttactgctgagttcatttctcagcaatttggtattgatattcatgccattacggtactttcaggaccgttggtacatacctataacgagctaacaaaccaagtagaagaaacaagcaatgcaatgtttgccacaaaaggaaaagcaacttgcatgatgcgcgtgattactgcatgtgtccgcgaaaaaagcaatatttctattgttcgtttgttgcaaaatatttctattattttagggtttgtgctggtagcatttttagtgtgcttctcaggtttaaaacaaatcagtacgcttgcaatggtaatttatgaagtattttggttggttgtactgttaatccttccaaaaataaggcgttcttaattttatagcgataaaaaagctgtgatgtaaataaacatcacagcttttttctatggtaaaattcgacaaaaagtatgctggattctattgtatgatgtttctatattcagcagagattctttttagcaaatttatatacataaattttatttactttttatgaatagtgtagaacttcaatcaaattgttgtattgtatgtacaaacggtatataattgtaatatattattgaaataaattgtaatgtttacctaaagaaagggagtcttattgttgaaacaatatcatgcaaagcaaattttaaatattgcgttggcaggtcacagcagctccggtaaaactacagttgcagaagcaatgctattcttgtccggtggattggaacgtttgggaagagtttctgaaggtactgctaccttggattttgacccggaggaaatcaaaagaaaaacatccgtcaccacggcagttgcacctgtggaatggaagaattacaaaattaatttaattgacacacccggattatttgactttgagggaagcgtatgtgaagcagtgcgtgctgcagacacgatgttaattgcggtatcggcaaaaagcggtgttagtgttggtacggaaaaggcagtggcagcagcgaatcaaaatgatttggcaaaagtcttttttgtcaatggcctttgtgatgaaagcgctgacttttacaaagtattccaagatttaaaaacatattttggacccgctgtttgtccgttggttgtgccgtttatagtagatggcaaagtggattgttacataaacctgttggaatataaagcgcatcgttacgaaagcggcactatgaaagacgtacctatgcctgatatgggaacacgattggacggtttgcgcacggctatctatgaggccgttgcggaaacaagcgatgaaatgtttgaaaagtatttttcaggtgaaaaatttacgccggaagaagtcattttaggtatcagcaaaggtgtaaaggaaggtaaaatctatcctgttttttgtggtgacgctcaattaaccgacggtgtagaccaattgctcaacggtcttatttggttggcgcctaccgttgctgattatggttctgaaataggggtagacatagaaggcaatcctgtagaaattgcagtgaatgaggatgctgccacagcagcgattgtatttaaaacagtagtggatccctttataggaaaattaacatttgtaaaagttgttgcgggtaaattaacagcagattctcctgtgataaatatgcgcacaggcgagcaggaacgcatgattaaaatgtattatatgtgcggcaaaaaacaggaagagacaaaatgtatttgtgcgggagatattggagcaattccaaaattacagcacaccaatacaggcgatacgttgtgttctccgaccagaaaagttgttttggaaggagtgacatatccggagccggtattgtctatggcaattctgccaaagcaaaagggagaagaagataaagtagcgcaaggcgttttgcggttacttgaggaagatcctacgttaaagtttgtcaataacgcagaaacacatcaaatgattctttctggattaggagaacagcatttagatgttgtagtttcaaaattaaaaggtaaatttggtttggatgtcacactggaaaaaccaaaagttgcttaccgtgagacgatacggaaaaaagtgcaggcacaaggaaaacataaaaaacaaactggcggacatggtcaatttggcgatgtttggattgagtttgaaccaagtgatagtgagggattggaatttgaagaacgagtggtaggcggtgctgttccaaaaggattcttccctgcagtagaaaaaggattgcgcgaaagcatgcaaaaaggtgttcttgcaggatatcccgtggtaggattaaaggctactttgtatgatgggtcatatcatcctgtagattcctctgagatggcctttaaaatggctgctgccgctgcttataaagccggtatgcccaatgcttctccggtattgttagagccggtgggtaacttaatggcaactgttcccgatgaaaatatgggcgatgtaatgggagaaatcaataaacgccgcggtagagttttagggatgcatcctgccaatacaggttatcaaacaattaatgcagaagtacctgttgccgaaatgcatgacttttctacatatatccgacagaatacccatggaagaggcaactatctgttttcttttgtaaagtatgaagaggtacctacacacattgttcaaaacattttaaaggaaaatcaagataaggaatagtgaaaatggcaaaacaatttgttttgccattttttatgtgaatatataaacaaaactatcgtttaggatgaaaaaataaatgatgtattgtgataagaatcactagacctcattgttgtatttaccgattctcttattttagtgccaattatgaagtcataaaaacagctctacaaatataacttagatgttattttatttagtacactgaaacaatgcagctgtggtaagttaacatttgcagcgatattttgaaaaaatgatttcatttatttgaaggaataccaaacaatgtccacttctattttattacagggggcgtaagtaatatttataaaaatagtttgatatttgcttaaaagggtatatgaatgcctaaagatattgtgaaaaaatatatgctttagaaccgtttatcataaaaggcagctatcaaatggctgccttttatgattctgataatattgttttcaaataaattatgattcattggcaatattaaaaatgtgtctgtttttcttttttgcgtattgcacagtgtaggcagtgccaccggtttgatttgccaggtaacaaatacagtataagctattatccaccatatagtgattacgcatatgcatacatccgctgtgatgttcctgagacatataaataatttgattggcttgttttaaaatagactgatatactgcaatatcgtttgagctccatccgtttgtttgttgtggagatggcaatgccagaatcaactgtatatgcggataaatagaacgtatctttaatacagccaatgctgcaagtgtatcaaaacccaatgctcccccgcaaataaaagtattcacgccaatatgaattagttttaaaatatgttttaccaataaattgtgtatatgtaatgtttcttgtttgggcaaatgtctatgcccgctaaaacagcatgtttgttcattcatatgcatcttcctttttacatatttattattttaccacatattttgattttgtaaactcatttggggttagcaaaatggaaaaaataagttaatcttaaacaagtggaaattaattagagaggttgcatatgaacgttggtcaagcagtaagagaaagaattgcagagctgtgtgaagaaaaacatattactattaataaacgggctaatatcagcggaattacacaatctactttaaacaacattatgagtggaagaaataacagtaccaccatatcaaccattcaaaaaatttgtgatggtttggaaattacagtgaccgactttttcgacagtccgttgtttttgggaatagaacaagagattaaataatgaaaaaagagagcctttccaagtgagagactctcttttttattgcctttgttaaaaaacttatttttttatatccatttcaatatcaccgttgttggtaaacacttttaatattttgttacctccggccttagattcaggtaagctattttccccttttttagcaaaactttcaatggtaaaatcatcataactgcccaatacggttccttttatattgccattcttcgtttctaatgtaatggtgttgccagcatctaatgtatcaaattggatattcccatgatttacataaattgaaacagaatcagttacagtaagtgacggcagtgtaatatcctcatttgttgttttaacagttaatgaagatagtagattttgaggaatgcgtaagcggatggtacgattctgcaagggagcgctaaagccaatataatctgtccattgcttttcagtattgtatgacatggtaagggtatggccatcagaaactgcaatgttaaaaaattcttgttcactttcataataatcaatatatatttgattatcgtcagatagttcaatgtcaatttttctgtcaatggcgtcaatgttaatggtttgaatttgtgagctgtctgcagtatagttcttttctgtaaagttattttgttcagtagaacaacccgataagatggcaatactgatacacaataatccaatcatagaaattatttttttcatggttcctcctagtaatgtttattcacttgatttatcttaatttttaaatataatacaaatataaacctttgtgcaacacaaaagtcaagaggtgtaaaatggaaagctatttttctatcagtgaagcagccaaaatagttggtttaaccagtgaaacactgcggcactatgacaggattgatttggtaaagccatgcaaaaaagatcaatggtcaggttatagatattattctgagcaagaaattgttcgcttaaatacaatacaagcattacgctgtatggacttgtctttaaaagaaataaaaaaagtgctggaatatgataatttggaagaaattgttgaatttttaaaacgagcagagcaaaaggcaaatcaaaaaatagaacaattaaaatatgcaaaatcaaaaatacaattggcaagggcagattatgaaaagaaacagaatggcaaacagatgcatcatgatattttttatcagcaaatagatgaacgagttattttattgtcaaattctatgcaagagcctacattaagtaatttatggaactatcacagccatttttatcagcagaccaatgatttgcaaaagcaaaattatttatttgaagatttagccggtatttatacaaaagacggtaaatcttctttatttgcagtttgtatagaatatccgaataaaaaagatttggtagttctgccatcaggtacctatatttgtgctaattgcagcgaggaagacagggaggatattttaaagaagctactgaataccataaaacaaaagtacgaaaaagagcctgaatttattgtacagatggttgttatttccggaattttgcagtggaactaccaaatacaaatatttttgggagaagtagaagaaatagacaattaaaagtgaaatgcaaaaagaggaggttttcaaatgagaaaacctcctctttttattcttttaaaacttctttatgagttaatagtttgaaatcatgattcgttaaaacgtcaatcgcagcagatgtgtcttccacacgcaatatgataatggcctcgccgattttacggcttgtaaatgcataaatatattccatactaatatgttgctttgccaacaattcaatcacagtggataatccgcctgcattgtcctgtattgcaactccaattacttttgtcaaagaaactgtaaatttggccttttccagttcttccatagcctttgctggtttatccacaatcatacgtaaaataccatattcgttagaatctgccacacaaagcgccaaaatatcaatgtcagcttcttttagtatctgagtaacacgagataaacgtccggatttattttccagaaatacagaaatttgttttaattgcatatgacaattcctcttttctttgcttatcaatagaagggatatgcttaccgcaaagcggctgggtatctgtaatgaaccattatgttaaatggcgcttatcaatcacgcgttttgcttttccctctgaacgcggtattgattttggttccaacaagcgtacttttgcagaaatatttagtatggattgcaatgcagatgcaatttttctttcaatttccgttaagcttttcaatgtgtcttggaacatgtcggctgtcatttctacttgtacctctaaactatccgtattattggcacggtctactacaatttgatagttggggtccatattaagggataaaagtacagcttcaatttgagatggaaaaacattgataccacgaataattaacatatcgtctgttctgccttttggtttgcacatctttaccaatgttctgccacaagagcacgtaccacgctccaatttacaaatatcacgtgtacgatagcgaattaagggtaatgcttctttaccgatgcaggtaaatactaactctccaaattctccgtctggaagaacttcttccgtatcaggattaataatttcgggatagaaaaaatcttcgttaatatgcataccttgttgtgccggacattcaaatgctacgccgggacctgcaatttcagacagaccgtaaatatcatatgccttgatatttaaaattgcctccagctcctgacgcatgtgttctgtccaaggttcagcgccaaaaaagcctgcgcgtacaggaagctgctttgtatcaattcccatatctcttgcagtttctccaatatacatagcgtaagaaggtgtacagcataaaatattagaaccgtaatcctgtaaaatttgtacttggcgctttgtatttcctgaagaaaccggaattgcggttgcacccatgtattccgctccatagtgcagccccaatcctcccgtaaataggccataaccataagaaacatggacataatcagattttgtagttccaatgctggtaagcgcacgcgcaacagagcgtgaccatacgtcaatgtcatttttggtataacctacaacagtttgttttcccgtagtaccggaagatgcatgaattcgtaccaattcttcttttggaacagcgaacatgccaaaaggatacgtatttctcaaatcatcttttaccgtaaacggtagtttatgcaggtcatcaatagaatgaatatcgtcgggagatacccccatagcatccattcgttcttgatatagaggcacgttttcgtatgcatgtttgaccatgtgtttcaaacgttcggtctgaagttgaagcatttcatcagtagatgcacactctatttcaggatctaaatattgttttggtacagacattccaagttcccctttgattcacttattattgttactatgatattaggagttataacctaataaaaatgctttttcattcatttcaataaatttagcaggtacagttgctttgatggtatccagccaaacttgtttgtcaatatccagatgtttggccattgctccaagcaaaactacgttgactgcttttacagagcctgcttgctgcgctaattttaaagcatcgaatgcaagtaaatgtgcacctttatctgcaatttgtttttctaaatgctcaggataagaggctgcgcctgtaatgacaggcatagggtcaatttgttgggtattggcaatgataacaccgccttttttcaaccatggcaagtatcttcccgcttccaataactcaaaagccaaaatcacatcagcttctccttgttcaattacaggtgaatacactttatctccataacgtacataagtaaccacagagccgccgcgttggctcattccatgcacctctgacatttttacatcatagccttgatttaacatagccgcaccaagcactcgactggccagcagtgtgccttgaccgccaacgcctacaatcacaacgctttttacattttgtttcatgatactacctcctgcttgccaatggctttgacgccgcatagtccaacgcatacgccgcagcctacacattgagtagcgtcaatgacagcctttttatttttcatactgatagcaggacagccaatacccagacatgcacggcatccaacgcatttttcgggattgatgaaaagaggaggattatgtttaacagttttcagcagtgcacaggggcgacgcgcgataattacagatggttcttccgcagccagttcttcttttaaaacagtgcgcacctgctttaaattgaaagggtctactacggtaacacgttgcacacccacagctttgcatagtgcttccaagtctacagcggcagccggttcgttataaatattttttccggtagtcgggttttgctgatgaccagtcataccggtagtagagttgtctaggataataacaacggaattgctcttgttataggcaatgtcaatcaggccggtgataccggaatgcataaaggtggaatctccgatgacagcaactgattttttctctccctgtgcaccgcgtgccttgttaaatccgtgcagaccggatacagaaccgcccatgcataaacaagtatccattgcatttaacggggcagaagcgcccaatgtataacaaccaatatctccgcttacaaatacgtttgctttctttaactcataaaagactcctctgtgcgggcaaccgcagcacatcacaggaggacgtacaggagttggctcatctaatgacaacacttcgtcttcctggtgaagcatgagttttttgatgagtttttgggaaagttctccgcagattggaaataattcttttcctataacatttacgccaattcggttacagtgtgtctcaatgattggatcaagttcttcgataacgtatgtagtttccaccatgttcgcaaaattgcgtatcaaatctacaggcaaagggtgtaccatacccagttttaaataggaaacggtatcgccaagtgcttcttttgcgtattgataagtcgcgcctgaaacaatcacaccaatttttgcgtggttgtcttccacacgattgatgtcacagttttctgcccattgagataattttttagttctttcttctacaagagggtgtttggctcttgcaaaagcaggaagaacaacatatttgcttggctgtttttcatatggttttaaatctatttcttttctgtcctgtgtatctacaatactgcaagagtgagaaattctggtggaaagacggatgataaccggagtatcatactcctctgaaagtgaataagccagctttgtaaaagaacagcattccgcagaatcggaaggttccagcataggaactttagatgcaattgcatggtgacgggaatcttgttcattctgtgaagagtgcataccggggtcatctgcaacggcaattaccataccgccgtttatccctgtgtaagagatggtatataaaaggtctgccgctacgtttaaaccaacatgtttcatagcacaaaaagaacgagcaccggcaatggatgcacctgcagcaacttcggctgcgactttttcattgggagcccattcacaatatatttcttcaaattttgcggctgcttccgtaatttcggtactgggcgtaccgggataactggaaactacgcgcacgccggcttcatataacccgcgtgctacagcctcattgcctaataatagctgtttcatgatatacctccgtgcggacaaaaaccgctcgtacattcatttttttcgtttcgttattttagtgtattttcatacatattcaacagtattttactatgtttctatattgaatgcaaggcatatttcccagctgttcccgcgttttggggtgataaaatacaatgctttattatggcaaaaaacaaatatggatttactctatacaatactatgcttttgtataaaattgcccttacttttctcttatgctataatcgtaaatacatgtaaacgtgatatcataacggttgaaaaggaggatagcacatgctattgctttctgcagaaaaaatagaaaaaagttacggcatcaaacctttgttagaaggtgcctctctttatttgagtcgaggagacaaagtaggtgtggtgggcttgaatggaatgggaaaatctacactacttaaaatcattgcaggtgtggagcaatacgatagcgggagtattacaaaaatacctcatctggtcattcattatttgcctcaacagcctgatatgcaagctggaaatacagtgttgcaacaagtatttttaggcgcttcagaagaattgcgtcaaatgaaagaatatgaggcaaagtctatattaacaaaattgggcatttctgattttcagcaggatgtttccacattgtcaggcggacagaaaaaacgggtagcaattgcaagcgctttagctactccgtgtgatttattgattttagatgaacctaccaaccatttggaccatcatatggtggcctggttagagcaaaccttacagaaatttagaggcgcattgcttatgattacccacgaccgttattttcttgatcgggtttccaataaaatcctagaggtaaacaacggtcaaatttatcaatatgaaagcaattattccggttatttggagagcaaagcacagcgtgaggagatggcgctcagttctgaaagaaaacgtcaaagcctgctgaggaaagaattacaatggattcaaagaggagtgaaagcgagaggaacaaagagtcgttcccgtgtagaacgttttgaagcactgagagaaaaagagacaccggagctgcctcaacaattagagattagttcagtgggtacacgactgggaaaaaagaccatagaggtaaatcatatttccaagtcctatggagataaggtgttgattcaagatttttcctatattgttcctcgcaatggaagaatcggaattataggggagaacggatgcggaaaatcaactttgctgcaattgttaagtggaaatttatctccggatactggtaccgttgagataggagataccgttaaaataggatattatacacaagaatgcaaaaatatggatgaacatcagcgtgtaattgattacatcaaagacggcgcggaatggattgaaacaatcaacggtaaattaagcgcggcgcaaatgctggaaacttttttattccgcggcgatatgcaatggaattatatcaataagctttcaggaggagagcgtcgtcgtttatatttattgcgtgtactaatggaggcgccgaatgtactgcttttggacgaacctaccaatgatttggatattgaaacactccaaattttagaggattatctggaaacattttcaggtgctgttattgttgtttcccatgaccgttattttctggataaagtaacagaaactatttttgaatttgaagaaaacggaaccttaaagcaatttttagggggctattctgattactttaacactgcaaaaacagatttacgcgtgaaaaaagaaaaagaaatcaaactgtcttccaatgaacaagggcagtctcaatcagcaaagaaacaaaaattaaaattttcttataatgagcaaagagaatttcgggaaattgacagtattatagaagcgttagaagtacaaatacaaacattatcccgggagatagaagccagttccagtgattatgatgcattaacccggttattaaaagaaaaagaagaatcagaacaattgttggaacaaaaaatggaacgttggttttatctgcacgatttggctgagcaaattgaggctcaaaagcagtaggcagagtcccgtactatctcacaacacatgaagtatcaacagatacgaaacagaaaagaatttacaatcaaaaagaccatgtaacaatcattcgttacatggtctttttgtctatacatggcactattgtttctgagattgctctttttcagatgtgtgaacaggtgataggtaagctgagtaaccacaacaaatgaaccgtctcgattttctttaccaatcgaatttttatacaatcatatggtataatggtttaaacaaataaacaaaggagcgttctattgtggaatataaagaggaaattgacagacttgcaaaagagtttgaaagctgtcaaaaaattctgttagctttgggagatgaaaatcgccggcatctaatattggaaatgatacaaatggaacaatgcaacggtgtacgggtcggtacaattacagaaaagacacatctttcccgtcctgctgtttctcaccatatacaaatattgaaagaggcaggaattttgaaagtccgaaaggaaggaacaaaaaactattattattttgatgcggatacacaagcttttaatcaactgatacatatgttagttcacgcaaaagaaattatggagcaactatcagattggagagaagcaaatttatcataaacaaaaaataataattcaaaaaatcgtaaaatagaattccaattaacttaataatcagcagacagcactaagggtacagtgggaaacacttttaaaaggattatttttatatgtatcatcaaactggaggttagaatatgagtacaatcaatgcaatctatgatagacatagtgtaagacaatatcaaaatcagccgttgagcaaagaagtgattcatgcattgcagtcagaaatcgatgcttgtaatcaagaaagcggactgcatattcaactggtaacaaatgaaccaaaagcatttgacagctttatggcacattacggaaaatttaaaggtgtgaccaactaccttgctttgattggggaaaaagaatcctctttagaggaaaaatgcggctactatggtgaaaaactggtattatttgctcaagaactgggtctgaatacttgctgggtagccatgacatacagtaaaattaaaacagcttttcaagtagaaaaaggagaaaagctttgcattgtaattgccttgggatatggagaaacacaaggcttaccacataaatcaaaatcaatggaggaagtaatccaattggacggacctgctccggagtggttccaaaagggagtagaagcggctttattagctcccacagcaatgaatcagcaaaaatttttgtttcgcttggataagaatagggtatctgttaaggcaggatttggattttatacgaaaatagatatgggaattgtaaaataccattttgaaattggtgcaggaaaagagcattttcagtgggagttgtcttaaaatacagaatagcagaaacgattcagtatggtttattggtgtaaatctcaaacataacgttgatatgaaaccatattatgtatagttcttgaatcacaaaaaggcgtgacaattgtcacgccttttttatcaaatttattttacataaagaaaacatttgttacgtttttgtcgcatgcataaaatcaatgcccatgtcataaggatgcacaataatacctgtcagtcctggggcgattgcataatagcgtttctcatagtaaatgggataaaagataccttcattgtttagatattgttctgcttgcgcatacaattcaatggcagtttcaggtttttttccttctgcatccttcaatgcttggtcaaatatattgctttttaaatttgcgggattattatgactgtctgactgaaataacgataataaactaacaggggtgtcactggtaggtcgtacagaacatagcgcaatagaatagtttccgctggaaactctttgttccagttcagattgtgataccggttccatattaaagtagtttccgaatgcttcattccatgtagcaatcatttcgtttaccatttgttttacagtagggtcgtctaaacaaagtatggtaatggaaggcattttggtcaatctttgctcgcttaaaactgtattgatggattgtacagcgctgtcatcttgttttaagtagaagttgccgcctgcctctgtacgatagtttgtacccataaatgtcatatccggaggaataatatcattggcctgtgtgcatcctgacgggatatattgcatgagcgattctcgattcagtgtttgtataaaagccttccgaatggtagactctttcatcaaactgtcgtttgtattaaagcaaagaccccatgttgtatcttgaaaagacgtgatggtataaccactctctttcaaagaggaaacgtaggaggcatttgggagagaaaccgccgaaagatttttgatattgttcatatccaaatctccgatagaaaaggtaagggtagagggtaatactgaggtttctccgtgataggtatttgctgccgtcagattgatatattcatcatgttcccaagaatatctgttgaccatttcaaaagggccgttgcctaaaatattttttgcatccagtccatattttccggaagtggattcaaagaaagcttgattacaaggcataaatactggtaaagaggtaatggagggaaaatcttcataggaatattctaagtcaacttttaaagtatgattatcaatagcggttactcccaagttagatatatccattgtaccttcgtaaattttttttgcatttttaattgcaaacataggcgcattggttgtagagcctgttgccgggtccactgctctttgaaacgcatatacaaaatcagaggcagtaacgggtgttccgtctgaccaggaagcatcttccctcagataaaaagtaaaagaggtataggtggagttgctttcccaacgctgtgcaactccgggcgatacctggttattttcatctaaacgggtaagcccttcatacaaagccataatcacaatacggctggaataatcatcagcaatttgtgggtctaaagttacgggttcttcttctaagttataggtaattgcttgtcccgattttttagaactgcaacctgtaacaactgcaaataaaacacagatacaaagcagaaaacagaatcctttttttattgtcataatacgtcatcctaattaggtgattttataataaaaatattttaacatgtttcattctgtgacacaatctacttatgtcgattgtgatattttttcattttgattacagttttgagacattttataaatccaatatatatctatgatttgattgttacaatacggttttatttctgcttttttcataaggtatgttataacaaccttgcaacaaattcaaaatcacagattttgattgttgacaagaacgttttaacgttctatctgttagaaattgcatagcaatttcttttatgttataa

SEQ ID NO: 568 - DNA, 7888 bp, Unknown
  16S sequences of unknown bacteria
gacgacggacgtccccgcctgcctggcccagctgcgggccctggcggcggctgggtgccagatcgcccgcctggccatccccgacgcggcggcggtagctgctttccggcacatttgcgacgcttcgccgctgcccctggtagcggatatccattttgactaccgccttgccatcgccgcggcggaggcaggggcggccaagattcgtattaaccccggcaatatcggcggcgaggaccgggtccgcgccgtcgtcgactgctgccggatgcataagatccccatccgcatcggcgtcaacggcggcagcctggagcgccgtctgctggaaaaatacggccacgtcacggcggaggctttggtcgagagcgcgttttcccatctggcgctgttggagaaattcgggttttatgatacgtgcgtttccatgaaatcctccaatgtccccatgatgatggcggcctaccgcagctttgccgcccagtccgactatcctctccacgtcggcgtgacggagacggggaccccggcgcagggcgtcctgaaatccgccatcggcatcggcggactgctgtgcctgggcatcggcgatacgatccgcgtctccctgacggcggatccggtgcaggaggtcatcgccgccaagcgtattctcaaggcggcgggtctgcgccgcacaggcgtcaatctcattgcctgcccgacctgtggccggaccagcatcgacctgatcggcctggcaaaccaggtcgagcaggccctggccgactgtgaaaaggagatcaccgtagccgtcatgggttgcgtggtcaatgggccgggggaggcccgggaggcggacgtcggcatcgccgggggcgatggctgcggcgtgctgtttgtgaagggcgagctgaaagagcgcctgccctacgaccagctcctcccagcgctgctggcgtatatcgacaagctgtgaggcgactgcgtatggatgtaacatttcagacccttttcccccaattcaccccgccggccaccctggcggacgccccggtgcagcatgtcgacctgcacccggcccagcgccgggtccgcatcgagctgacgccgggcagctatctgcccacccgagagctggacgacgcggcgaacgccatcgccacgctttacgatctgcaccgggtggagtttacctgccgctatgccccggagtctctttcacagatggttttttttgacctgggcagaatttttatccagcataaccccctggctgccggtgcgctggccggggcaacctggcatctcgagggcgagacgctgcacgtcggcctcgtcgccaacggtgttgcctatctcgagcccggcatcccggcggtccggcagtttatcgccgaccggtttggccgccaggtcgagatccagatcgacgcccaccaggagctggagggccaggccctgtttgacgctaccgccgcactgcgccaaaaggcgatgaccgagcagccccagcccgtcgtcaaggcgagcgcaccggggagggctgcccgggcggcccggcccacggaggcggatatgatcttcggcaagcccttctccggcaaggccctgcccatgaaggacctggagcaggatatgtataaggtcgtcgtggaaggggaggtcaccgtcctcaatcaccgggagctgaaaaagcgcggcgcgtggatcatcagcttcgatatgacggaccacaccggctcggcccgtatccactgcttcatggaggcggcccaggccaagccaatcttagagggcgtccagggtcccaacgcaaagaaaaagaagcccggctcctggctccgggtccacgggaaggtgacggtcaaccgctacgacggtgagctggtcatcgagcccttcggcattatgaagggcaagcggcccgaacggcaggacacggcccccgtcaaacgggtggagctgcatttacatacgaacatgtcctccatggacgccctgacggatacgaccctggccgtgcgccaggccgccgcctggggcatgcccgccatcggcatcacggaccacggcgttgcccaggcctaccccgacgcgatgcacaccgtcgagggtggctgcacggtcgacgggacggaccagccgatgaagattctctacggctgcgagggatattatgtcaatgacgtggacgaccgcgtcgtcgtccacggtgtgcgggacctgccgctgcggggggacttcgtcgccttcgacctggagacgacgggcctttccagccggtacgagcgcatcaccgagatcggcgccgttatcttccgggacggccagccctgcgagcggttccagacctttgtgaacccccaccgccgcctgagccagaagatcgtcgatctcaccggcatcaccgatgccatgctgcgcgacgcgccggagatcgagcaggtgctgccggaatttctgcagttctgcggcgacctgcccctgtgcgcccacaatgcggattttgacgtcggctttatccaggccgcctgccagcggcaggggatcacctacgcgccgacgtatttcgacaccctgatcctggcgcagaatctgctgccgaatctgggcaaatacaagctcaatctcgtcgctgacgccctgagcctgccggatttccagcaccaccgggcttccgacgacgccgtcacctgcggctatctcctggcccgctttcttcctatgctggaggagcggggcatcacccgggtgccggagatcaaccccctgatggcccagctacgctccggcggccgcctggacgggcggcacacccgccatattctcctttttgccaagaaccagacgggcctgcggaacctctatcatctgatcagtctcagcaacctggaatatttcaagcgggtgccccggatgcccaagtcccagctcctgcgctaccgagaagggctcatcatcggctcggcctgcgaggccggggagctgttccaggctgtcgtcgcccacaagagcgatgcggagctggagcgtattgcgtcgttctacgatttcttggagatccagcccctgtgcaacaaccgctttatgttaaccaagggcctggcccaggatgaagaagagttgcgggaattcaaccgcaccatcgtccgcctgggtaaaaagctgggcaagcccgtcgttgccaccggtgacgtccacttcctcaacccggaggatgagatcttccgccacatcctgctggcgaccaagggctttgacgacgcggacaagtccctgcccctctatctgcgctcgacggacgagatgctccaggagttcgcctatcttggggaggagacggcgtacgaggtcgttgtcaagaacacaaacctcatcgccgatatgtgcgataccgtccgccccgtgccgcataacctgttcgcccccgccattgaaaactcggtggaggacctcaaaagcctcgtctacggcaagctgcaccggctctatggcgaaaacccgccggagctcatcacccagcgcgtcgagacggagctgcacgatatcatcaactgccactacgacgtcatctatatgtctgcccagaagctggtgcagaattccctggagcacggctacctcgtcggctcccgtggctcggttggctcgtccatcgtggcgtatctttcgggcatcacggaggtcaactccttcccgcctcactaccgctgcacgaatccagactgcaaattcacgacctttgacgtcacctccatcaccgccctcgacgaagcggacccgaagaaacgggaggacgccatccgggccaagcgcgatgccgcctgcggcgcggacctgcccgacgccgtctgccccaagtgcggggccaagtttgccaaggagggattcaacatccccttcgagaccttcttgggcttcggcggcgacaaggtcccggacatcgacctcaacttctccggagaataccaggcccaggcccacgcctactgcgtccagatgttcggcgccagccacgtcttccgggccgggaccatcggcaccgttgcggaaaagacggccttcggctatgtcaaaaaatacctggccgagcgtgacctgatcgtcagccgcgccgaggagcagcggctggccctgggctgcgtcggcgtcaagcggacgacgggccagcaccccggcggcctggtcgttatcccccaggaaaacgagatctgggacttctgccccgtccagcacccggcggacgacaccagcaccgataccatcacgacgcattttgaataccactgcatggaggagaaccttctgaagctggatatgctgggccacgatgacccgacgatgatccgcatgctggaggatatgaccgaccgtgacgccaagaccatccccctggacgacccggagaccatggcaatcttcacgacctccaagggcctgggctttgaggacgacccgattctgggccccgtcggctcctgcggcatcccagagtttggcactggcttcacccggggcatgctccaggagacccagcccaaggcgtttgataccctcatccgcctgtccggcttctcccacggcacggacgtctggctgggcaacgcgcgggacctgattctctccaagacggcgaccgtcggccaggccatcggctgccgcgacgatatcatgctctatctcatccagtgcggtatgcccgagaagcggtcgttcaagatcatggaggccgtccgaaagggacgcggcctgccggagggcgctgagcaggagatgatcgacgccggtgtccccgcctggtacatcggctcctgcaagaagatcaagtatctattccccaaggcccacgccgtggcctatgttatgatggccttccgcatcgcctggtacaaggtccatgagcctctggcgttctacgcggcgtatttctaccgccgcagccagaagggcaattttgacgccgcccttatgacccagggcaaggacctcgtcgtcgatacaatcaagtccatcaaagcaaatcccgacgcctccgccaaggatgacgaccttctgacgacgctggaggtctgctatgaattttacctgcggggcttcaccttcgcccccatcagcctgaccgagtcccacgcgacgaaattcctcatcaaggacggccaactgctgccgccgttcatcgccgtgggcggcctgggtgagacggcagcctgggatatcctcgctggccgggagggccgggagtttatctccatcgaggaatttgccgccgcgtgcccgaaggtctcgcagacgcatatcgaaaatctccgcgccgccggcgccttcggcggcctccccgacaccagccaagtcagcctcttctaactctccgccccgccccccagcgctccgcgctgagcccttgtggtgcgctgcaccgaagggacgctgggcaccaaaggactgcgaaagtcccttggctccccttttaaggggagctgtcagcgcgcgcaagcgcgatgactgagaggtcttgccacaagtatgcaccgcacctgcaagcgccgcacttagccaaggctcccctgaaaggggagctggcagcgcaaagcgctgactgagggattgctgcactgcaaaagaaagtttttaatgcagtactcgactcatcctggctaccaacaaaaactccaagtcaccggagcagtgcgtaagctacagcgaagcggcaagcggtctgcacaccggctatcaaggtacggatgcaagaacaaatctgcttggaaccccgtacagtgtgcggctgcacccccgatgtcgtacccagggggtgagatccaagggcggggggactgccccccgcctttggcggcgtctttcttccccgattctttcttcgctgtagaagaaagaatcgggcccccggagggcactagatcgtttgtctggtagacattggcttgtagaaatttgcaagcttgtttttaaagcctggtggaatcaagtactgcgctggaaatttgcgattgcgttgcagcaatccctctacgctgcataggttcgactacgcggtataagctcgagtagcaaaatcaaagattttgactctcgcttattagccaatcgcgccgctgcgcttgcgctcttggcgtctcacccatacacaagggagcctttggtgcgctgcgccgcaaggagtgctgtgcagccttggtgacatgggcgttattacagaccatgacaatcatcaacccagcgcgagagcgcaagaaaccattcatcgccatgccgcggtttcgcggcggaaaggagcgcctatgcagccgcttgcgaagcaatttcatatccactgtgtggccggggacgtcggccgctatgtcatcctgcccggcgacccggggcgctgcgcggccattgccgcgctgtttgacgaggcccaccacgttgcccagaaccgggagtttaatatttataccgggacgctcctaggcgagcgcgtcagcgtctgctccaccggcatcggcgggccctccgccgtcatcgccatggaggagctgcatcagatcggcgcggataccttcctgcgcaccggcacctgcggcggcattgacttagacgtccgctccggggatatcgtcgttgccaccggggccatccgctatgagcacacgtctcaggagtacgcccctctggaataccccgccgtgccggacctggacctgaccctcgccctgcgggacgcggccctggccatgggcaagacagtccacaccggcgtcgtccactgcaaggactcgttctacggccagcacagcccggaaaaatcccctatggccgccgagctgcaggaaaaatggcacatctggaagtgcctgggggtcaaggcgtcggagatggagtctgcggccctgttcgtcgccgccgacgcgctgggctgccgctgcggcagctgcttccatgtcatctggaaccaggaacgggagcttgccggtctggaccaggacatgagcgaggatacctccgccgccgtccgcgtcgccgtcgacgccctccggcgcatcattacccaggaccgcgcccgggcaaagaaatgaccccgccgcgccgcccggacagggcagcgcagcagggtgcaatttccctcaaacgcgagcccagcgaagcagatcgcgtttgagagcttgtcaaaaatacttttttgacaagcttaatatgtagggcagatcgctgcatctgcgacaatccgccctgttttttggttgctgtcgttgtacaagggagcaaacctggttcgcaccggccacgttcgcgctcgtgcggtacgcttgacacaaaatgcgccctccggcgcggcggcattctgcctgcgtgaaccgtgcgcatcggacccggcggcatgtatgcggcttttgtgtccaaagctagtatgtctcgtctgctgctcgataccctggtattttttggaagcttttgcatatcctagccccgaaggaggccttgtccattgctgcaatgtatcatcatcgccctggcaatctttctgctgctgaagatcatctcgttgcccatccggctcatctggaagctggtaatcaatacggcctgcggatttgcctgcctggtggcggtgaacctgctgggcccgtataccggtgtcctgtttgatctcaatctcgtcaccgccgccatcgtcggcttcctcggcctgccggggatcgtgctgctgttcgtgctgcacttttttctaaaataataagacgccaagacgccgccccaggcataacttctgagcccggggcggcgtcttgagcttgtcaaaaaagaatttttgacaagctctcaaacgcgactccgctgtataagctcgaggggcaaaatcgaagattttgactctcacttaccgcttcgctgggctcgcgtttgaagg

SEQ ID NO: 569 - DNA, 10373 bp, Unknown
  16S sequences of unknown bacteria
gtcgcccctacaagcgtagcgctaactttttttgttttctatggaccaacgtaccatcccgtaggggcgaccattggtcgcccgccttcatcatttgatcttttcgagaccttccgcgagacccttcccgatatcgccggacgtgtgcgcgtccgagccgaggacgaaccgctttccgccctgatccttgtacagggcgatgaggtcgctctccggcatcgtcttcccgtcgttcggttttctgagcccgcttgtgtttatctcgagactcagcccgttttcgatcattatgtggaagagctcacgccactttttctcgaatttcagaaaattgtattttacgccgtcctgacgcatatatctcgccgggtaggtgatgtgcgccatcgtcgttatcccgggaaagcgcgcgatttcgcataattcgtcgaccgcacggccgatgaagtggtcgatgacctccggctccatctttccgtagtggaagaacgagaagtcggggacgccgcgaagattgtggagcgagccgaggacatactcgaagcggcactcgtcgaggagccgccgcgcctcttccggtttcgcgtgcggctgaccgagctcgattccgtagaggattccgagctttccggcgtacttttccttggcggcgaatacgtcgcggcggatttcatctttgtcgtacttcgggtagtagccgtcgagtacgccgtcgatgtcgcagtggtcggtcacggcgattccgcgcagacccgctgagatcgcggcttttgccatcgcgtcgatttctcccgcgggggttttgtctccgtcgaaggaatagcgcgagtgggtgtgtaaatcgtaatatttcaggttatttatattgttttcgataattctttttgattctgattccatatggagcctctaaaagaaatagttgcggaagtgcccgcggcgccggatgtttgatgtggcacgagctgacgtcggcgtagaaacaaacattgactatgcctgcggcggctcgccgcgctcgccgcactttatattttagcacaaaacttcggattctgcaagtagattcgataaagtttttcaaatattattgatttcgtcgtttttttgtgttacaatagagtcagacggggttcgggagagggcgttcatcgtccatcgtttcgcggcaggcgttcggagcgggcgaccaatggtcgcccctacaagtgtcgtgtgcgtcgattgtgagatgtgttgaactttccgatttgaccggaccacagaattttaattgtacgaggtattttatcatgaaaacgttcatgggaaagaactttctgctcgagaccgagacggcgcgcgcgctttatcatacttacgccgcgaatctgccgataattgactatcactgccatgtttccccgcgcgagattgctgaggataaggtttattcgaacatcactgaggtgtggctcggcggggatcattataagtggcgtgctatgcgctgctgcggcgtgccggaggagtttatcaccggggacgcgagcgattacgagaagtttgtggcttattgcaggtgtatgccgaagctgatcgggaacccgctttatcattggtcgcaccttgagctcagacgttatttcgactgcgacctgatcataaacggcgataacgcggacgctatctgggagatctgcaacgataagctgagcgacccgtcgatgagcgtgcggaatatcattaagaattcgaacgtgaagctcctctgcacgaccgacgacccggcggacactcttgagtggcataaaatgctcgcggaggatgattccttcgacgttcaggtgctgccggcttggagacccgacaaggggctgaatatccacaaggcgggaatcgcggattacatgaagaagctcggcgaggctgccggcgtcgagatcaccgaccttgactcgctgcgcgcggcttacctgaagcggctggatttcttcgcggagatgggctgcaagacggctgaccacgggctcgacgagttcgattacatcgaggcgtccgattacgaggtcgacaatatctttaagaaggcgctcgcgtcggacggcgcggacgtcacgtttgaggacatggcgaagttcaagacttcgctgatgaccttcctcggcggcgagtacaaggcgcgcgggttcgttatgcagttccatttcggcgtgctcaggaaccagaacacgaggatgtttaacgctatcggtccggacacgggatttgacactatcggcaacttcgatatggtcggaaaaatctcgaagctcctcgacaagatggacgcgaccgactcgctcccgcgcactattctctactcgatcaacccgaccgacacgtcggctgtcgcggctctctgcggctgtttcgagctttcgggagacggaaagccgaaggtcgttcagggctccgcttggtggttcggcgacaacatcgacggcatgacaaggcagatgcgcgagttcgcgaacctctccgcctttgggaacttcctcggaatgctcaccgactcacgctctttcctcagctacacgaggcacgagtatttcaggagaattctctgcaatatcctcggaaactgggttgagaacggggagtatccggcggatatggaggcgctcgcggagattgtcgcggatatctgctttaataatactaaggatttctttggatttgagataaaatgattctctatcacggcagctcggtagaggtcaggactcccgaaatttacacgaacgggcacttcaaggacttcggctatggcttctatctgacaaatttagagaaacaggctcgccgctgggcaatcacgagacgccccggcggcggggtagtgaatgtctacgagtttgaacaaaaaaagggtctcggcgtcctgaaattcgacgaaatgaccgagagctggctggatttcgtggtcgcctgccggagaggggcggaacacggctacgacatcgtcgagggaccgatggcggacgacacgatatggaactacgtagacgacctggagcgcggcgaaatatcccgcgccgccttctgggaactcgtgaaattcaggtatccgacgcatcagctcgtgtgctgcaccgagagggcgctgtcatgtctgacgtttctaagaggtgacaagatatgaaaaacatctacttcccggacgaggcaggggccagcccctgcacccgatagtcaaattttcggctacagtcgcctgaaggctctgccacatcaaacacagagcgtcgagcggcgagccgccgcgggcatagtcaaatatcgtgcgcgggtcggatgaaggctctgccatatcagacatagagcgtcgaaaaaagttccagcaaacaatcaagaggtgacaagatatgaaaaacatctacttcccggacgaggacgtcacaagcaacgatctgcttttcgtctgctacatgatcgaacgtgtctcccgccgcctcaagcagcccaacatctacaccgccgaagcgctcggcaccgacgccctcaggcacgagctcagcgtagcgaacgtccagcactgcgaaaacccgctcgacgtcgaggaccgctggatcgaacgctaccacctcgtccccggcacctacgacgtctcggacgtagaccccgaactctgcgagcacttcccctccgccatcgacatcgcgaaagtctaccgcaggttgatgctgaacacgacatacgacggcgaagactacgatcaggcaatcctccgcgtctaccgcagccccatctgccgcgcgatcgacaactacaacggcagcgcgttctatgagccgccgatagttgtggctcgggcttactatgaagaaggctttcactaagcaggggccagcccctgcacccgatagtcaaattttcggctacagtcgcctgaaggctctgccacatcaaacacagagcgtcgaaaaggcaagattgtgttaattattggcaaaaacaggtattgcgcgctgaacgaaaatgtgctataatttctgtaacaacaatagaaaggcaggaatttcaaaatgaaactttccgtaacatcctacagcttcggctcatacatcgacgaggacaagctcggtctcatgggcatcatcgacaaggccgctgaactcggcttcgacggcatcgagttcgccgacggcggctggtcgaagaatctcgacctgaatctcgcgcagaagataaaggaacactgcgccgagaagaacctcgaggtcgtcgcgtactgcgttggcgcgaacttccttggtgattttgacgaagaggtcgccagaacgaagagaaacgtcgatttcgcggcggctatgggcgcgaagaatatgcgccacgacgtcgcttacggcttcaccggacgtaagtattccatcggctacgacgacgctctcccgatcatcgcgaagggcgcgctcgaagtcaccaaatacgccgagcagaagggcgtcggcacgatgaccgagaaccacggctacttctcgcaggactgcgcgcgcgttgaaaagctcatcaacacggtcgctcacccgaacttcggcgcgctcgtcgacgttggcaacttcatgtgcgcggacgaggacccggtgaagtcggtcggcattatggctccctacgctaagcacgttcacgcgaaggatttccactggaagtccggcatggacgtcaaccctggagagggctggttccgcacccgcgcgatgaactacatccgcggcgcgatcatcggtcagggcgaggcgaaggtctatcagtcgatccagatcctcaaatcaaagggctacgacggctacgtcaccgtggaattcgaaggcatggaagacaatctcaagggcatccgcatcggcaaggataatctcgcgagatttataaatggctgataaaaagagcaagatagtacaaaagaaagataagaaaaaaacagtcgcgatcgtagtgactgtgctctgtctggtcgctgtcgtcggtctgttcttcctgaacaccggcgacatgacgttcgatttttcgtcgctcgggaacctcttcggcggcaaaaaggacgacaccgaagagatacagtacgtctacgacggaagcggcaagcaccggatgagtctctacgatcccgattgggaaaccgacattttcacctataaaaagtaccttgataagataagatatatctcttatgtcgaagacggcatggaagttatgctcgttgacggggattacgccgcttacggagagccgatggtcttcttcgcggactacatcgacacgcttgagcacggcgacgcggagaagctgaacacgttctacgcggacagctatttcgacacgcacgagcggtacgagaagttcacgatgcagaaaatctacgagccgaaggtcgagttcatccgccgtcgggatatcactcagaatggcaagattgtgacagagtacgtctacaagctccagtacaaaatcatggagaacgacggcaccttccgcgacgacattctgagcgacggcgtcaagccgcagttctacacgctgatcgacgacggggcgaatcttctcatcactgacgtcagtgactactttgacatgaacgcgtaataaacagaattttagccgggtgtgaataactcatacccggctggaactgtttctgtataaaataacgaaaaggaatctgaggaaaaatgaagctgtacatgatccgtcacggtcagacgacctgcaacgtcgccggaaagcatcagggctggggtccggtgagcctgtccgaaaagggctttgagcaggcgagaaaagcgaaagaatatgtccggacggtaaattatgacaaaattttcgtgtccgatctgttaagaacacgccagacagcggagatacttttcccggaaaagtaccgcgcgggcgagctcgagttcaccgaagacctccgcgagatcgacaccggcgtgtttttcgggaggacgcttgaggatatgtaccggctgtacggcgacgtttacctcgattgcaggaaaaagatggattattcggcgctcggcggcgagagttcgctcgatgtgaagcggcgcgtcaggcgattcatgaatcatcttgaggagatggcgcatgagagccgcggcgagcttaagatcgcggctgtggcgcacggcggcgtcatccgcgcggcggcgacgatgatagcgggcttcccggaggattacccgttcgggcgcttccctcttaggatcgacaactgctcggtgagcgtcttcagattccgcgagaagaccggtggctgggagatcgaaaagctcaactgcggcgagccgacgctggaatgagcaggatctctcgagtaatcggttgatatttcagccgtgtctggtgtgaaaagaacaaaaagaaactggtcattgtgcagaatgaccagtaattttttgcttatttacttctctgctgctttacggcgagacgcagtttcgacaaagtgtcaattatgacgttccgcgtcggctcgtcgagcttcgtcagcgcgcggatcaccgcgatcgtgttgcgaccgtcgagcaggtccgggaggtcagtgatgccaatcgtctcgaaaaccgaccagattccgtcgataaactgccctcgctgctcggtcgacagcccggaaatccactcgttgagcgcgccctcggcaagccggctcgcctcgtcgcgcgcgttcacctcgacaagtccggaacccttgatctgccaagtgtagaggtcgtgctgcatgagcttcggcgcgctcgacgaaacgatggtatatcgtcccgtatgcgcgaaaataacaccgacaagcgacgaataaggtatgattgtgcggattctcggctcgatcacgcggtatccgggcgagctcagcacccgatcagtgtagccgggtccatcaaggctcaccgcctcgaggatatttcgcgaatatttcgtgaacgccgccgagtaaaccgcgagattgccgccctttgagtgcccgaggatgcgcacggttcctcgcagcgacgatataacactgtttatatattcgacggcgtgcagctgcgccggaagctcgtcggagagcgccatgttgagatcctctttccacccgacgagcgtccagtcggtcccgcggaaaaggcacgccgcggttcggtccggcagcagaatagtcatcgcggcgaactgctcgaccgtttcggcgtcgaatttttcgtcataatacacaaccggcagatttttgaagcgcggacagtcgatgagccgctccgcgagctgcctgtcggaatgcaggtggaatcgatccgcggcgccctcgcccgtgtcgttcacgatgcgccggcagagctcgccgagcggcaccggaagaggcgaattttccgggacaattcccttgaaatcgaggtaagttacctgcgcgaggagaacacgatcggcgtcgttgaacccgtccgccgtgatcggaatgtcgccgcgccagtcaagataatcaaaaatatcaggcataatatcaccaaattaactatttttgggcttaacgtgcgtcaaccagcgcccggagcgcacgcgccagatgaataacccgccgcggaagacccagtcgatgatcatcgcgatccagacgccgatgatccccatcccgaaccgcacgccgatgaccaacgagaagaaaattctgaacgcaatcatcgagaagatcgaaacgaccatagtgaaccgcacgtcctgcgccgcgcggagagcgttcggcagaacgaacgccgtcggccagaatatcatcgcaaaaccgtcatgcagaatgacaagtattgcggcgagttcaagcgtctctttcgtgagattgtacaatttgagactgagcggcagagacaccaatataagtatattcacgaccgccatcgaaaggtacgcaaatttcagaagcttttgttcatattgacgggcagaatcgtagtccccggcgccgatacattgcccgacgaccgtgacgacagcgagtccgagcgcctgaccggggatacagccgagcgagtcgaggttgtttgcgaccgcgttcgccgcgacctgcgcggtgccgaacccggcgatcatcgagatgacgaggatgcgcccgagctggaaaacgctgttctctaagcttccgggaatgcctatgccgagaatttttttcattacatggaagtctaaccggaatttttcgcgcaaattgatataaatttcgtgatttttattggagatgatcacgaagagcagaagcataccgagaaatctcgagattgtggtcgaccacgccgcgccggcgacgccccaattgaagacgtagatgaacagcgcgttgccgcagatgttcagcagattcatgaaaaacgaggcgatcatcgtgattttcgagttccccatcgtccggaagagcgccgcgagaccgttataaatcgctataaatggataagatatcgctgaaattacaaaatatgtaagcgcgttcgacatgacgtcgtcttcaatcgcgccgaaacacagcctgagcagtccgacccggaagaaaagcgcgagtcccgctacaagtatcgaggcgacgagaagcacgatgagcagctgcttcgccgcggatctcgcgccggggaagtcatttttgacgctcgtgtcctgctccataagttttttgatttttccgagctcgtaagcgcagatgacggcgccgccggtcgccagcgcggcgaaaatgttgatcatcagcacgttcagcatatcgacgagcgaaacgccggagacagcgctctcgccgagcgacgaaatcatgatcgtgtcgaacattccgaccgagatgccgagaagctgttcgattatcaacggaataataagtttttgtaaatcttttttgctaaacatcagccgaggagatttcctatatttctttcagcgactatataaatgtaatagtcgggattggtgctttcgatgtaatctttgtcaaatttgtagttccacatattctgccagtaaacttcggaaaatgaattgttcacatagccgtaaatgtttgttgaaaatgaatcacgcacgatcatcgcggtaggctttccttccggatcgagacgattcctgacggtttgggtatcctgcacaggcgagaaatcgagctgaaccgagcccttgacatacacgtccgggtttgagatcgcctttgtcagccattttacaaacgtaccattttcgtggagaagcgaattctggagcagaagatggaccatcatatcgccagacattgattctttgttgtagaactcaaaatttccgtcgatcggaagcggtttcgcagcctcataatccttcccgatctcgtccatcagtattttatagccccagtatgcgccgtaagctgtccagtgcgagtcggttttgttgtagattttgtaaatgtcgtcgcggtgctcctcaagaatttcgcgcgcgtcgatgacggtcgccccggcggcacgagctgccttctcaaattgttcggtcctcgaaatatccttgtcagaacgcacaaatcgttccggcgcggtttccgggtaaatctccatcgggttcgtgattataaggtagacaagtttgcagtcgcgcccggcgaggtaatcgacttttgacttgatccgcttctgcacgccatcgacctgattgtcagacaatatgtttgtcccgcaccagtcctcaagctgcccgaagaagtgtccctgcatcttgtcgccgaacgcgacctggcagacgccctggtccgcgagcgagaacccggggcggggctgaaccgtaactataatctgctccgactcgcccttccctggttcctcctgggtgagcgaaaggttcgtaatgccgcttggaatctcgatttccacgcaccagtcggtgtaatctgtcgagaaagtcttatcgatactattgtctgatgtgcggacgtgaattttcgcgtcctgcacgcatttgccgcccatgactacggtgttttcaccgctgtgcgatgtgaaggtgagctccggaagttcgctgggattgtcggacaatgtcccgaaatgaaaggcatcgccgcccaagtcggagttgacgtgggaggcgatttcagtgatattttcagagccatcgggcgacgacgaatcaagcgcgtcggctgatccgtcgctgccgatttccgctttgtcgacggacagaagaccgtcgattgcggctttcgcggctgaattgtcgtctgtcgttaacaggaacacatactttcctttaacataaatttcacatccgtcgagaaccggcagcatttccgcgttgtaattttcgagttcgccgtgcgtttttgcttttatcgcggcacgattttcgaaaagcgctttgatttctccggctgaagc

SEQ ID NO: 570 - DNA, 28819 bp, Unknown
  16S sequences of unknown bacteria
tgcatctttcgcctttacgacggtgatgataacatgatacggagctaccgcaaccggccacatgattccattttcatcatgacactgttctacgatcgcagccattgttctgctgactccgattccgtagcatcccatgagaatattgtgttctttcatattctcatctttatataccgctcccatcggcgcactgtactttgtccccagtttaaagacctgaccaacttcgatcccgcgggtcagctttaccggagcgccgcattcagggcatggatccccttcgcggatcatcttgatattggtcacgatatccgctgtatagtctctgccgtaattcacatttttcaggtgaaaatccgtcctgttggcgccggcgcacagattcttctgtccgggaagctcgctgtccgcgataatcgtgcagttcttcaaacccaccgggccggtaaatccacctacgcagccggtcatttccgccattttcgcttcatcggcaaaagcgatggcgtgttccggaattccgagagcgttgacgatcttgatcatgttagcctctctgtcgccgcgcagaaacgcggctacataaccggtcacattgaaatcatcgtcataagtctcatagagcagagctttgatcgtcttttccttcggaagaccgagatattccgctacagcttcgatggtctttgtccccggagtacgaacctcttccatcggaagctccgattcaccggaaggttctgcatcagcgcattccgctctctcatccgtcgccgccatatcacacttctcacaatatacgatacagctttcgccgttttccgccagcgcggtaaactcatgagaaccgttgccgccgatcgctccggtatcggcttccaccgctctgaaattcaggccgcatctggtaaaaatcctcgtataagtctcgtacatcgtgcggtaactccggtccaggccttcttcatctctgtcaaaagaataggagtccttcatgataaattcacggctgcgcatgagtccgaaacgaggacgcgcctcatccctgtattttgtctgaatctgatagagattgaccggcagctgtctgtaagaactcacttcgtttcttatgatatccgtaaagatctcctcatgagtaggccccaggcaaaattctctgtcgtttctatccttcagtctccacatctcagggccgtaagcagaccatctgccggattccttccagagttcggccggctgaatcgcagacatgagaatctcctgtcctcccgcatgatccatctcttctctcacgatattttctacttttttcagaactctgctgcccagcggcataaaaccgtagacgccggaaaccagcttgcggatcatgcctgcacggagcatataaatatgactcggaagcaccgcctctgcaggcacttccctcagagttctgatatacatctttgacatcttcatgtctgctttcctcctaagtactcgatcatttttccgtctttgtcaaacgggattttttcagcgtcaggctgctactgtacgatactcgtcactgcctgggcggcaatgccctcttttctgccggcaaagcccagcccttccgtagtcgtgccctttatattaatctgcgaagctgaaattttcagtacttccgccatcttttcacgcatctgcagcacataagcggcgactttcggctcctgagcgatgatcaccgcatcgatattcacaattcgccagcccttctctgccagaaggagtcccgtcttcgccagcagtacgagactgctgatgtctttaaactgaggatcgctgtccggaaaatgaatcccgatattgcccagacatgcggctcccaaaagggcgtccatcaccgcgtggagcagaacatcggcgtccgaatgtccctgaagtcccttctcatagggaatcggaactccccccagaaacagctgacgatccggagcaaaagcgtgaacatcataaccgattccgatcgacggaatcattcccgccggagaaaacggatttttcgccgtttcctccgcctcattctttcgctgctccgccccgccggagatctccttcgcgatcactttcgccgacttgagatcctccggcgtggtaattttaatatttccctcatcgctttccactaccgcaacttcacggccaaaggcctcgacgacggaagcgtcgtccgtaactttcagatttctgtcgcaaagaaccttatcgtaagcttctttcaaaagcgctgcagaaaacccctgaggcgtctgcaccgctctgagattggaccggtccggagttcccgctaccgtcccgttctccacgatcttgatcgtatcctttacgctgacgcagggaaccgcggcttcccgtcggtctgccgcagcgatgacgtcgtgaatcagacgctgtgtcacgaaaggccgcgcgccgtcatgtaccagtacgattccgcagtcttccgccacggcgctcagagctttttttacggaatcctgacgctccgagcctccggctaccacagccttcacttttcgcattccatgctgagagacgacggtctgcatacagttatcttcgtcgcccgcgcgtactgcgatgataatctcatcggtataagcatttttttcaaaagcctttaccgatctggcgaggacggacatgccgcccacgtcgaggtattgtttattgataccgcccatccgcgcggaggatccggcggcggcgataatcacgctcacttttttatccttatacattcaaaacccacctgaaaaagcggcggtctccaagcagctcatcggctttttctgctgccgacctttccgccggaaacagcgctttcataaaactctcctttaatttgcatgtttcggcttcgcaaaaatcatgcgtcccgccgaagtctgaagaacactggtgaccactgtggtaatctcccgtccgatatggcgttttccgccttcgacgacaatcatcgtaccgtcgtcgagatatgccagcgcctggctgttttccttaccttcccgcaccggagtgaggaccatctcttcccccggtaaaacgacaggtttcagagtgttggccagctcgttgatgttgagtacggaaacgcctttgatggacgccaccttgttgagattataatcgtttgtgacgacttttccgcccatattgagcgccagctgcagcagcttcgcatctacttctggaatctcattcagcgatttttccgaatcggtattataaatttccactccgtactgactctggattttgttgagaatatccagtcctctgcggcctctgttccgtttcagcggatcagaagagtctgcgatatgacgcagttctaccagaacgaattccggtatcacgattcttccctcgacaaagcccgtcttcatgatatctgcaatccggccgtcgatgatgacgctggtatccaaaatcttcggagacatctgactatgacgggaggccttgttttttccggcggtttttccgcctttagagacggtcatctgccggagtcccaccacaatgtctttcgacttttttcgcgcgatatacatgccggtgtaaccaaaaaatatgtagaccagaattgacaaaatcgttccgagcacaggtacgttcagcgtactccacagagcgctgatcaaaaaagcgatcaaaagaccgagcaccagcccgatcgttccgcagatcagttcgtgaagcggtacttttctcagactgacgtccagttcctgagcgaatttttcactgcctttctgcgcatgcggagctatgataaagaagatgagtccggttactgctatgcatacgacaccaaggataaacgaccacgtctcggaaatctttgatatcgcagggatcagctgtagtaaataagctgcaaggaaaaaaattcctgctccgcaaaccatgcccaaaagagtgaaaatccatcgaaataatcttttaaacattacattttcctcctttccccggaaattttttcgaaaagccgacatgcaggaaaaacactgaaaaaattttcatcttaaccggcggccgcgatatgccaaacggataagccctttttccgcaaggatgtcccgctctttatgcctggctttgcgatcgtaaacttcaatctaagtatacagtttctataatataacaagctgccgattgagacaatccgcagcttgaataaatatcggtattttttgtcaaacaacgccgttcattatggtatcttcgataaatttgtcggcgctgtccgccgagactccttttgcgagaacgatctcgctcatcagaagctgttttgcgttgctgagcatctttttttcgccggtggagagctttttccgggaatccgctcgaaggagatttctcaccacctccgcaatttctctgagatcaccggttttcagtttttccatattatcacggtttcttttgttccagttatccgacatcggagtggactccgactgcagtatctgtgttacttcggtgagcgtctccggttctacgatataacgcactcctacctttccggaggtttctaccggtaccatcaccttcatatcgctgtgagacagccggagtatatagtaacttctcggctcgccgagaatcgtctgttcttcaatcccttcgatcaccccggctccgtgcatgggatacgcaactttatcgccaatagtaaacatattcgtccctcctactgtaataaagtataccgcatgaaaacaccattgtcaataaataaactatatatgatactgtatcgcatgtcatatgtcaatatcatttttcagctttttctgaacttttcgctttttgtttttccggggtactcataattttctcacatgatcttcacaaacgtgatatattataatgaaacaacacaaatgaaaggatggtgcttcggattatggcaaagctcttaatcgtagacgatgaagaaaacatcagagaggtcgtcagggaatacgctgaattcagcggcttcgatgtagaggaggcgggagacggaagagaggcggtaagcctgtgccggatcaacgactacgacctcatcatcatggatatcatgatgccaaagctggacggcttctccgcctgcaaagagataaaaaaagaaaaggatgtccccgtcatcatgatgtctgcccggggagaagaatacgataaactcttcggctttgagctgggaatcgacgactatgtcaccaaaccgttcagccccaaagaactgatggcccgggtcaacgcagtccttaaccggacgaaagccgcggcaaaagacgatcttccggagattctcacattcggcggtctcaccatcgacgcggcgggacgcagcgtatccgtggacgggaaaaaaatcgagctgacgccaaaagaatatgacctcctgttctatctcgtaaaaaacaaaaatatcgctctgtccagggacaagctccttcaggacgtttggggttatgacttcttcggcgacgaccggaccatcgatacccatataaaaaacctcagaaataatttaggaccatacagagatatgatcgtcaccctcagaggagttggatataaatttgaaacttcgaattaatgcgcaggcagaaaacagagtaaaaagcaaaacgatctactatcggatattcacctacttcgcggcattttccgtcgtgattctcatcacgctgtggctgctgcagatcttctttctccagactttttaccagtggatgaagagcagtgaactctacagcctggcggatactatagaagaaggcgtgggcaacgaatcgctttacgataccatctcgcatctcaccgtaaaatcggatatgtatatcgaaatcgagcggggagacagcggtgtgatctacggcacggcacagtcgctgcccagcgagcgcatggctcagttcgcgcagcggtataatacctccgctctgaaagcgaaactgctgacagaagatgtggatcacgtggtaacaaaacagacgatcaatccggggaatacggagaccatgatctatgcctcgattctgggtacagacagcgagacaggagaactcatttatctgttcattttctcgcctctgacgccggtaggcaccaccatcagcatcctcgcaaaaatgctggtcatcgtcaccatactttccatttttatcggactggtgatgtctatcgttatctcccgtcggctggcgcagccgctgtacagtattacagattctgcggcgcagttggccaaagggcattacgatataaaattcgagggcgccggttacgcggagacggaagatctggcggacacgctcaattacgctgcagcggagctctcaaaatcggataaattgcagaaagatctggtcgccaatgtttcacacgacttgaaaactccgctcaccatggtaaaatcctacgcggaaatgatccgggatctgtccggagataatccggaaaaacgcaaccgccaccttcaagtcatcatcaatgaggccgaccggctcaatatgctggtcaacgatctcacctccctgtcgaagatgcaggccggtgtggacagtctcattcccgccgcagtggatttaaagagaatcgcctccgatgtgatagagagtttttctcttcacgccgaacaggacggtttccgcttcgatatagaatcacaaggcgataccacagtcaccgctgacgaaaagaaaatttaccaggttttctccaatctcatcggcaatgcggtccgctattccgcggaggacaggcagatcaccgtgcgcttcacagaaaagcaggataccgtccggtgtgaaatcatcgaccggggacagggaatcgctcagaaagatctcacggcgatctgggacagatactatcagtccagcagcaatctcagccggacgacgaagggttccggactgggcctgtctatcgtcaagcagatttttattcttcacggggcaaaatacggcgtggaaagcgagatcgacaaaggcagcaacttctggtttgaattaaaaaaagatatgtcggtatctccggcggaaaaaaataaagggcggaaaaaagccggtgaaaagacgatgcgtttcagcgccgctgtaaaaaatctgcggggacaggcggacccgcctcctcaggccgcaccggaatcttcgggagcagaaatttcactgaaagaaccggtttcttcagaatctccggcgccaaaatcctctggaccggtgacgtcagcatggcagtcatcgtccggccagatgcaggcgccgcactccggaccggtgtccgcgaagcagaaaggctcttcacacagacagcagactcccgctgaggcgcctgtttttccgccgcaggcatgcggctccccggagacacaatcagcctttaccgctaaaaaagacgttccggatgaaaaataaccggagcaaaatctgatttcctgccggaaaaagcccggcgaaaagataaaggaacgaaattatggcaaaaaaagtgcagacggtctttgtatgcagcgaatgcggccacgagagcctcaaatggatgggacagtgtatctgcggcgcgtggaacacgatgacagaagaaaaagtacttccccaggagggaacagataagcgccgcagaaccggcagcggggggaacagcggagccggcgctttctcccgggctggaaagccgatgcctctgttccgagtaaaatcaggagagaccggccgagtcgataccggaattccggaattcaaccgggtacttggaggcggtctcgtcaaaggctcgctgacgctgatttccggtgaacccggaatcggaaaatccactctgattctgcaggctgccgcaaagatcgcagaaaattgcggcaaagtattatatgtcagcggagaagaatccgaagagcagatcaaaatgcgggccgaccggatctgcagaagtattccggactccctctatattctctccgagacaaacatggaaaatattatcgcacagaaagaacaaattcagccggcctttctcatcatcgattcgatacagaccatgtactctgcagagctggactccgctccgggtaccgtatctcaggtgagagtatgcggaaacgaattgatgcgtatcggcaaaggcagcgatctccccgtactcatcgtggctcatgtgacaaaatccggagatctggcgggtccgaaaatcgtagaacatctggtggataccgtactttattttaccggagaacggagtcacgatctccggattctgcgttcgctgaaaaaccgcttcggcacgacaaatgaaatcggcgctttcgaaatgagagaagaaggactgacagaagtcgcaaacctttcggagacgctgatcgaggagatgagtgaatccgcagaaggatctgccgctacagcgatctatgagggtacccgtcctctgattctggaaattcaggcgcttacgtcgcctgccagcgccggattcccccgccgcacctccgtgggcatcgaccacaaccggctcaacatgatcctggcagtgttggaacgccgggccggaatttcacttgcggcacaggacgtctatctgaatatcatcggcgggatccggccggaaggtacctctgccgatctcgcagtggccttatcgatctactcttctttccgcggaatccccgttcccggaaaaacactgtgcttgggagaaatcagtctcaccggagacctgcgttccgtcacccatgcggaaaaaatcgccagagaagccgcccggatgggcttctcccgaatcatccttccgaaacagaacgccgataagctgaagaagatcgacggtctgcagatcagcggcgcgaaaacgctgagagaggcgataaaaatgctgggatagtaccggtctgatcagcgtctccatttagaaatcagataaaatcagcctcgtcccagcaaaagaaagtagattcatttccgggaaaactctttcaggagaatgcttttccgaaaatgtttattccaatcaacgaaagaagagaaacccttctgccggatcgccggtatttcggatttctcttctttttctattgtctcgtctctattttatgaatttttgccaataacagaaaactgagatttattcagctcacttctccttttcagaaaatctctgaagtatcgccgccgcttcagcacgcgcagtattccccagaggatccagacggccgtttccttttcccgaaaggaaacccgcgccgatcgcccaggacaaaccttcttcagcccattcggacgcctgcgcgctgtccgcaaactgattcagatctccggatttctcagcttccatttctttgtattgcgcatagcgttggaaaatcaccgctatttcctgtctggaaacagcccggtccggagagaataccgtatcgctgtatcccttcacaattccttcgctgactgccgagcgcaccgcttcgccatagtaagcgtccggggagacatcataaaaggacatcagataattgacgaccggccggttttccattcgccacagcaaagtcaccagcatagcgcgggtgatttctctctgaggcgcaaactctgtctctgtcacaccgctgaaaaaaccggcagccgccgtataccgcaccgcttcataaaaccagtcgtcctcgctcacatcggagaaaggattgatccatgataccgccggatcttctttccattttgcgtacagcgtcagatttccgattattttctgcccgaaatcatatgccgacgtacacgccttatcagtaaaccagcctccgaagataaatccttcccgtaccggttctttcggctctttaatcaacgttccccggtcagccttcatatcggaaatatcacttcctccgttagaatcaaaatgaatggtataccgaacgggatcatctccaccgccgccggaacccgaagcgccgatctccaccggatacgcagcttcgttcagcgcataatctacgacataaattttgagggaactcttatccagatctgtaatatcaaaagaaaacctggcagccggagtgttcgccggctgaatctcgatcttcggaagagccgtatccggactactcgctaattcctcttccaggtttttatccagcacgtaggctgccatcacaaacttattgtcatgagcggtaaatgtaagaaattcccttccactgttcctctctgctgatatatcggataccgtaggatactgtctgtctacataaaaatccattgaaacactctgttcccggccagcgctgtcattctccgacccccggttcagactgccggtgacgacagcggtataatctccatccggaagatagacagcatctccgtcttcagattcttctgctttcacactgatatcgaaacagaaaggtacgaatttactaaactcatattcagcggcctcttcttcgaagaccgtttcgtcttcactgtctatgatctcaactttcggcgattttacagatcgaagaggattgacggaaacgcagagaaaatcatgactgccgtcgctgttgggtgagatacctgcaaatttttccccggcatcgtctgcaccatctgcaaacagatttactcccagaggagtgcagacatctacgagcattccattcacgttggtctgataacatccgatcacgcctgcttctccgtcgctgctgcccagaaaagtagctcccagttcgctgtctccttcataattcggccggtcgaataccggcgcactttcccagtctccgcagaaaccgctgtacggaatattgatctgcggtactgaattaccgttatctgttgatgatggcctcagagagagaaaaccttccacgaaaaatccgttggtaaaaatttctttattctcctgtatcttactcgtatctaaagtgacttcgacctttatcgtcacctgaccgtttgcagggacagtaatcgaattcgatcctgtatccggactccctcccccggatccgtctgccggtgaaacaaccgtatagtcttctatagcaagatttttcgtaccgcccacataatttctgccgtcttcccccagcgtgacgtcatcggtagtcacggagagatccactccgtcataggtcacatcctgatcggaaaaattacgggccgtacactctatggtaaatttaccatcttctaattcgcccaattctccgaggctgagcttcgtctttccgccatcccggtccggatctccggtcagaatgactggagtctcagacgcggccttgagattcagcaggcccgcaccctgcagccgcggcgaatacggagtcttctcaccgttgtcataatactgaatttccgcggtggacatcatgagattctcaacaaaagaggattgggaaccctcctgcggcatcgtcagacttctgccgtttatacctctaccggatccatagtttgtttcgatatactgttttaaaagagtcacagcgccggtgatatgcggcgcagccatagaagttccgttgaacgattcatatttattgtggttttcgtcgggtaccgaggaataaattcctccgccgggagccgtgatttccggtttcagctgaagagtatgatttgtcgcccagctggaaaagctgctcatgccgctgtccggattgtcactgctcgattctatcagctcctttcccacagttatcgtcttcgtttcagcgcttttaagcttctccccgtcagatttgccgatcacagcggaaggaagttcctctcccatcaggaaacgttcggatatgtcgtcactggtatttcggatgataacccctgccgcgccggcatccttcgcattttgaatcttcaccgtaaaatcgagctctcctctgtctatgagagctattttatctccaagatccttgtcggaaaaatccgtttcttttccaagattacaatacacatattcataatccacaggagcgcccggactgtctgccgctgccccgaatgcttctccgaacagattggtatccgtgctcacagaatattttatctgagaaccatctgccgctgtcatttcataataggatgtccggattttcgtgttatttgccgaagccacggcggtggatgaacccaagtctgccggcattcctgatgcagagtaatcgatattttcaggcaaaaccgctctatcatgatatcctctggagctgttgcccgccgacacagagatgaagatatccgccttagcggcattctcgatggctgttttcaacgcttccgtgctggatgcataattcgaccccaagctgaggttgacagcggaaacatccatcttcgcagcatcgtcgatagccgccagaattgcatcatacgacagattgccgtcccgatcctgaacacacataaagatcagctgtgtttccggcgccacgcctgtaaaatcgtatccattttggctgccctggtcgtttttccctaccgcgatcccggaaacgtgactgccgtgtatgacttccggtatatcgcagtaaacatctttacttctatctgcataattaaaggcaaatggaattttttcgcttctgtaaacatcattgacagcaacctccatcttacgaatattcaaatccgtacctaatcccgcatcatgaagaaagttttcaatatccgtcttactgtatttcggattttctatcccctgctgaaatacctcatgttcgacgtctaactccgaatcgataacaaccaccgcctggccttccccgtcgattccccgagcatgcatgtccgtcgcatggatcatgtcacagcacgttttggccgccgtactgccatctccatccgccgggagagccggggctggcataaggacgtttttccgcgatatatacatttttcaccccggaaagactttcgatttctgcgatatccctacgatccgcctcgatggaaaagccgttgagaacatctgtataggtaaagtccggctcaacgtcttcccctatctcctcctgaatctccgacagcacccgttcctgctctgatattacctgttttctcgcagctttcgctctataggtagcggaaaaccgcgatgctcccatgctcttagcagatgtatcttccagaaccgccggctgttccaactcgatgataagcgagacccggtcttcgccggacaccgcagtccccgatgccgcggatgcgggcagagccggaatcagcagcgatacggacagaagtaccgccgatattttttgaatgatcctcataataatctccttttacaaaaatataacaactatagagaaacaaactgaaatttatctgcggattccaggagcagacctgtgataaatcacagcgtttttgttaacttatattataacggcaaaaggataacagaaggacgacaaaattctacttacagcatttcgtttttgaaattgaattttactgttctctcttggttttagcacaatgcaaaagatacatcgtaaatttacgatgtatcttttcttacaaaaatcaagaaagaaaatatatccacgctacaccgataccggacggcaccaggcagacgccgcgccgtcccggttcttccctgtgtcgatttcaatctccacgccgtaaaggcgcgagatattttcctccgtgagaacatcgcggacctcaccggatacgacactcccgtcccgaaaaaagagaaccgcctcatccgcgcaaagaaatgcctgatcgggagagtgtgtaatcatgacaacccctttaccgctgtttttcaattccacgacccgtttcagcacctgaatctgatttccatagtcgagatttgacgtaggttcatccatcataataaactccggctcctgcaccaaagctctggcaatcaatgtcatctgctgttcaccgccgctgatttccgaataaagtttatctttcagatacagaatatccagtttttcgagaatctcatcgcatcttcgatagtcgcttctgcccggttctgcgaacagacggaggtgagacgctctgcccatcagcacgatatctctgacactgtagggaaagggatttccgtgaatctgaggcacataaccgatgatctttgccaattcttttctcggaatcgtctgaatatctctttcatcgataaaaatactgccgcttaccggcttcagaaaaccgagaatcgtcttaaaaaatgtactcttccctacaccgttaggccccagaatacagactgcccttccggtctcaaaggaaacgctgacatcctccatcaagctcctgcgattatacccgcaggaaagattctgcgttacaaatttcataaaaactgctccctttctgcgatcaccgtccgcccctttcctgtattctccggcgacggctgccgttttggcaatcctctcgcactgccgcgctgtcgtactctgtaaatctttttaatttcctatctcttttctccgcatcagcaggctttttccaggcctctatctgaagtacattgccggcggccttcttcgcccacctcatgcgattttccctacagcagcgttctctaccgctggctccggtacatgagaatcaggaaaaatggagcacccactgcggcggtcagaattcccagcggaatctccatcgatgttgcgcccctggcgatatcgtccaccagaagaagaaatgtacttcccatgagcagagatgccggcagaagctttctgaaatccggccccgctacaatcctcgccatatgagggataataagtcccacccagccgataaggccgcctacggctacgatagaggatgtgatcagcgtcgcacagacgatgacgatgatccgcattctcgtaatattgattcccatagccagagcctcttcatcgggaagggacagaagattgattctccatttcaggagaatcagcggaataagtccgatgaccagagggatgaccagcagcggcagagaagagggaaccacagcggccaaagagcccatcagccagaaagtgatggccggcagcttgctgtaaggatcggccacatatttcatcagtgaaattcccgcctcaaacagagccgacatgacgattcccgtgaggacgagagacagaatcattcccgccttcctgctgatgatatgagcaaaataataagtcagtgcgactgcggcaagtccgaagacaaaagctgtcagctgcacggccgccgcagaccatgacagcagaagcgccagcgccgcgcccatgccggctccggcggtagcacccagaatatccggagaaaccattggattccgcatcgttccctgatatacgcaccccgaaacggcaagaccgccgcccacgatacaagcgcccagaactctcggaaggcgtatattgaagaagactttttcctttgccgccggaattcctgattccgctccggtgatccgctctgcgatcatgcgaaaaatctctcccggagaaatcgaatactttccccacataaaagacaggaagaaaaccgctccgaagatgatcagcagtgcggcgaaccatacggcatttttcttttctcgttttttctttttcataactattgtaacctatcgtcctcccccgccggcatactgcatcacagaatctttccctgtacaggccgcacccggactacagattttcgcagccggtccgtatttccacggtaatcgtacttcctttccgcagtccatcgctggcttttctcacgaaaatgtatccgttgtgtccggtcagatcccggtcaaatcttcccatatccaccggcgacgcatgaagcacgccgtccggcgttcgcgtcagcagaagcggatacataaaatccgtcttatgatgcggcggaagatcctcatcgagcacggcctccaccgacgtgatccggaattcccgtccaagacaggagaaaaccgccggctttacataaaagtcaaaggtcatctcctcccctccgggaggacccacaagactgattaccggcgtgccgtccacgacagcaaaccctgttcgctttccggggccgtgataaacagaggaaaaatacagcctgcccgcggcggacagattatcctgcatgtaatcgcgaagacccctgcccgaacctcctccggcgacgatgagatccgcctctttcgcggcacttctcagcgtcgcctgaatcagttccggattgtccggctgaatcggccagagaagaggaaccgcgccccattcttttaatttcgccgccatagaataggagtttgactctacggtctgtcccggtccgggctgaagcacgcccggcaccagctcatcgcccgtaggtatgatcgcgactctcggcttgcgtttcaccggtacggtcataacccctcccattgcgaagatattcagatgagccggcgtcacatacgttcccgcggacgccagcagttctccctgcgccatcttttctcccggaaatatgatattctgctcccgttccacgtcgtttggaaggatttctctcagacagccgtcctcaaacctcgtctgttctatcatcaccatggtgtcgaactcctcccgcgatacaggaatccccgtattggaataagaatagtccacaccctctttccaggaagaaaagtcaccggcgttcgtctcccgatccataatttcccgataagcatcataggagaatacaattccatcccagcggctgcaccgtaccgcaggcacatcgtatctcgaacggatatcttcaaacaccgttctgccgcaggcatcggacagagctacgatctctttctccggactgtatttcatatgactgcagatcagcttcaccgcgtcatcccggtgaatattatcgattgcttcgctcatttcttctgtctcctctcctttcgattttccgtctcttgagaaaatacccagacggcgctgggcgccgcccgggtatttacatttaagaaacgattattttattttgtctccggatccaaatgcgccagaatccgcgttacttcatcatctgataaatcataatcaaagaattcggaataaaatgcctttgtctccgccttcatatcgacgtcagagaacgcttccggatagagtgtgctcgccagatagagcatcagcagcggcttctgaacaccggaatcccagaagaatactccggtaggaaccacttctacatgatcattttttaccgctttcatctcgctgtagacatcctgagcgaccatttcatcgatcacctgttccgctgtcttgtttccggaagaacccgcatgatctacgaagatataatcaggatcccatgccaccagctgttctgccgtcacttccatgctgtttccaccgtcgatttcagatgtcacaggcatgcctccgcacagctcgatgagatcgagaatgctggacttattgccatgcgttttcaggatgttctcatttgcgaaatatactgtcttgcgttccgcttcagggatgttcttcaccccttctttgaccttatccgctacctcatagaagtagctgctgtattcctctgcgatcttcggcgcgtctccgccgatcgcctctgcgtatacctctaattcatccacgatagaatcatacttatcggtggaagccatcggcacgacatacattccagcctcttccatcgctttggtcgtctccggattcgggaagttaaatacgagatccggttcgtagcccatcagatcctcgatattcggagcgctgtgcgcattcgtaatccccggaacatcattgagatgcttatatatgacattcgaccaaggccaactgttgatatgatagtctccgtcaaatacgattttatcctctgcccccagcagaaccactttttcataggacggaccgaaaagacatccgatcttgtccaccttttcgggaacggtgacctccgtgccgtcgcagtttgtaattaccttcgtacccgtctcaccggtctgaccgcatcctgtcgccaccgcgagaatcatcattatactcatcagagtacagagaatttttttcattaaatgcctcctttattacaattaacctctattgaattttagctttaatttgatttgaagtcaatatatcggtaatattttgtaataattatatctgttatattttacatatattttataatataatgttatattttttaaatttatcttatgaagagacgtttccgggcagcgcataaaaaatcgctcattgacgaattggcggtgaacatacagactgacgcgtccgaagctctgaatcgacttgcgcagcaaatcgcaaaaccgacagcagacctgaaaaattcgtatctccgcttaaaaacgcagacggaccgcgtatctgtaagatacgcggtccgtccttcatgtctgtcttcggcttcgtaaagcggtattctgttatgcgctgaggatcgacgtccagagttcatcatataaagcccggatattctccggaagattggtgaaagtctcatactgattcagctgatcccccgtcggatacatatcttcgttgtttttcatctcctcggggagaagttcccgggcagcgctctctgctgtagagtagctgatccactcggtattctgcgccatattctcaggttttaacaggaaattgataaacttctctgcgccctctttattctgagcgtccttagggatgcacatagcgtctacataaagattgctgccttcttccggcttataaagaccgagatcgacatcgctgtcttcgccaagttcattcagcatgagataataatcgccgacataataagtagcgatcgccgcctctccgttttccatcttgtcgaagatctgatccatcacatacgcctgtaccagcggcttctgctttttcagaagatctgcggcttcgcggatctgcgcttcgtcggtggtattgtaagagtagcccagttccttgagagcgataccgatagcatccctggaattgtcaaacatcagaatgttatccttatatttctcattccagagaatttcccagccggtgaggtccgcttcgtctaccatatccttattgtaaataatagctaccgtaccccactgatacggcgcggagaatttaccttccgggtcgtattccggattccggaaatcctcatcgatatactgagcattcggaacgttgtcccagtcgatttcctggatcatgtcctcttccgccatacgggccaccatataatcggacggtacgacgacatcataagatacgccgccagccttcatcttcgcatacatctcttcgcaggtagccacagtggtatagtttactttgattcccgtctcatcctcaaaatctctgagaaggtcttcatcgatatactctccccagttgaatacattgatcgtctgcgaaggatcggaagatccgcagccggtcagaccgatacatccggtgatgaccagaaccgtaatcaggaacagactggtcagtcctgcagttattttctttcccttgatttttttcatcgatttatattcctttcccgttctctttccgcccgaagctctctcaggttgatcacgatcagaagcagcagaataaacacgaacatcagcgtacagagcgcattgatttccgggcttattctcttcttcgtcataccgaagatcagcacacccaatgtctgcgacgtcggacccgaagtgaagtaactgactactacatcgtctatcgacaatgtaaaggccatgatcaggccggtgacgattcccgtggtaatctgaggcagtacgaccctgaaaaatgcctgcatactgcccgctcccaagtcaagagccgcctcgtactgccgcttgtccatctgacgaagtttcggcatcacgcacaacagcacatacggagtatcaaaagtgatatgcgccagcagaagcgttccgaatcccagcgtaaaaaaatccattcggagcgtctgcgaaaaaaagatgaaaaggagcatcagggagacgcccatgatgatatccggattcatcgtaggtatattgttcgtggccataaccagccttctgggtgcctttttcatagcaaagatccccagtgcggcggcagttccgagaatggtagagatcactgccgaacagaccgccaccagaagcgtgacctttattgcgtggataatctccgcgtcccggaacagctcctggtaccagcgcagggaaaagcccgtccacaccgaacggctcttcgtgctgttgaacgagaaggccatgaggagaaaaatcggcgcgtacataaagagaaaaatgagcaccatgtaaatttttcccatatattttttcacagcagcacactcccttctccctcaccattcttatcgatcttaccggtgagccagataaataccatgatgatgaccatcatgaccagagagattgctgcgcccatattagcgttgtacgtgctgccgaggaactgcatttcgatcagatcccccaccagcatattggctccgcctcccagtatcttggagatgacaaaggtacttaccgcaggcacgaagaccatgataattccagacagaacccccggaatggacagcggaaagacaacctttgagaaaacctgaaaatcgctggctcccatatcctttgccgcttcaatatacgaaggatccatctttgccatcaccgtataaatcggcagaatcataaaaggcagatagttatatatcatccccagagccactgctgccggtgtattgatgatatatatctccggcagatgcagagaactcagaaaattgttcagaagtccgttattttccagaatcgtcagccacgcgtaagtgcggaccagaaaattcatccacatcggcagcatgatcagaatcatggcgatggtctgatgcttcggcttcagccgcgacatgatatatgccagagggtatccgaggatcagacagacaactgtagagagaatcgctaggcgaaacgatctccaaaacactcccgtatacttcgtcatcgaggaaaaattttccagtgtaacttcacccatgctgttggtaaatgcaaaatagatgacgataaacagcggtacgacggtaaagagcagaagccagaaaatatacggaaaggaaaacgctttattgctcttcatcagtcgtcctcctcttcaggatccgtaggatcctgctccctcatatgctccagctcggtaaccgtagcgatatcgctctttttcataatatgaatattgtcgggatccacgtcgagatacttatcggctcccacaggacatgctactgtggaatgtaccataaaagtaaagccctccgtctccaccagcatttcataatgtacgcccttgaaaagacacgtctggacacggcctttcagcagacggtccgcctgctgaatgcttccggaacttttttccagcagcacgatatcctccgggcggatgaccagatccaccggctcgttcttttcaaatcccgtatccacgcaatcatatacggtgccgaggaactcaatgaccttatcctgcttcatgatgcccgggatgatattgctctcaccgataaaatcggcgacaaaggcgttggccggttcattgtagatatcgatcggcgtgccctgctggagaatttcaccctgattcataacaacgacggtatctgacatcgtcagagcctcttcctgatcatgcgtgacatagataaacgtcatgttcagcgtctcgtgaagatttttcagttcgacctgcatttccttgcgaagtttcagatccaatgccccgagaggttcgtcgagcagcagaactttcggctgctgaattaccgctctggcgatagcaactctctgctgctgaccgccggaaagagatgcgaccgatcgtctgccgaatcccttcagatttacgagctccagcatctcttccactcgtcgggcgacttcttttttgtctacttttcgtatattgaggccaaacgcgatattttccgctacgttgaggtgcggaaagagcgcgtatttctgaaataccgtgttgatgtttctcttattcggcggaacatcattgattctctgagaagcgaagaatacgtcccccgcatccggcttctcaaagcctccgataattctgagggtcgtcgtctttccgcagcccgacgggccgaggagagttacgaattccccatcattaacagaaagattcagcgacttcaaaatgacgtcatcatcgaacgactttgcgacgccgctgagccggataagctcattttttttcatttaccagtcctccttgcaaaaatcctgtcgtatctgttaaaacagctcatgaaacaaaaacttgtccctaaatagtaacatttttaatatttaatcttccttatagtaccatattcccgtcatataaaatacagtatttcgtaaatcctctgtgaaaacagagactcatatatctaatttcatatcgccttttcgaatccacccccacttgcgcatcagagaggcgaaaaatgctgacagaactgccggcgctgcgaaaagcatgatgagaatttccgtcgcaacgatgacgggagaacctcccgcagctgtcatcgtctgatacatcgtcacgggacctaccagaccggaagtccccataccgcagcccaccgcattatttgtcagcttcagcaaacaggtgctcaccggtcccaaaacggcgctggataatatcgccggcagccagatcaccggacggcgcataatattggaaacctggagcatggatgtgccgattccctgggaaataagtccgctcataccgttctcacggaaactggctaccgcaaaaccgatcatattcgccgcacagcctacggtagccgctccggcggaaatcccgcccagcccgagcatgacgccgaaagccgcagaactgatggggagtgtcagaagcattcccatgacgacggctacgacgattcccataagaaacggctgctgttccgtggcccagatgataagttcaccgagataggccataagagccgagcagggcggtcccacagcgatcccaacagcggatcccgccgcgatgacagacacaggagtcagtatgatgtccaggcctgtccttccggagatgagtatgccgatttcgacagcggcgacagatgcgataaatgcgcccagaggatcacctgcccctgctaataccacggaaccgtcggccaaaaacgaaccgtcgatcatcctgccggcatatgcgccgaccgttcccgccacagccgccgacaccgcgaccagaatcggcgcctgatacttgcaggcaatgccgacgccgattcccgcacccgtaagcgctttcgccgccgatgcgataaaaatcatgtaaccgccggcggttccgccgacataaacgccgacctgcccgagaatcgttccgataatcagcgtagcgaaaaggccgctggccatccccgacagaccgtcgataaatatgtgattcagaattcttttcattatatatctcttttccgcatatgaaataccggctgccgcaccgcttgtatccggcggcaaccggaaaaaacatctcttccgcgcactctctttactgcagagtctgcaggcagattaattggcgtttttcggatcggagatcccgaaggcttcttttctggaactctctgtcacttcgatattgagcaggcttctcatctcggagagtcccctcagcgcaatctcataatcgataaagagattcccggtgatcctttccggctccaagtcgttaaccacgctgttcgtaaggatttccataggaaatgcaccgtacggcgtctcatagacactgtcaaaacgcttaccctgatgaaattccataacggtgtccagcataatcccgctaccgaagcgtttcatccgcacggacccgtcgtctccgatcctcagcgtcgtctttacgcctgccagccccgacatttcgctttcctcatacaccagatacgtggctccgccttttttataagccttaccttccgtcataaattccacggtttcttccgaaacctcatcatttctgtcaatctgtcttccgacgattctgagcataatatctttcatatcctaattcaactatcctttcgattgtctctgaatacggcagacccgcattttcccacaggagcggaaacatactgaaagaagtgaatcccggaagagtattgatctcattgagataaatctcatccgtccgtttgtcgataaagaaatcacatctggcaaatccggctccgtccagagccgagaatccccttaccgcgtattcacgaattttttccgaaacctccgcaggaatgtccgccggaatcttcatcttcggttttccgtcgtctacgtactttgcctcatagtcataaaaatcttccgtggccacgatctcccctgtcacagccgcttcaatccggtaatttcccaggacagccgtttcgatttctctgcagcagatctctttttctatgaggattctccgatcaaatccggcggcgtatttcagcgcctctctgatctgactgctgtcggacactctggaaatgccgacgctggagccctggttcgccggcttgacataaaccggatatcctaattcccgttcaatgcgaaggactacgccgtccagatcctcctccagttcctcagcagccgcaggaacatacggacacaccgggattccggctctgatgaagagttcctttgaaatgatcttatccattgcagctgccgaagcggtgactccgcagccgccgtaagggatatccgccatctcgagaagtccctgaagctttccgtcctcgcagtatgtaccgtgtacgacggggagcgcaaaatcgatgatatccttcagagatctgcctccggcgcccaccacggaaaaagagtaattttccgggtcttccgccaaggctctgaccgcataatcctcccactcgcccgttacgattttctccacgggaccgtcgtacagataccatcttccgtcctttgtgataccgatgggaataatctcatacttcgaattatccacagcgcccatcaccgatgtggccgacatcctggaaacctcatgttcttccgaccgtcctccaaaaataatacccaattttatcataacaatcgcttcccttcaaactgctcaacagaaaaatttccgttttcttacggcccgttcctccggcctcacgggggcgcacaccacatcgcctattaacgatgtctcatttccgccgttcacttagtatagcataaatctatgaaaaatatgcataaaaaatgttcggatatcaaaaggcgcaggtgagttaacacctgcgcctctgtgccgcacatctcagcttttttcggaagagaacgtctccctgtccgcaccgccactctccgctctacagcgtagccgccatgacagctttgatcgtatgcatcctgttttccgcctcttcaaatacgatagactgcggcgacagaaaaacttcgtcggtcacttccatttccgtaatgccgaatttacgcccgatctccgcaccgatggcggtattcagatcgtggaatgccggcagacaatgcatgaagacacactgaggatccgcgttatccatagctttcttgttcacctgatatggactgagttcttcaatccgctccgcccatacttcatccggttcgcccatggaaacccagacgtccgtatagatgacatctgcgcccctggttccctcttccggatccgctgtcagcgtaatcgatccgccggtctgcgccgccagctctctgcagtattccacgagcttctcctcaggaaaatacttttccgaagtacatgcggtgaagtgcatgcccatctttgcacagcccaccatcagggaattccccatattatatctggcgtctcccatatatgtgaatttgatatctttcagataaccgaaatgctcgcggatcgtgagaaaatcggccagaatctgtgttggatgagattcgttggtcagtccgttccacacgggaacaccggcgtatttggccagttcttcaacgatgtcctgaccgaagccccggtattcgattccgtcgaacatgcgccccagaactttcgccgtatccgcaatactctctttcttgccgatctgagagccggatggatccagataagtcactcccatacccagatcgtgtcccgccacttcaaaagcacatctcgtacgcgtgctcgtcttttcaaaaatcagcgctatatttttgccgcgaaacatatccactggctcgccggccttttttttcgccttgagatccgccgccagatcgatgagatatgtcatctcttccggagtgagatccataattttaagaagatgtcttccttttaaattcattatgctttttcctcctcatatttttcttcacagtatctgcagcggtacacacgattctccggatcggtgagaataaattcatgttttaatccctgttcgacagatgtgatgcagcgcggattcttacacttggccagtccgacgatcttcttcggcaacgtcagatattttttctcgatgatatttccgtttcttatcacattgatcgtgatattgtcgtccagaaaaccgagaaaatcgagatcgatatccatccggccttcgattttaatcatatctttcagtccctgctttttgctgcgggcgttcttgataatcgccacctgtccgtcgtattcatccagattcagcaaatcgtatatgatcagactttttcccgccttgatatggtcgattacataaccgttttcaattccgctgatatttaacatcccggcacctccagttctaagagtttcatgatcagcgcctgccggatgtagacaccgtactgcgcctgtcggaaatacatggctctcggatcgtcgtctacttccacggcgatctcattgactctcggcagcggatgcatgacgatcatatcctccggcgccagtttcatcttaaacttatccaggatatatctgtccttcagtctgatgtagtccgcttcattgaagaaacgctctttctgaacgcgggtcatgtagagaatgtccagcttcggcatggcggcttccagatcgtcgacctcttcaaagggaatatgattctgctgaagcacatcgtttctcacaaaatccgggatccgcagttcgtccggcgagatcagcacaaagcggatattttcataacgaatcagagccgaaatcagagagtgcaccgtacggccgaacttcagatctccgcacagcccgatagtcagatcgctgagtctgcctttctccgaatgaatcgtcagaagatcggtcagagtctgagtcggatgctggtgtccgccgtctcccgcattgatgatcggcaccggcgatttgtcggccgctgccataggcgcgccttcttttggatgtcgcatcgcgatgatgtccgcataacagcccacggttctgacggtatcggctacgctctctcccttggccgcagaagacgaatccgcgctggcaaaacccaggacgctgcctcccagtccgagcatggctgattcaaaactcagtctcgtacgggtacttggctcataaaaacaagtcgccagcttttttccgtccgctacatgagcgaatttctccggattctcttcgatctcctctgctatgcagatcaattcctcgatctcttccgttgtaaaatcggtaggacgtaataaatgtctcatattcctccccctgctatctgtccgtttggctccggtgtaattaaaaaaactgatttttcgcatatgattttattatgtttcaacgacgccgtcaaatggtaaaaaaagataaatcgcagggcttttcctctgaaaaaagagagcaggtccgtttccgcccgtctcatcaaaaaccgccgcccgcagcagtctgccgcaggcggcggtctttcgcttcctatgatatttatgcggtgatcactgtgccgctctcgccccgcatagccagcggcgccttctccagcgacgcgataatcgctttattgcccttttttgctctggcgaattctacagccgcctgtaccttcggcagcatagagcccggggcgaactgcccttcttcgcaccatcgttccgcctcttccgccgtcatttcagtcagcgcccgttccgtcggcatgccgaaatccaggcagacccgatccaccgcggtgaggataaatagatgatccgcacccaccacttccgccagcttagccgatgcgaagtccttgtcgatgatcgccggcacgccgttgaagtctccttccttatcctttaccaccggaatccctccgccaccgcaggcgatgacgatatattcgttgtccaggagattgagaatcgattccttctccacgatatccaccggtctcggcgatggtaccgtcctccgccatcccctgccggaatcctccgcaaaagtgaaattcggataatcctttttcagctgatccgcttcttctttcgtataaaatgcgccgatgggtttcgtcggatgctgaaaagcctcgtcgccggcatccaccagcgtctgagttacgacagtggccacgtgccacggcatcttctgaatccgcagttcccgctgaatcccctgctgaagatgataaccgatatatccctggctcattgccgcacactccatcagatccatatgagggattttctccgactggccgcaggcgatgtcaaaagccgtattgatcatcccaacctgcggacc

SEQ ID NO: 571 - DNA, 17537 bp, Unknown
  16S sequences of unknown bacteria
tcataggcgtctacggcttcgcggagccgctcagggtcggcgaccgtctgactttcggcgacatggcgatctacacgatggttaagacgaacactttcaacggaatgccgcttccggatatagtcattgaacgtgagaatggcgggtgcgaggttctgagacggtttggatatgaagatttcttttcacgtctgtgaattgtatattgcgataaacgagcaataaagcggcttcaaaaaccgttattatttatttaatcggcagtaaatcatgctatcagtttgtatataacgcatatataaaaaaggctattgacaatcccggaaatgtgtgttataattttaacacaggacaaagaccggtgcctgccggtcaaaaagatttgaaaggaagtcaaaacactatggcaagattcactttaccgagagacatttaccacggaaaggacgcgcttgacgcgctgaagaccttcgagggcaagaaggctatcgtatgtacgggcggcggaagcatgaagagattcggtttcctcgacaaggtcgtgaacaacctgaaggaagcgggaatggaagttcagctcttcgagggcattgagcctgacccgtctgtcgagacggtcatgcgcggcgcggacgccatgcttaagttccagcctgactggatagtcgctatcggcggcggttcgcctatcgacgcggcgaaggcaatgtggatcaagtacgagtatccggaagtcaccttcgaggatatgtgcaaggtcttcggaatcccgaagctccgcaggaaggcacatttctgcgctatctcctcgacgtccggcacggctaccgaggtcacggctttctcgatcataaccgactattcgaagggcatcaagtacccgatcgccgacttcgagatcacgccggatgtcgcgattgtcgaccctgagctcgccgagaccatgccgcagaagctcgtcgctcatactggtatggacgcaatgacgcacgctatcgaggcttatgtctcgaccgctaactgtgatttcaccgatccgctcgctctgcacgcgattgagatgattcagcgcgaccttgtgaagtcctacaacggagacatgaccgcccgcgacaatatgcacaacgcgcagtgcctcgccggaatggcgttctcgaacgctctgctcggaatagttcactctatggcgcataagaccggagcggcgttcgctgactacggcgcgcatatcattcacggagccgcgaacgcgatgtatctcccgaaggtcatcgctttcaacgcgaaggacgagaccgcgaagaagcgttacgcttacattgtcgacagaatgggaatcgccgacaagagcgcgtcggacgacgacaaggtcaaggctctcatcgcgtacctgcgcggcatgaacgacgagctgaagatcccgcacagcatcaaccactacggcaaggacagctatccgaccgagaccggctttgtaccggagaacgtcttcctcgagagactgccggagatcgcgaagaacgccatcgccgacgcctgcaccggctccaacccgcgtcagccctcgcaggaggaaatggagaagctgctcaagtgctgctactatgacactgaggttgacttctgattgtctgaatctgaaaacagcgtgaggtgaacagcgccccgacacgagagtgccggggcgctttgtttcatattgttcagttctgtcttgacttttgacgctctgaatggtataatagaagctgaaggagatcagtttccgagcgcggcgtattcttcagtcagcttcttcagaccttcgttgacacttgtctcgattttcgcgtattctgacgcgatgttggtcttcttgtctcttatcatgttgcggaagagatacggaaggttcgcgagctctccggagtgcagaatcgagaagtcatacatgcgtccgttcatgatgatgtcgagcatcgcgacagactgctcgtcgcgggcgtattttgaggtcagcgctacgtcatagtacgcagggacgaccgagaagtgattctctctcgtgagcgcttcggtgactcttccgacgaactctgtgtcctgaaccgtcttcggcaccgacagaagcgagtagttgtccattgagttcgagtagtagtttttctggttctcgtcgaacttcgggtacgggaggatgccgtaatcgtccttcatcgctctcagggtgctgaacgagttgtttatccacgtggtcaggaacgcggtgtttccgttcgcgaagacctcgatttccttgccgtcgccgagtgtcaggtaggtcttggtgtcgtagtagagcgagtagaccttctctatcgcggtctgtgtctttccgaggtctatgcacgcggcaggtgaacctttgtcatcctttttggtcagcgggatatcgaacgccgcggtccacgcgtcgaggtttgttaccttgtccgccgcgaagccgtaggagtcgccctcgtccgtctttccgtcgccgtttatgtcctgatacatatcctttgacaggtcgatcagcgtgtctatagtccattttccgtcaagtacggtctggtagagatccgggaactggttagcctcggcgatgcgctgattgaagaacaccgcgtaggacagaagaagtgtggtgatcgacaggtctccgaccgcgacgaactggttgccgtttatgttgaacgcctcgttggcgtcagtgacccaccattccttcgagaagtcgacgaccgggacgttcttccatgaatagtagaagccctgaagcgcgggtccgcccgcgagccatgtatagacggcggtaaggtcgtatacatcgtcgcccgccataaggttcttcgatatatccgacacctgaaccgtctcgctttcggacggtactgtctttatctttacgttcagataatcctcgaccttgaggttgcggttgtagacggcgtcgttgcagacgtccccgttctcttcctcgacccacatttcgtcctcgtatttcttgttgaccgatatgcggaagtcgcgtccgccatagtcctttctctcgaggtcgtagagcggggaggtggtctcaccggaggttgtttcggttgtctgatcctgagtgtccgtggtatcgttgttccctgattgcgtgtctccgcaggatgttcccgccgtgagcatggcggcaagcagaagcatggagatcgcgcgctttatgttgatattcattttgtgttcctttcctgtttattgttgttctgccgttccggcacaatatagtatacaaaaattataccagttaaaagcgcaaaagtcaatgaatcaatcacgccggatatgaactatttgaaacaaatgaggtgagaaaaatagcagacccgaaatacgatgtgaatttctttccggtagtcgatcgcgaaagggagctccctgtatacgcagtcggaatcggcgccggacatgagcaggaggagctgaccataggaaactggatgggcatcaatgtgcttcatctccatatgacggtcagcggctgcggcatcatataccacgaaggaaaaagatatattcttccgataggaacgatgatgtacacgccgccaaaagtcatgccgcatatagcgcccgctcccggcggctggattgacaactgggtcacaatatttttggcggatctcagtccgggaagcagcatactctcactcggcgacaagctgcgcatattccgcccggagaacccgaatgagataaacaggatgtacgagacgatcaaccgcgagcttacgtccggaacgcttcacggaaggcttatggcggcggcagaggcttacaggatgatatgcgcggtcatatcctgcctcgaggagaacagcgatgagagcctgacagacagccttgtcgtctctgacgccgtgaactacatacacgcgcacgcgggcgataatataacgctcagcgacctctgtgccgtctgccgcgggataagcccgcagtacctgtgccgactttttaagcgctacatggaaatgcgcccggtcgagtacataaggaaggtcaggatatcccgcgcgaagaagctcctgtcaaacactgatctgcccgtccaggaggtagccgcgaggtgcggtttcgagaacgcgacatacttctaccgctgctggaacaagacggaaaaagaatcccccgcggagtaccggcgggggcataaaggaatattcgtgtgacgtttacttcgcgagttcggcgtaggtctccgtgaggtcgtcgagaccggccttgaccgccgattctatcgacgcgtactttgacgcgacgtcggttttcttcgcggcgatgaggtcgcggaagaggtacgggagtctctcgaggctgcttgcgtggagaatggacatatcgtactggcgaccggacatgattatgtcaagcatggcgaccgactgctcgtcacgggcgtacttggcgccgagggcgacgtcgtagtaagcggatatgaccgaatagtggttttcgcgggtgagcgcctcggttatggttccgacgaactcggtgtcctccggcttgacggtcttcgggacggacagaacggagtagttgtccatcgcgttcgagtagtagttcgtctgctcctcgtcgagcttcggatacgggaggatgccgtagtcgtccttcatgtcgcggagggtgttgaacgagttgtcgatccacgtcgtgaggaacgcgacgttgccgttcgcgaacgccttgatctcgctgccgtcgccgctgcttatatacgccttggtgtcgtagtagagcgagtagaccttttcaagtccggtctgcatacggtcaaggttcaggttgcaggatagcttcccgtccttgtccttcgtgacgagcgggatattgaacgcggcaggccacgcgtcgaggtttgtcactttgtcggcggcgaaaccgagcagatcgtccttgtcaaccttctcgttgttgttgaggtcctgatagatgtccttcgagcagttaagcagctcgtcaatcgtccagttgccgtcaagaaccgtctcatagaggttcggaaggttataatcagcgatgattctctggttaaaaaacacggcataggaaagcaggagggtcgttattgacaggtcgccaaccgccatataccggttcccgccgatggtgaacgcgtcgttcgcgctctggatccaccattccttcgagaagtcgacgccttttatgtcgcgccagttgtagagcagcccgtcgagcgcgagccatccggcacggcaggtatagagcgcggtgaggtcatagagatcctctccggcgaggagcgtcttctgcacttcctcgacgtgtgttgtgttggacgcgatcttcgtgatgaccggggttatcctgacgttgtagtagtcctcgactttcaggttgcggttgtatacggcgtcgttgcagacgtcaccatcctcttcctcgacccacatctcggcgccccatttgtcgctgattgagatgcggaactcacgtccgccgtagtccttccgctccatatcatagaggggagagtgagcttcggtctctgcctccgtcgtcgtgtcattcgacgcggagccgccggaggtcgtgtcgtcatttgttcccgaatcgcttccgcaagccgcgagggaagcgaggagcgacgcgcagatgataattgacgccgcgcgttttgttaagtttttcattttttccttcctttcacagactgaaagattttacttacaatatactctattataccagtattcataggctttgtcaatgaattttaggtgcgtaaactgaccgatattaaacctcaggagaataattatgggacttgtgaatttttacccgatgatcggcgacgaaaacggtcttcccgtatatgtgcgcggtatcggcgtcgggcacgaacaggagagaaagcggttcgtcaccgccgacggcactatacatttacatatgaccatcactggctgcgggatcctgaccctgggtgaaaaacgtaagatgctcccggtcgggacgatgatgctgaccccgcccgggacacttctcgacctgaccccggctccgagcggctggatggacaactggataggaattgtcgcgaaggacgatgtagtaacgcgatttggcgacggtatcagagttttcacgccggtcgaccccggggcgatcaatcagctctacgacgacatcggcagggagcttacggctcacacattgcgcggacgtcttctcgctgccggggacgcttacaagctgcttatgtatgctctttcagacatagacgcctcgagcgggataagcatagccgacagcaggctcgtttcgtccgccgccgggtttgtcgaacagcatttcagggagcatatcgacctttcgatgctctgcacggcgtgcggaaatgtcagccgtcagtatttctgccgtgtcttccgtgagaggacaggcatgagaccggtcgagtacatactccacaagcgcatcgagtacgcgaaacagcttctcgcccataccgaccttgaggtccgcgaggtggcagagaggtccggcttcgagagcgagtcttattttttccgctgttggaagcgcacagaaaaggatacccccgcggcgtaccggcgggggcataagggaatattcgtgtgattcagattttcgccgcggtctcgttccagaacacgtcgagctttccgatataaccttgcttccacggcttgtttctgccgcagtagtggattatgttggagttcccgcgcacccagtcgatgctcatcttgcggcttgtgaggaggcggagcgcgaagaggcgctcggtcatgttgtagcggtacgggtcgagcgggaggatgtcctcgccgtaaagaccgcttattatgtcctgatccggcaggacgagcgagcggcggtgctcctctatgaagtcgtagacgtcatcgacgttctgctccgcgcggagcttccggaggttcatcagcatgactccggagtttatgtacgggtcggactcgtccatgtctagccgcttttcgttgaccttctgcatcagccgcctgacgtgtgaggcggcggcgaacatatagccgtccatgtcggtactgtaaagcccggcgatactgcggttcacgatgaggtcggggtcgaggtagagtatgcggtcgagggtttcgggcagcagcttcgccgcgaatatgcggtaataaatctcggtcggatacctcgaggtcgttggagcgtcggcgagagaacgtataagctcattatccgcgacattcacgcggatgatttcaccgttttccccgagaatccgtctcgcgcggtcgagcgcctcatctctcaccgatgtctcgatcagatatacactgaagaactgtccgggcgtgctgtcggcaagcgagcggagcatgacctcgaggcagggaatatacgcctcattgagcgttacaagtatattcataggttatcacacatggtcagccgactcgatgaagagcggcagtgggaaccacgcggcagcgagcgggtttgcgcgtctcgcggcgcttgacaggctgaagaagaacgctaccgcctcaagatgatcgagcgtcaggtcggtgtctctatcaatcgtggttatttcaggtgcgccgttcttcacgtcaatcctgaacttttcggtcccggcgatgccgttcacggtgacgctgagggttccgtcgacaagcccggctgtcttcgccttgagcttcatatacgcgccgactaccttcgcaaaatggaatatcgtgtagttctggtcgttgcccatgctgacgccgtccgcgatgcgctctgcgcggttcatgagatcggtttcgcagagcgggaggtttatcgtgacgttcccgcgcttcgctatgtagttccgcacgacgtcgtcgaagtcgccgttgtcgatgagagtcagctcgcagaggtcgccgatgaagtaaccgaggagcttttcgccgtcgaggaccgcatagagctttttcgaccatgagcgcgctatatcgaggaattcgtcgtccggacgctcggcgtggcatatccttttttggtgcagagcgatgatatcatcaatgatcgggtcgttctcgcagacctcacggaaatccagctcacggagcggggaaccgccgaagcagtgacgtacagacgttccggttatatagtatttagccaccggagaggcggactcgtacgagaaatacgcgtacctctggcgcagacctccgaggtcggacatatcggcgccggacgcgatcatctcgtcgacagccgtgtgcagcagctcgcgcatatatcccttcgagcgagagtacgggtgaacggcgacgttcccgattccccacgacactaacttttcgcccattatgtcgaatgtgcgcgggaatacgccgatcgcggacttgagcttgccgtcgaccgttacgacatagttgttctcacagggatgatactcaggtttgtagagcttcggcaggagtttcgggaagccctcgcttgtgccgttcattccgaagacatagtttatgaagtcgatatagtcgtcgaacatctccgcgctcccgcggcctttgtatattaaagtttcagacatggtattcttctcactttcttttggcttggcggcggcaacccgacgcctgtatatgcacattatagcataacattccgctcgtgtcaagtggttcacgaaaacttaacgccgcgcgttttgtggcgtgacatggcgttcatttattgtagtatattcagccgtcaaatattaacatacagccgattcggggtgcgttaaaattataactttgttcactacatccggcgtcagatgtggtataataattggtgagaaaattatgctgtaaggaatgataagtttgcatataacgagcggagacatagcggcgctgatacggagcctgtcgaaaacggcgggaaagccgcacttcacgtccgccgtgatagccgccgccggaagcggcacgagaatgggaagcggacagacgaagcagacgatggagctctgcggaatgccggtgatagcgcgcacactgctcgcctttgagaggtgcggtgagataaacgagatagtgatcgccgcgagggcggacgagatccccatgtacgagaccctgaggaaaagctacaatataaataagctcaccgccgttgttgagggcggggacacgagacaggaatcggtactgcgcgggtttgagagaatctccgacaaagccgagttcgtcgcgatacacgacggcgcgagatgccttgtcacaccggagataatatcgtctgtcgcgagggaggcgtacaactggggcgccgcgaccgccgcttcccacgcgagcgatacggtcaagcgcgcggatttcaggggattcatagaggagacggtagaccgctcttcgctctggctcgcctcgacgccgcagatattcaaggctgatctgtaccgcgccgcggcttatacggcgaaggcggagggcttctccgcgaccgacgacaatatgctcgccgagcgtgtcggtttcccggtgaagctcgtcgactgcgggaccgacaatatcaagataacgacgcccgccgatctcgctatagccgaggtcatactgcgcagaaccgagaagaacagcagataaaaagccgccgcgggctttccgcggcggaaatggtctcaggtgtcagaactcttcgcgctcgttctctgccgactcgatgttgtcggtgttctcggagtggttcttgtggcagttctgtgcctgctgattgctctgatagctgttcgcacgattggtgttctggttctgtgccttgttccggttctggctctgattctggttcttctcgtttttcattgtgtaaacgctccttggttttatctgattgcggggacagattgctttccgaccgcgagaaaagtattgccggaaacgggagaattattcatgtgacaaaaaagggtgaaggctttgtacgaagaaaagacatactacgacgatagaatcatacgcgtaagaaattttcgcccggaggactcggagatcatctgcgccggggaggttgctcaggggtgggatcagacaatagacaaatacatcgaccgcctgagggatcgcgatgaaggaaaatgtatctcgctcgccgcggagtatcagggaaacatcgccggatatataaatgtatatcccgacgcgcagttcggcgctttcgccgggcggggacttccggagatagtcgatttcggcgtgctcgaaaagtacaggcggcacggtatcggaaaagctctgatggacgccgcggagaatatcgcgaaggaatacgccgacactgtgtatctgggcgtcggactgcactccggatacgggtccgcgcagagaatgtatgtgaaaagaggatatattccggacggctcgggagtatggtacaaggaccgcccggcggagccatacggcatttacccgaacgacgatgagcttgtcatatatatgtcaaagaagcttgtctgatatactattgaaaggacttgaacaaaatggagctttacccgatgagactgcgtccctccgtaaaagagataatctggggcggggacaagctgaagaaagaataccacaagaccgcgccgttcgcgaatatcgcggagagctgggagctcaccgtcagaccggacggaatgaacgtcatagataacggcgtatacaaggacatgcccctcggagactatcttgaaaagggcggatacgggcttatcggaaagaactatgacgccgaccgtttcccgctgctcataaagttcatcgacgcgagggataagctgtcgatacaggttcacccgtccgacgactacgcgctgaagaacgagggcgagttcgggaagactgagatgtggtacatagtcgaggcggacgagggcgcggagctcgttttcggtctgaaggaggactgcacgcgggaggagtttgagcgcgccgtcgctgagcacaggataggcgggacactgcggtatgtgaaggttcacgcgggagaggtgtatttcatcccgtccgggctcgtccacgcgatcggcgcgggcatactcatctgcgagatacagcagaactcgaacataacctaccgagtctacgattacgaccgccccggaaaggacggcaagccgcgcgagctgcacgtagagaaggcgaagaaagtcatagtgaactacacgccggaagagatagagaagctgcgtttttcaaaggccgacaggcgtgatccggaccttctcgccgcctgcgacaagttcaccgtcagaaagtacgacataagcggcgataaacatataagcgtcggtgaagacagcttcgcgtcgctgacatttacagatggagagggaatcatccgcgcgggcgggaaagattatccgtttgtcaagggggacacatattatctgtccgccgggctcggagaattgtcgctcgtgtcggagaaagccgtctgcatacgcgccggactgtgaaaccggaatgaaaaatcagggagaccgccggatgaatggcagtctcccttttgtcgctttacgtgtcggtcagattcatacggttccggtcacggtgagaaccgcgactccgggcgtcaccgtgtattcaccggttcccgcgttctgcgcgaaggtcgccgccggtacggttattcttccgggaacggtcgcgaaagctccggtcgctgtgtcatacgtgtaatcggtcgtcagagcgagcgcggttccatcaagggcgaccgcgatgtcattcagaaccgggtcgaaggtatcggttacggttatcccgtccgccgcgacagccgcgatattgccgctgttctgtatgacgaacgtataggtcacctgtccgttctcaacgacggttgacgggcagatcgccttgctgattgtgagcctcggttccgcggatacgttcacggtatcggttacggtgatcggggtgatcccgcctccggacagctccgctgtgttgacgatttcgctctccgccgtgagcggagccgtgccgttgaccttcgcctcatatactatgaccgcgttgcctcccgccggtacgctgattcctgtaacggtcattggcggaccggctgtgaccgccggcgccgcctgctccgttcctccgatatagtagtgaagagaaccgtccacatagtcgagcggtacaaacgtcgacgtccagaccgtgtagcttccgaggttgtcggtaagcgtgagacccgtgtatccggtcgtgccggagttgaccacgctgacgatgtatgtgattttcccgcccggctcgtagctgtcggtcacggctgtcttcgacgcggaaagaacttccacgagttctccggtgacgacattcgaggtcgttgtgccgcggttgtaggacagggtcgcctgattggtgaatgctgccatgattcatttccttcgtaatatctgtcggcatttccgccggcgtttttgcggtgagctgtttcttttcgccgcattcaagtatatgacggagtgtcgaaatatgtcctgagggagacagggagtattccgcgaaagcgcgtgtaagcattgttttgaagatgttatccgcgctgtatggacggtgagggatcgcaaataaaaattcggtggctgtcaccaaagcgacagccaccggttactgttattccgttcagtcctcgacagcggctttcttttcgcacgcgcgcttgaactgcgcgacgtcgaacttcggcactctttcgtaggtgtagagaccgtttacctcctgctcgatatcatagagctgggtgtagcagaagcccatgatcagcgggttgtcgagaaggacatgggtcaggcgcgtgaagcgggtgacgaattcttcctcgccctcggggttcttgccgtagccccagccgtcggttccgtcggtcttccagccgattccgccatactcgcttacaaataccggctcgcctttccatttctgtgtcattgatggtgtgcgggttgcgagccagtcaaagatctcgccctcggagagcttctcgtagtgctttcttaagttgtcgggattctgatcgtagtcatgcacgtcatagatgtcggttacgaagtggtatccaccgctcgtgtcgatgaccgggcgggtggggtcgtacatcttggtcatgttgtaaatcgtggagagaagcgtgttcgtcccgtccttctgcatatacgaccatgtttcgttgaacgggcaccagccgatgaccgacgggtgatcgaagtcgcgcgctactacctccatccactcgttgaggtatatctcggttgcctgagccgctccgcagtcgaagccccagttgcccatctcgtcccagaccatgtatccgtgcttgtcggcgtggtagaggaatctcgcctcaaagaccttctgatgcagtctcgcgccgttgaatccgcacgccatcgagagctcgatgtccttttcgaggtcggcgtcggtcggggccgtgtaaatgccgtccggatagaagccctgatcaagcacgaggcgctggaacacagactttccgttcagtctgaacttcataccgtcgagcgcgacgcttctgagaccgaaatagctctttaccgtgtcgtcgccgaaggtcaggacgaggtcgtacagtccgccctttccgagctcccagaggtgcttctcggtgagctttatcgtcgcggtgaagcctccgccgacgcagtcgacctcagccgaaccggtcgggacaccctcatatgaggacgcgatcgagagctttccctttccgacagtttctccgatgacagtgagggttccggcgttcacgtcggggaaatacttcgcgtattttatgtattccatcggaagaaactcgagccagacggtctgccagattccggtcgttctcgtgtagtcgcatccggcggaggcgaactgaccggactgcttgccgcgcggctgtctgccgcttcttatgttgtcgagagcccagacaaaaacggtattgtcgccttccctgacaagcttcgtgatatcaagcgcgaaggacgcgtaaccgccgaggtgtgtccccgcgagctcgccgtttatatagacatacgccttgtagtcgacggcgccgaaatgcaggaaaatcctgccgtcaaggcgctccttcgatatctcaaaatgcctgcggtagcagacggcgtcgatgaagtccttgtactcaataccggagagtctgctctccgggcagaacggaacgagaatttcgagcgggagcttttcctcgctcctgtaaagtccgcggtcacgcgcggagcggccgtgatcgaaggcgaactcccatgttccgttgaggttttcccacgaggagcgctcccatatcggttcggggtgttccgggcgcggtatctgattcattgacattatcgtgattcctttcagaaaaaccggaaaatttacattccggtggtttatataagtatattatactgctataatattatcatgtaaattgataaaacaggcaaagaggttaagaaaacaggcatgagagaggatatatactatgtaggaagcccgagcggggacacgccgttcaggatatgcatcgccgggatatcctactgcgacggaagctatcgcataagacggaccgactcggacgtcatgagtatcgaatacatctacgacggctccggaactgtagagtacggagggcatacatatcacccggaaaaggacgacgtctacatggttctccagggcagggatcaggtctactattcagacgagaagacgccgtggaagaagatatggttcaacgcctccggagtgctcataaacgcgctgaccgacgcctacgggctgactgacgcgtgccttttccgcgcgaccggcgcggcgaagtatttcgagcggatgctggagctgtgcgcgtccggccttcccgccgacaccataaacgataagggcgccgtgattttccacgagcttctgacttttctgaaaaacagcggcggtgagccggacgccggtattgtccctgacgccgtcaggatgaaggaatacattgacgcgcacttatctgaggaagtgtcaatagatcagctcgccgcgctgatatacaagagcccgtcacaggcgtcaaggatattcagacagaccttcggacgcacgccgtacggatatctgactcaccagcgcttttcactggcaaaaacaatgcttctcggcacgaatatgctcgtgaaggagatagcctacagcgtcggattccgggatgagcactatttttcctatgtgttcgggaagaagttcggggagacaccgtccgcgttccgcggagggaaataaacagtgaccgtcggggtgaaacccggcggtcacttattttagagatacactgaataaatcgggttttcgcagaaaaaaggcttggatttgtgggcttttttctgcgaaaacaaccttaaatcagtgtttccttagtcagtccgtgtaggtgtatacctcgcccgactctatgtattcggtcgggatttccggcagcttttccttcaggatgtccgcgacgaggcgcattccgtcgcgctcggagccgaggtggccgaggacgagaagagcctttttgtgtcccatctgcgccgcctgtctcacccattcggcgagagcccactcgcagacctctccggtcatcacgacctcgcagtcgtcgcttcgtaactcctgctcgatgccgccaggggtgccgaacataccggtgatcttcgtgcacggggaatccgcggctccggcgatgcggatgtgctttattccgacgttcttctcgatatgcgcggcgagctcacgcggggtcatcggggtgttcaatctgattctcactttgtcgaaccttccaatgtactcgacctctccgtcgagcttcatgtattttatctcaccctcgcagatcatatccttctgcgccctgtgcgggtagtcgtgataacggtagattgttatcccggactcctcgatgagacggcgcttctcgacctcgaacggctcgtccgagtgctcgtcccagtggttgaaatatgtgggctcgtgaacgaccagaagtcccgctccggtctccttcgcttttctgacgacctccggggtcgcgaacatcgagacggcgatctttgtcacctccgcgtccggggagccggattttatcgtgtcgcaggtcttctcgagtctgccgcactctccgaggtcgaagagaaggtccattatctgttgtgctttcattttgggattcctttcgtttgtttttatattttgcgggatcatgtgtcaatctttttattttcatgctggtcagacgctttgtccctgtttctgaactcggtcggggtgcagcccttttcacggcggaaatcgcgcaggaagctccgcatactgccgaaacccgattgcatggcggcgacctctacagtcgcgtcctcatcattcagcaggatgcgcgccgcctcgtttacccgcagacgggatatgtattctccgacgctcatccccatcacctcgcggaactcagaggagagccgctgctggttcacgataagagccttagcgataccggcgacagtcagctcatcccggaaattcgaggtgatatactcgattgcgccgacaacgtgaatggtgctgcgcggctttggcttcagaccgcactttgccagcacgaggctcatcagcagcaggacggtatggtttatcgcgctctcgcgccgcttgggtaaattgtctaaaaacgagaacggcgcgtcggcgccgcgcgggcggtcatatccgcggatctcgttcaggagtgtgaaaacgcgcagcatacttccgtccgggtcgtcgaaataagaagtcgcgaatgagttgccgtcgaggatgtcattgtattcaagaacatatctccttggtatcattactatgatggaatcaaacgtcccgtcagtgatcgtggaatcgaccgaatgcggaacgtaactcgatatcaccatagcctgatttccgtgtatcacgaatgattcgccggagcttgtgaagcgcatacagccctttatcacataaatgagttctatacagtcatggacgtgtacgccgatattatgataatttacccttgagcagaagaactgttcccggatgtcccacattgtgtcatagtagtacatactgttcgttccccgtttttaattttgccgttcgttaattggattttgctattccaattataacacatttcatgtataatatcaagtaccaaacagaatttttacgttaagaggtcaattacatgaaagcaaaacggatcatatcgctttttcttctcgcgtctcttctcacctcggcgtcggcgtgcgggtcggaggcacccgaaaaagagagcaccgatacgaccgccggggagacgaccggaaagcccgagtatgagtttccggaactcaactgcggcggcgatgaattcactattctcaacacaggatgggtctggagtatctataatggtcccccaaaatcactccaccaatt

SEQ ID NO: 572 - DNA, 2685 bp, Unknown
  16S sequences of unknown bacteria
ccccaggaagttccggttgcaaatgccagcaggcagccaactacaaagataatagccggaagcagatttacaatacctgatgcgcttcctttgatcagagcagctacgaactctgcagctcccaggctgtcggtcatggatttcagagtccatgcaaaagtcaggatcatgatagccggtaccatagctttgaagccctccgggatacaatccatacactctttgaatccaagtactctgcggcttacatacagaagaatggtgatcaccagtgcaaatgcacttccgattgcaagacctacagatgcatcactgttggagaatgcagttacaaaatccgcaccctcaaagaatccaccggtatagatcataccgatgacgcagcagatgatcagtgcaatgatcggaatcagcagatccttgactgttccttttccagtgtcttccaactcggttgcttctccataaggacggtccggtgtggtgaacagatcgccttttttcgcattgtcctcatgaatcttcatggagccaaaatcaatattcagcactgcaatggtgagcatcatcacgatggtgagcagtgcatagaagttatacgggatcgcactgatgaacagtgacagtccatcctctccctcgacaaaaccagtaacggcagctgcccaggaggagatcggtgcaatgatacagatcggtgctgcagtcgcatcgatcagatatgccagctttgcacgggaaatattatgcttgtctgtcaccggacgcataacacttccaacggtcagacagttaaaataatcatcaataaagatcagaacaccaagcgcaacggttgtaagctgtgcacctgtacgtgttttgatatggtcacttgcccagcggccaaatgctgctgatccaccagccttgttcataagacatacaatggctcccagaatgatcaggaacacaaggatacccacattgtagctgtcggacaatactccaatgattccatcctcaaagatatgaacgatggttccctcaaaactgaatcctgaatagaacagacctccaaccagaattccaacaaacagtgaagaatacacctctttcgtgatcaacgcaagaacgattgccacaactggcggtatcagcgcccagaatgtggcatacatagcaggtacatattccatgataaaaatctcccttcttttgcaaatacgatagagcccggaccaaacggtttatagcataaaaaaaccatgaacacaacgactggttgcatccatggtctcttcttattatgtccgaccaatgatagcgctccacagccctgtgacagtctgacgcatgttctgcggcagcccaggaacccttctctcggaatatccagattccttcggcagtctcccctttccatgccagccgtttccgaccgtatactgacatctactcatgaagcctgcgcctctatcatttttacatttatttctttgctatcctatcacgaaatacctataagggcaataggtatttgactaattattcagatctttactctcttttatataatttgctgcatttttcaggtttgctgtcagttcttcttccgtcagcatccttctaaatttggcaggatttcccatatagagagctccgtccggcactaccgtattctggggcacaagtgcgcccgctgcgatcatacttccctttccgatcacagcaccgttcagcacaatggctcccatgccaatcaaagcctgatccttgatcgtacatccatgaaggattgctccatggcctatcgtcacatttttcccaatagccagggacgcatctgcatccacatgcagcactgccagatcctgaatattcgttccttcaccaatactgattgaattaacatcccctcggatcactgcattgtaccagatacttacatccttctcaatcgtcacatcgccaagtacaacagctccgtctgccaccactgcctgttcatctatccgtggtttcttcatcggtcttctctcctttacttacagacccgcaaaaaacagctcataataatcatcttcaccttccagcatgggagaattctctccgccgccgttggtgctccggcgcatggccgcataggcttcttctcctgcggtgatcagatccatctcatagatctcatatccaagctcccggcatttcttacagaacgcggcatagggctgtgcttccttcctggtggcaagcagttcttcacgaagtgcggaatcattgtgcgccttctgctttaattcatccaacatctctgcaattcccataaattttcgcctcctttatttgatgccaagtgcctccgcccaggtgctctccttaaatccggtcagcacaaaaccatcccccaccagaaccggtcgtttcaccagcataccgtccgttgccagcaatgcatactgctcttcttctgacatttgcggcagtttgtcctttaactgcatttctttgtagagcattccgctggtattaaaaaattttttcagcggaaatacacttttctcatgccaggctttcaattcctccgcactgggattttgctctttaatatgacggtcttcataagcgattccgtgatcatccagccattttttcgctttctgacaagtactgcattttggatattctaaaaataacatactgtat

SEQ ID NO: 573 - DNA, 6715 bp, Unknown
  16S sequences of unknown bacteria
tctatcaacagtttttcagcttccaccgcatctgcacgaccgcgtgagtttttcattacaaagccaagcaaagactttaacgccttttctttaccgcctaagtagtcggcaacagcatttggattacttgcaatggcatctgtacataatttttttaatgtatcggcatctacaccgcccatgtcttcctctttgataaagtcggttgccggtctgccttcatccagcattttttccaatgtggattttaaaagattcattttaattttgccgctatccagcagaagaacaagctctctcaagtattcaggggatagaacaatatcaaaagcttctttctcggtttcgttctccacacgtctgaaaatttggccaataatgcagtttgcaactactttgggatttgcaacgccttcactggctttttcaaaatattctgccactttgcggaatttgaccaataatcctgcatctacttcaggaataccaagttcattgacataacgggcaaattttgcatcaggtaattctggaagaagaaatttaaagtggtcaattttttcttggctcacttcaattgtaaccaaatcaggctctctgaaatagcgatagtcgttggcatcttctttgccgcgcatactttccgttctgttttcttctacaatgtagcgtaaggtttcctgtgtaacctctttgccttcgtctaatagttcagcttgacggcttacttcatactccattgcttttgtcatataagtaaaggagttcatatttttaatttcggttctggtaccaaattcggtggaaccgacaggacgtaaagaaatattgacgtcacaacgcaaggaaccttcctgcattttacagtcggaaacgccgatatatctcataatcatttgcagtttttctacgtattctcttgcctcatcaatggagcgaatatcaggttcagatacaatttcaatcagcggtacgccgccgcggttatagtctacataggtattgccgcgttgatgtaccaattttcctgcgtcttcttcaatatgaatacgggtaatgccgatttttctgccattggataattcgatatacccatttttacaaagtggcatatcaaattgagagatttggtacgcttttggtaaatctggatagcagtagtttttacggtccattttagatatatgagaaatttcgcagttggttgccaatcctgccatgatagcataatctactactttttgatttaactttggcaaagtgccgggtaagccgatacaaatagggcaacagtgtgtattttgttctccgccaaaatctgtggtacagctgcagaaaatttttgtattggtagaaagttctacgtgggtttccagtccggataccaattcgtatttcatagtgcaacccccatttccacagctttaaatgtgccgttttctcttgtggctgcttcaaattgataagcagcatttaaaatagtcgattcacagaaattatttccaatcaactgtaaaccaataggcaggcctttgctgtcaaatccgcatggaacagatacagcagggagaccggcaatattaacgggaacagtacaaatatcggtttgatatgtttgtactgcgtctttttgcgtttgtccgcgttcaaaagatgtcattggtacggttggtgccaaaataacatcacaagtttcaaatacacgcttaaatgcatttacaatcacaccgcgcagattttgtgcttttttataataagcatcgtagtatcctgcgcttaatacataggtaccaagtaaaattctgtgcttaacttctgcaccaaatccttcactgcgtgttttgcaaatcatttcattgatatcctcataatgaggtactttatatccgtaacgaatgccgtcataacgtcctaagttggatgaggcttcggcacatgccaaaatgtagtatacaggcaatccgtatttgatttcagggatagagcattctactatttcagcgcccaattggcgatatgtttcaatggatttttccatagcagtgcgaacatcttcgttaatgccttcaaaatactcttttacaatgccaattttcatacccttaatttctttggttaaagaagctgaagcagattctttttttccttgagaagtggaatccatagggtcatgctgtgcaatggcgtcaaataccaaagctgcatcttcaacagaggtagtaatagggccaatttggtcaaagctggaagcatatgcaatcagtccgtagcgggaaacggttccgtaagttggctttaagccaacaacgccgcaaaaacttgcaggctggcgaatagaaccgcctgtgtcggaacccaaaccaaatacagcaatatttccgctgacgcaggaagcagcgccgccggaactgccgcctgcaacgtgattaggattatgaggattaaaagaaccgccaaagcaggaagtttcactggaagaacccattgcaaattcgtccatattggttttacccagtaaaactgcattttgattttgaagtaaatcccagacagtagcattgtaaattggagtataaccctgcaatattttagaacagcaggtagtttcaatacctttggtagaaatgttatcttttaatgacataggaattccttctaacggaagaagagattccccgcgcataattttttcgtctacttttttcgcagttgccagcgcttgttcctcagttacttttacgtaagcgtttaacacttggttttctttttcaatgcttgcaaggtactgttttgtcagttcctcacaagaaatttgttttgaggaaaggagtttgccggttgctttaattttactaaagtttgtttccatgtaacagccatgcctttctaataaagtgagaccaaatatcaattaagaacgtctttttacaaggaaatatccttcgtcttgactttccgcattctttaaaatttcttctctgtcgtaagaaggaaccacaacgtcttcccgtaatacattagagagattgttgatattatcaaagttggtttgttcacattgagcagcgctgattgtttcagcaaatgcaatgatgttatccatatcttttgttaaagcgtccagttcttcttctttgatatacagtttggaaagtctcgccatttgcagaacatcttcacgtgttaccatattaggagagcctcctttcgtttatctgattttaatatgcacttcgcgcagttgctgttctgttacctcagtaggcgcaccgagcaataaatcttgtgcgttgctgttcattgggaacggaatgacttcgcgaatgttttcttcctctgtcagaagcataatcatacggtcaatgccaggagccatacctgcgtgcggtggtggaccgaatttgaatgcgttatatagtgccgggaaactttcttcaattttctcttctgtataaccggcaatctcaaatgcttttatcatggttggcaagtcgtggtttcttacagctccggaagaaagttcgacgccgttgcaaacaatatcgtattgataagcaagtatttcggttggctctttctccagcaaagcctgcaatccgccttgcggcatagagaacggattatgagtgaaaatataggcaccggtttcttcatcaatttcgtacattgggaagtcaacgataaagcacattttaaattcactgttatcaatcaattccaaacgacggccaagttcagcacggatttgacctgccagtttggctgcagcatttgtttcatcagcaataaagtaaagcacacaaccggggaccaaacctgctttcttgattaagttatcacgctggtcatccggaatgaatttattgatagggcccagaaattccatttcatcggtcactttgatgtaaccaagacccatcatttcaagttcctctgttgcatatttcaacatgttttcaaaaaagcttttcggttttgaagcgcagtttggtacattaattgcgcgtactgttttatttttaaaaggtgcaaaggtagatgtttcaaaaatttcagtgatatctacaatctccaatggatttctcagatccggtttatccgtaccgtaacgcagcatagcttccgtataaggaatacgtgggaaaggtgtgtcagacacttttttatctgagaactttttaaatatttcggagattacttcttctgcaatctgcaatacatcttcctgtgttgcaaaggccatttcaaagtctaattgataaaattcaccaggagaacggtctgctcttgcgtcttcatcgcggaagcaaggggccacctgaaaataacggtcaaaaccggaaaccataagcagctgtttaaaaatttgcggtgcttgtggcaaagcataaaacttaccgtgatgctttctgcttggaattaagtaatcgcgtgcaccttcgggagaagaggtagaaagaattggtgtttgaatatccaaaaagcccaattcgctcattttattacgtaaaaatgaaattacttgtgaacgtaatacaatattattgtgtacttttggatttcttaaatccaaaaaacgatattttaaacgcacatcttcttttgtttctgtggaactgtccacttcaaacggtaaactggaaggcgctttacccaacacagttaaagtttctgtttttacttccaccttacccgttgcaattttagggttgattgtgtcctcacttcttaaaataacttctccttctactgtaatacaacattgtctgtttacatcagagagcatagcttcgtcataaacaacaacttgtacaacaccgtagtggtcccgtacatctaagaattgaatgcctccgtggtcacggatattttctacccaacctgcaacgcgtattttttttccgatatctgcttcacttacctcgccgcaaaggtgggtatgatattggttgacacaaatcatatttcaaataatcctttcatgattagaatttgttccgtattaaagcatggtttgctttatgcccagtatagccaaagcttgtatgagcacatatatacttataaagtatatcactatttacatttggtttcaataaaatttggcagaaatcccatggaatacgaacatattttattaaggctattttgttttttgtccttaggatttgaaacataagatttatggagtaaaaaagtgtcttaagtgcctttttatatcattgtatttacgctaaatgtttaaaaacgaatatctcaaaaaatatttgattattttgtacatcattttttgtataccggaattgtatttatttttgttgtcatgtataataactactatcttatttaatttggagatattatcatatgttaattttgcaatcttacgactatgttctgtttgacggtgcattcggaacttattacagcaaaaaatatcacagtgaacaaccatgtgaattagcatgcatcgaatatcctgaacgtgtgctggaaattcatcaagaatacatcgaagcaggggctatggcaattaaaacaaatacgtttgctgccaataccatttcactaaaaaaagatttttcttcagtgcgtgaaattataacgcaggcttggaagttggcaaatcaagcgatagccaatcaaaaagtatttgtttttgctgatatagggcctatttttactgaggatgactctattgatgaactttatcaaattgcggatttgtttttgtctttgggagcaaattattttttgttggaaaccgcacaagatgactctgtatttcgtttggccggatatattaagcaaaaacatccggacgcatttgtcattacgtcatttgcggtggaccaagacggctataccagaaaaggaattccactcaaaaagctggcagcgcagagtaaaaattgggatatagatgcgtttggtttaaattgtatgtgcggaccctctcatttgctgcaaattgtttccgagctgacagtttccaaaccattaagtgtcatgccaaattccggttatccgctgagcgtcaacggacgtacattatttattgataacgaaacttactttgcggacaaaatggtacaaatgtatcagcaaggagtaaaaatactaggcggatgctgcggtactactccgaatcatattaagactgtggcgaaatatcttcagaaaaccaatataagtacagaaataccgcgtattacaataaaagatgagacaccgcaagcagaaagtgtcaagaatccttttgctgaaaaattgaatcataatcaaaaggtaatcgcagttgaactggaccctccttttgatgccaattacagccacattcaagaagcagctcctattttaaaagaggcaggtgcagacgccattacaattgcagacagtcctttggcaagagcaagggcgagcagttttatgatggctgccaaaattcaacgtgaagttggaattccaaccataccacactttacttgccgtgaccaaaatatgattggtttaaaatctattttagtcggcggtaatatcgagagtatacataacgtgcttgttgtaacaggagatcctgtgccggcagataatcgccgtgaaataaaaggtgtatttagtaccaattcttatcatttgattgagtatatacaaacattaaatcaagatatttttcagtccaatccatactttattggcggtgccttgaatgtaa

SEQ ID NO: 574 - DNA, 3784 bp, Unknown
  16S sequences of unknown bacteria
agcagcatcgtgacgacaaattccgtcggctccatctgcccaatctggcgcttgcccatgacccggacgacaaggatcagcagaagatatagaatcaccgtgcggatgtacgagatcagcatggaatcacctcgcccctagtatgcgcgcagcaggcagaattatccggcatcctgcccgggctgctgggaaattttcgcctagagactgttcaagacggaaaaaatatggtatcatgaaaaccgaggtgtaatctatggatgaaaaagaaatgaaactagaagatacggcccaggcgacggaactggagccaccgcaggagccggagcaagcgccgatggcagagcgcccagtctggcaccgcgtctttgccggggtgctggctgcgctggtgattatcggcgtaatcggctattactactggatcatgcgcggctgaggggactgacatggcggagctgttttgggtcttttttcggatcggctttctgatgttcggcggcggctatgtgatgctgccgctgctgcagcgagaagtcgtggaaaagcgcggctggattacgcaggaggcgctgctggactgcttcgccctgagccagtgtacgcccggggccatcgcggttaatgcagcgacgtatgtcggctaccagcgcaagggcgtctggggcggctgcgtggcgacgctgggcgtcgtcctgccgtcactggggatcatcagcctcctcgccggaattctgctgcggattgacacgctgccgctggtcgtgaatgcctttgccggtgtgcgggtggcggtggcggcgctggtcgtggcagccatctggcagctgtatcgccagggcgtccgtggggctggcgccaatggactgtgtgttggtgcgctggcgctgtcgctgctgggcgtctcgccggtcctcgtaacgctgggcgcgttgggattggggctgctgctgccgcggatccggaggcgcgtatgatttatctgtacttattttgggaattttttcagaccggcctgttcgcctttggcggtggcctggcgacgctgccgttcctatctaatatggcggcgcgctatggctggttcacccaggcggagctgacgaatatgctggcggtctctgaagcaacgccggggcccatcggcgtcaatatggcgacgtattgcggcatgaagacggccggtgtgcccggggcgtgcattgcgacgtttgggctcgtcctgccgtcgatcctctgtatgctgctgctggcgtcgctgctggcgcggtatcaggagagccgcacggtgcgcggcgcgctgcaggtgctgcggccggcgtcggtcgggattgtggcggcggccggctgggcggtcgtccaggcggcgctgtttcccggggggctgtgggcggtcagttggctggcggcggcgctgtttgtcgtgctgctggcggtaaatctctgcctgaagaagctgccgccggtggtgctgctggcctttggggcaatcgccgggatcatatggaacatggggggcgcatgaaggttttagggatcgacccgggttacgcgaccacgggcttcggcctcctccgcgcggagcggggccaatacgggctgctgcagtacggcgtcattacgacggataaggagctgccgtttgcccagcggctggatgtcctgtaccaggatatggtccggctgctggaggtcaccgcgccggacgctgtcgcggtcgaggagctgttctgggggcataatatcacaacaggtatcggcgtcagccatggccgcggcgtgatcctgcttgccatcgcccagtcggggatcccgttgtttgagtacacaccgatgcaggtcaagcaggccgtcgtcggctacggcaaggcggaaaagcgccaggtgatggatatgacgcggcggcttttgcatatgcagcaggtcgcccggccggacgacgcggcggacgccatcgccattgcgctgtgccacgcgaggagcagtacctcgcggctgccgcagcaataaaaggagagcgggcatgttttattatttgaacggaaagattgcggcgctggagcagaacctggccgtcgtcgactgtggcggcgtcggatacgcctgctacacgacatcgtataccatatcgcagctgaagatcggccagacggccaagctgtatacccattgcaatatccgggaggacgcctttgatctttacggcttttccacccgggaggaaaggcgctgcttcgagctgctgctgtctgtcggcggcgttgggcccaaggcggcgctggcggtgctgtctgtcacatcgccggagagcttcaccctggctgtcatgaccggggatgacaagacgctccagcaggcgccgggtgtcggcaaaaaaatggcgcagcggatgatcttggagctgaaggacaagctgggcgggctgaccgagggcggcgtgatctccggcgccggtgtggccgccgctccagcgccggagatgggcaataaagtcgcactggccagcgcggcgctggcggagctgggctacaccgccagcgagatctccgccgtcatgaagggcattccggcccaggagctgccggtggaagagaccgtgcgccgctgcctgcgtgctatggtgagccaggcataacggcagacccgaaggagacggatgaatgagcatagattttacacaagcctatgaagagccgttggtgacgacgagcttgaccgcgctggatgagggggaggtctccctgcgccccaagcggctagacgattataccggtcaggagaaggcgaaggagaacctgcgggtctatatcgaagcggctaagcgccgcagcgagccactggaccatgtcctgctctacggcccgccaggcctgggcaagacgacgctggcaggcgtcattgccaacgagatgggtgtcaatatccgcatcacctctggcccagccatcgccaagaccggtgatctggccgcactgctgacgaatttacagcccggggatatcctgtttatcgatgagatccaccggctcgaccgctccgtagaggaaattctgtacccggccatggaggattttgccatcgatatcatcgtcggcaagggcccctccgccaattcgatccgcctggagctgcctcggtttacgctgatcggcgcgacgacccgggcgggccagctctccagccccctgcgggaccggtttggcgtctcgctgcggctggagctgtatacgccggaggagcttggccgcatcgtgacccgctctgccacgctgcttggcatggagatcgacccggacggcgcccgggagattgcagcccggagccggggcacgcctcgaatcgccaaccggatgctgcgccgggtgcgggattttgcccagatctattatgacaatgtcatcacccgcgaggcagcggatcatgccctctcccggctggaggtcgacgccctgggtctggacgccacggaccggcggatgctcacggcgatcatccgcaactacaacggcggccccgtagggctggagaccctggcggcgaccattggcgaggaagctgtgaccctggaggatgtctacgagccgtatctgctgcagatcggcttcctgacccgcacgccccggggccgctgtgtgacgcagcttgcctatgaacatctaggcattccggacccacggggcgaacaaatgcgcttttgaacaatgctttctcagcaaactgccgtaaaagaatctttataaattgtcgaaaaagcacaaaaggggaaaaaaggaattatttaata

SEQ ID NO: 575 - DNA, 27740 bp, Unknown
  16S sequences of unknown bacteria
caaccagctgctcgtcgagatggacggcttcgaccagaacgactcggtcatcatgatcgccgcgacgaaccgcgtcgacatcctcgaccccgcgctgctgcgtccgggccgcttcgaccgccaggtcgtcgtcggccgccccgaccgcgaggggcgcgagaagatcctcgccgtccacgcgaagggcaagcccatggcagacgacgtcgacctcgacagcatcgccgccctgacgagcgggttcaccggcgcagacctcgcgaaccttctcaacgagtccgccctgctggcggcccgccgcaacatgacggtcatcaccaaccaggtcatcaccgagtcgatggagcgtgtcattgctggccccgagcgcaagggccgcgtgatgaccgacaaggagaagcgcaccatcgcctaccacgagtcgggtcacgcgctggtcgggcatctgctcgagcatgcggaccccgtccacaagatttcgatcatcgcccgtggtcaggcgcttggctacacgctctccattcccgacgaggaccgcttcttgcagagcaagtccgagatgatcgacaacctcgccatgttcctgggcggccgcaccgcagaggagatctgcaacaacggcgacgtcacgacgggcgcgagcaacgacctcgagcgagccaccaagatggccaaggacatggtcacgcgctttggcatgagcgacgtcttgggccatcaggtctacggcgagcgcgaccacaacccgttcctcgggcgcgacctctctgcggcgcaggactacagtgacgacacggcgcgcgtcatcgacgaggaagtcgcccgcctgatgacggcggcgcacgacacggcctaccgcatcttgagcgagcaccgtgcccagctcgacaccatggccgaggtcctgctcgagcgcgagaccgtcgagggcaaggcggttcagatgctgctcgacgaccagtggaacgagtacctcgagtgggagaaggcccaccccgaggaggcgtcgcgcaaagaccagctcttcgagaacgtgaccgccaagaagatcgccggaggcaccgctgacaagcccgaggcgcttcccgaggcggcagagggttcgggcgatcccgagacgccgcagcctccgcaagagcaatagactcgcgtcaataattaagtcaaagagcgtctgccaaacggcaggcgctcttttatactgtgtcatcgagtttaccgagaaaggatgtgccgtggaccacaagaagatcgaggagggcgtgcgcctcatactcgagggcgtgggggaggacccgaaccgcgagggactgctcgaaacgccccaacgtgtcgctaagatgtacgaggagattctctccggcatgacggccgacccgtccgagctgttcgtgaagaagttcgacgaggggcaccaggaaatggtcattgtgcacgacatccccgtcttctcgatgtgcgagcaccacatggtcccgttctacggactcgcgcacatcgcctacattcccaacaaatcggggcgcgtgtgcggcatctccaagctcgcgcgcctggtcgagctctacgcgcatcgcctgcaggtgcaagagcgcctgacctcgcagattgccgacacgctcgtcgaggagatggacccgcagggggtcatggtcgtcatcgagtgcgagcacctgtgcatgagcatgcgcggcatccgcaagcccggctccaagaccacgacttctgccgtgcgcgggtcgctgcgatcgtctcccgagacgcgtgcagaagcgctcagcctgattagggagaacagatagacatgttggcaacaacctggaaatgcggttcgcggaccttcgacctgtcgcatccactcgtgatggggatctgcaacgtcacgcccgactccttcagcgacggcggcgaccatgactcgttcgaagaagccgtcgcctatgcgctcaagatggtcgaagagggcgcggacatcatcgacgtgggcggcgagtcgacgcgccccggatctgccgaggtttccgtcgaggaggagacgcgccgcgtcgtccccgtcatctccgcgcttgcggggcggggcatcgcggtgagcgtggacacgcgccatgcgcccgttgcgcgtgcggcactcgatgctggcgcctgcatcatcaacgacatctccggctttcgcgacgaggccatgcgcgaggtcgcgcagggaagcgatgcggggctggtcatcatgcacatgctcggcacgcccgagcacatgcaggacgacccgcattacgacgacgtggtctccgaggtcgaggacagcctcgtgcgcatggcgcgccgcctcgaggcgcaaggcgtcgagagagaccgcatctgcctcgatccgggcgtcggctttggcaagctggccgagcacaacgcggcgctgctgctcgccacggagcgcttcgccaatgccggctacccctttatggtcgcggtgagccgtaagtcgttcatcgggctgtgctcgggacttgatgccccgaaagagcgcgacctggcgtctgcactgtgtgcggcggcggcatgcgccgacggggcccaagtggcgcgcgtccacaacgtcgcgctcacccgcgaggctcttgcaacgtcgaggcgcgcgctcgtggccctcggctcgaaccaggcaaatccggtcgagcagctcgacgatgccctcgaggcgcttcgcaagacgcaaggcgtgtgggtgagcagggtctcgacgtacgtgacgagcgagcccgcctacctggccgagcaagacgagttcgtcaacgcggtcgcacaggtccagaccacgctcggcccgtgggagctcctcgatgcgctgcatgcgatcgaggattcgcagggccgcgtacgcgagacgcccaacgggccgcgcacgatcgatctggacatcgtcgattacgagggcgtcgaaagctcgcaagacgagctcgtgctgccgcatccgcgcgcgctcgagcgcgattttgtcgtgacgccgctgctcgagatcgcgccgggctacgtgctcgcagacggcacgcccgtgacccgcgcgaacgtgaccgttggaaaggtgacggggcaggcgagcttcctgagcctctcgtaactacacgggtgctgctgcattcctgccgtaaacttcttgtcatacggtatcgcggttgatgtgataacatcttgacaagctcgtttttggtactaattatcaggaatgcagcataaacgtagtaagcttgataacgaaggagcccattcatggatgatgcaggtatcgaggaactcctcgacgagctcgcagaacggatcgagcagtccaagcctgtcctgggcaacagccagaaacgccaggtcgagattggccccatcttcgagattctcgatgagattcgcgacatcttccccgaggagctgcgccaggcgcgcatcatcgtgcgcgaccggcagggcatggtcgaggcagccgaagtcgatgcgaaccgcatcctcgaggacgcggaacgccaggcagagcagattgccggcgagcaggagatcgtccgcctcgccgagcagcgcgcgcaggagatcgtcgacgacgccatggcacgcgagcgcgagatgcgcgtcggtgccgaggactacgccgaccagatcttcgcgaacctcgagaccaatctggacaatctgcttaagaacgtgacgcgttgccgccagcgtctcaacagcgggatgaccgattagccccgcacctgttgcttgacgccaccggcaagcagttttggaggtcgagcaatgaaaccgctgattatcgaagcctaccccgagctctcggagctcggggcttttcgtgttctgaaaggcacgcttgacgagacatcgtacaggcgtggtgcagaggttctggagacgcccgacggcatctcgtatgacctcacgctcaccaacacgggcgagggcatcttgctctcgggcacggcaagctgcacggcgcatgcaagctgcgcgcgttgtctcgcgcccgcgacgctcgagatctccggagacgtcgaggggtactattcgctcgagcccgtcgatacgctcgagggctacgagcaagacgagtttgactgcctggacgaggacggcaagtttgacgccgccggtcccatcgaggcagcgctcgtgtacgcgaccccgtttgtcatcttgtgcaaggaggactgcaagggactgtgccccacatgcggtgccgatctgaacgaggggccgtgtgcgtgcgacagctcggacgacatcgatccggacagcccgtttgccgtgctgagaaatctcaaattcaacgaggaatgaccgtgggctacaagacgtacacctgccccgtgggcagggaatgcggcggctgcgaatggctgagcgttccctatgaaatccagctccgacgcaagcacgagggactcgtggcgctctacgagccgttcggcgtctccgtcgatcccgtcatcgggatggacgagcccgtctgctaccgcgccaagattcagagccccttcgtgcgcggacggcgcggaagacctcatttcggcatgtacgagcgccggtcgcacaacctgatcgaggcgcgcgagtgcctcgtcgaatatcccgagggccgccgcatcctcgagaccatcgcaaacctcgcctgggactaccacatcgccccctacaacgagttcacgggcaggggcctgctgcgtcatgcggtcatccgcgtcggtcatgcaactggcgaggtcatggtgacgctcgtcgtcaaccgcaaggagttcccgcacaagaaggccttcgtcgccgacttgcgcgacgagcatcccgaaatcgccaccgtcgtcttcaacgtcaacacgcgcaggaccaacgcggtgctcgggccgttgtccatgacggcatacgggcaggggtggatcgaagacgaggtctgcgggtgcacgttccgcatcccctcgagcgcgttctgccagaccaatcccgtgcagaccgaggtgctgtacgacaaggccatcgagcttgcgcatctgggcaaggacgatgtcgtgctcgacgcgtactgcggcatcggcaccatcggcatcatcgcggcgaggcgcagcggatgcgctctcgtcggcatcgagtccgtgcacgacgccgtcgagattgcctacgagaacgcgcggataaaccgcgtgaagaatgcggagttcatcgagggcgatgccggcgaggtgctcgcgagaagcgagggcgccccgagcgtcgtcttcatggacccgccacggggcggctcctccgagcaattcctgcgctgcctgctcgatgcagctcccgagcgcattgtctacatcagctgcaatcccgagacgcaagtgcgcgacctgacggtgctcgcggaccgctatcggattaagcgcgtcgttcccgtcgacatgttcccgcacacgaagcactgcgaaacgatagcgatgctgtcgcgtggatgctgagtgcgaggagcgtgcatgggtttcgacgagttcgaggtgagcatcagaaggtacacggggagcagctctgtcgtgcaggtgcccgagggcgtgcgcgcgatcggtgcgcgggcattcgagaaccatgccgaaattcacgagctcgtcatccccgaaggcgttgtcgagataggcgagcgcgcgttttcctcgtgcatgaacctcgagcgtatcgtgctgccctcgacgctcgaggtgctgggcgcaggcgtgtttcgcgggtgccgcaagctggagcgcgtcgtcttgcccgacggtatcagggcaatcgagcgccagacctttctgcgctgcagctcgctggcggatgttgagtttcccgggcatatcgagtccatcggcggcgaggcgttccagaagtgcgtctcgctcgggagccttgcgctgcccgagagcctgcgcagcatcggcgagcaggcgtttcgcatgtgcagcgcgctcgaggcagtcgttcttcccgcgggtgttgcgtcgatgggcgcaggcgcgttcgcgcgctgcgaggggctgagggcagtccggcttcccgatcgcttgcgctcgatcgcgcccgaagtcttcgaatcgtgcgaacatctggagctcgtcgagctgccagccgggctcgagcgcatcgagagcagggcgttcgcgtcatgccacagcctgctgcagctccagtacccgccgacgctcgtctacgttgccgaagacgcattcgccggcgtgggggagcagtagcgtcccccaggatggtaggcgaacggaagaaaaatgctgacgaccccttctcgaatctcggaaagcgtggtagactactttttcgcgtgttcaaagtatttcagcgtgtcgtaggttttgggcacactgtgtaggaaaggtaaataacgatggcagtacctaagcgtaaaactggcaggattcgcacccattctcgtcgttccgcaaacgacaagtgcgccacgatcggccgctccatttgcccgcagtgcggcgaggtcaagcgtcctcataccgtatgcccgagctgcggttactacaaggaccgcgaggttctctctgtcgaggactaaattcctccatccagcatctttgatgaagagtcggcgctcgcaaggtgagcgttggctcttttgctatgctgttttcccgttttcttccacgatagcctggacggcggtctgctcgtgaggcaaggggcagaccggcgtctgattgatgccgagagaggtgcccgtcaatgtcgcaggtaaaactggtcgtcgacgcaatgggcggcgacgacgcgcctgatgtggtcttggagggcgtcgagcaggcgcttttggaagacccggaaatcttcgtctacctgactggcccggcaataatcgtcgtgccctttgccgaggggcacgagcgctgcgaggcggtgcctgccgaagaagtaatcgggatgggggagccccctgccaatgcggtgcgcaagaagaaggattcttcgattgtcgtcggctgtcgcctcgtgaaggaaggcaaggcagcggggttctattccgcagggtcgaccggcgcgtgcatgtcggctgccacgctcgtgattggccgcatcaggggtatcaagcgccccgcaatcgtcagcgttatcccctctcctgcgggcaagaccgtgttcgccgacatgggggccaatgccgactgcaaaccggagtatctcgtgcagttcgccttgatggggcgcgtatacgcccaggcgacgctcggcgtagacgacccgacggtaggcctgctcaacatcggcgaggaggagacgaaaggctctcagtttgcccaggagtgccatgccgtcatgaaagagcaggttcccaacttcatcggcaatgcagagggcaaaaacattgcactgggcggttttgatgtgatcgttaccgacggcttcaccggaaacgttgcgctcaagaccttcgagggcgccgccaaggcactgctcaagggcgtaaaagatgcgctgcactcgtcgctcaaggcaaagattggcgggttgctcatcaaagacgcgctaaaggacatgatggcaaacgtatccaccgaagagtttggcggcgcgcagctgctgggcgtcaggggcgtgtgcctgatcggccacggcaatagctccgcgcgcgcgattcgcagcggggtgctcgccacggcgcgcgcgatcaggcaggacatgcccggtcgtctcaccgccgagctcgacaagattcgcgcaacacagactgccccaacgcaaaaagcaggcgaatgacaatgactgattccataaagcaccaggtcaaccccgcgcacctcaagaacatcgaggataccgaggccatcttgggctatgaattcaaagacaaggcgctgctcgaggcggcgctcacgcacccctccgctgcgaagcacaccaagacgacgttcaactacgagcgcctcgagttcctgggcgattccatcttgggctgcgtcgtggcgtgcgatctgttcgagcgttaccccgacctcgaggaaggcgggctgacccgcatcaaggtcgcgctcgtggcgggctcgacgctgtcgaagatcgccgccgaaaacggcatcggcgagcagatcatcttcggcgagagcgagaccggcaccgatgggcgcggcctgcactccgcactcgagaacgtgtacgaggcactcgtcgcggcgctgtacatggacggcggcatcgaggcagcccgcgcctggatcgtgcgcacgctcggcccgtacgtgagcaaggacatcgcagcagagcccgaaagccccaagtcgtcgctgcaggagtacctgcaggcgcgccagaagaagcccgagtaccagatcacggggtacgacgggccaccgcacgaccgcatcttctacgctcgcgtgaccgtggaaggcgaggtgcgcggagagggcaagggccgctccaagaaagaggcagaggcgcacgcggcgcagagggctctcgagggctacggtcaaaactaggcttgcgggtccgttgcgccgggctcggccgcagcgagcacctggcaacgggctattcgcacgctgagctgcgggagccgtagatgccgtgtggtagaatgaccgccgtgtatatccgctagaaaccaagggcatccgtgtatctcaaatcgcttgtactcaagggcttcaagtcgtttgcggaccgttcggtcctcaagttggagccgggcatgaccgtcgtcgtcgggccgaacggctccggcaagtccaacgtgtccgacgccgtgctgtgggtactcggcgagcagagcgccaagcagctgcgcgggcaggcgatggaagacgtcatcttcgcgggttcctccgcgcgcaagcccgtcgggctcgccgaggtcgacctggtgctcgacaactccgacggcacgcttccccttgacttcaacgaggtcgtcatcacgcgccgcatgtaccgcagcggcgaaagcgagtacctcatcaacggctcgccatcgcgcctgatggacgtgctcgacatcctcaacgactcgggtctggggcgcgacacgcactccatcatcagccagggctcgctgcaaaacgtgctgcgcgcacgtcccgaagaccgccggctcctcatcgaggaggccgccggcatcctcaagcacaagaagcgcaaagagcgcagcagccgcaagctcaagaacatggacgtcgagctgcagcgcgttcacgatatcgcaggagagatcgaccgtcagctcaagccgctcgagcgccaggcctctcgtgcccgtcagcacgagcagatcagcggcgagctcaaggaagtcgagctggcgctcgccgttgacgacctccgcctgctgcaagcccagtggggcggcttcgagaagcaggagaaggaggcggacgcccagacggagctcatgcgctttcgcctggaggagaagaaccgcgagctcgagaagtcacagcgcctgctcgaggagaaggggctgttcgtcggagacctcgccgagcagcgccgccgctgccaaatggtgctcgagcgtctcgacgcgggcatgctgctgctcgaggagaaggggcgcaacatggtcgcgcgcttgtccgagctgcgccagaccatccaccgatccgagacgcgcaaggccgaggcgaccgagctcttcgatcgttacgaggccgagcgcagggacgcggtcgcgaagatgcaggagctgcagtcgcagctcgacgagcacaaggctaatgcggaaagcgtgcgcaagcagcgcaaggaggcagaccggaagatctcgcagctttcggcggacgtgcgctcgcacgagaagggcatcgacgagtgcacgctcaagtcgatgcgggccagcgagtcgctctcgactgccgatgtcgaggacgacctactcagacgccgcgccgagcagatcgagggctcgttcaacgccatgcagacgacgctcgggcagcgccgtgcgcatctcggcgagctcgaaagtcagctgtcgcagctgcagaaagactccgaggcggcaaagtccgacatcgacaagcgcgtcaggctcgtcgaggatgcgcagaaagcgctcgacacaagccgcgagcacgttaatgcggtgcgtgcggaggcaaaggcgctcgaggaagtcgaccgcgcatttgaccacgcgagccccatgctctcgtgggcgctcgaccatcgcgacgacatcgatggcatcgtgttgcccctcaaccagatcttcacggcgccgcccgagctcgagcagctcgtcgaacacctgctcggcacggacatgttcggtctcatgatggaagatgcccatgcggcaggagcgctcgcgcgcgaactgctcggcaacgaggtaacgggcggggagctctcgcttatctcgctgcagggcgagaaggtcgtctaccaacaggcggaatccggcacgcgcttgctcgacgagctggactacgacagccgctatgaccgcgtggcggagctgctgctgggggacgtgtacttggtcgacagtatcgagcaggccgtcgcggcatccgaggcggacgcctcgggctcgcgcttcgtcacgagcgatggcatcgtggcgtggcccgacgggaagatcaccatcggcacccaggtaaccgatgccgagggcgtcttggggcgcaagcgccggctgacggagcttgccgacgaggagccgcgggaacactcgagcggcagacggcagccgagtccgagctcgccgaggccaaggcgcacctgcaggcggcgcaggcggacgacttcgagctctcgaccagcatcgcgcagctctcgggcgaggcggacagcctgcgccaggagatcgggcgtctcgagcaggccatcacgtcggcgcagcaagagcgcgagcagattgcgcagcgccgcaagaagatcgtcgacgactccgcgaagtcgcgcgagctcgtcgccgagctcgaggagcgcaaagagacgctcgagaaggaaaaagacgagctcgaagagcagctcgcggtcgcgcgcgaggaacgcggcaacctgttcagacgcgaagacgtgttcacgcgcaacatctcgacgctgcaggtcgatgccgcgacggtgcgcgagcgcgaacggcacctcacgcagcaggtctcctcgctcgaaaaagagctcaaggaccttaaggactcgcttgccgtctcgcatgagacggagaacagcctcgagatcttgcggctgcgcgtcgagccgctctacgaggtgttcacggagctgcggggctacgtgaccgagaaggccgagctgctgcgcgaccaggcgcagctcgagcaggcgggccaaggcgacctcaaggcggcgatcgaggctgcgcgcaagaacgtggcacaggcacaagacgagcttgccaaggcgcaggaaaagctcaccgagctgcgcatcaagaagagcaagctcgaggtcaaggtcgagcaggccgtcaagaccatcaccgaggaaaacggcgtgctgctcgacatcgcgctgcagattcccgcaccgcaagaccgctcgagcagcgaggcacgtgccgaggccctgcgaaagaagctgaagaacctcggctcggtcaaccccatcgccatcgaggagtaccgcaagctcaaggaacggcgcgatttcatcgccgtgcagctcgaggacctcgaggcggcacgcaaggcgctcaagcgcatcgtggcagcgatcgaccgcaagatgcgcaaccgcttcctcgacacgttcgagcaggtcgacaagaacttcgaggagatattcgcccagttgttcccgggagggaaggggcatctcgagctgaccgaccccgattctccggaggagaccggcgtggaagtgcacgcacagccgcgcggcaagacggtgcgcaagcagacgctgctctccggcggggagcagtcgctcgtcgccatggcgctgatgtttgccgtatacaaggtgcgctcgacgccgttctacatcctcgacgaggtcgaggcggcacttgacgacacgaatctgcgccgcctgctgtcgtacctcgacagcgtccgcgaccatacgcagttcatcatgatcagtcaccagcggcgcaccatggagatggcagacctgctctacggcgtttccatgcgcagcgacggtgtctccaagctcgtctcgcagaagctcgaccaggctatccgcctcgcgcatacgagtgaggccaaagacgtcgacgagttcagcggggcacagtaacgccccgctttcccgcacgtggcgggcaagcagggcgcatgatgacggtgccgtgtacgtagtcggtgcacgctgcgactgcctgaagcgacggccgcgacgctgaacgggcgattactcgaagaccttcacgcgctgcgcgatgtcctcggcttctttggggtcgggctcggcgacgatgccgccgaagtccatttgggcacgcaggcgccagctctccggcaggccgaacagttcgtgcaccttctcgtcgatgacggggttgtagtgctggatgttcgcgccgatgccgaggtcgcgcaggcccgaccagaccgcgatctgcagcatgccgttcgactgttcagaccaggggccgaagttctcggcatagcgagggaactgcttctgcatcgaggcgacggtcgcgtcgtcgatgaagaacagcaccgtgccagcggcgctcttgaacatatcgattttctcgcgtgcgactttgccgccgaagacgtcgtagatggcatcccacagctcgtcttgcttggcgcccagggcaacgacgacgcgctggcttttcatgttgaacgcgtcgggaacgagctcggtgaggcgctcgacgaggcttgtgacctcggcggcgggcacggggagctctttgttgagctggtagacgctgcggcgcttctcgagggattcttgcatggacatggctggttcctttctgtgcgaaggcctattcgaggccgaatgcgaagctcgtcatggacatcgaacccaagttcctgacatcgttgaacacggtcgcctggtcgccttgacttgcgcccaggatgtagagcagcggggcgaagtggtcggaggtcggggcggcgtagcttgcattgtcgagcttctggtagtttataaccgcctcgtcgtctcgcagcaataccaggtcgcggacggtgtcgctgaaagagtccgctgcttcggtgcccttcatgttgcgccagtcggtgagtgcgaggttgtgcacgacattgccgctgcccaaaaccatgatgccctcatcgcgcaagggggagagcctttctcccaggtcgtacatctgcgcgggcgtgaggttctggtcgacgctgagctcgacgatggggatgtccgccttggggaacatgtggacgaggacgctccagatgccatggtcgatgccccaggtgttgtcttcccgggcgttcacgccgtcgaggtccagaaccctttggccgagctcggggaatcccgcaacgggatattcgactcgatagagctcttcgggaaatccgtacatgtcgtacacctggcgcgggccttctgaagtctggacacgcgtgcccggggtgtaccagtgcgcgctgactgcgaggattgccttgggccgcccgccggcaaggagcttctcgcccatcgcgtgcagctcggaggttgccgtgccgtcctcatagcatgcgttgagcgcgcgctcggagggtgcgagccgcttttccgcctcggtgttcgcaagggcgagcatggggctgccgtgaccgatgaacactgctggtgccttatgtgccatacgtgactccttcacctgttcgaatgctgatagcggcagcatacggcatgggtgtaattgagatgattacaacaaggtttcaatagggtggatgacacggtgcagcgagatgcgcgcagcgagcgtgggacgtgtggcagtgccagggttctcgcgcaatagacgtggaatgtgtggcagtgccacaaaccccgcgctgaaaacgtgagatgagtggcagtgccacacatctcgcgcaggggacgtgcaatgagtggcagtgccacgcatctcgcgctgggtgggtgagtcgtgcgcgaaatccatggcactgccaaagacgccgtatggaagatgctgcagcgtggtgctacttgcgcaccgccttttccacgagttggttgtactcgtcttgcgtaaggtcgtagttgtagaaggtcttgtagtagtcggtgacgacgttttgcaggtcatcggagaattggtccgggtagcacagccgcgcgaaccactgcatgcccagcacctggttgacggtcggcgggttgttcagccacgtccagggcgtggacggcacttcgtagtagttcttgtgcgcgatggcggagatgcccgaccacgccgcatcggagccgacgctggaatagatgctgttcgctccaaacacgatgagatcggggttccacacaccgatctgctcgaggctgatctcatttccggcgcccgagcccgaggccttctccacctcgacgacgttgtcggcgatcaggtcgatgacggttccctggtacgagcccttcgcaatcgcgttcaatccggaatcgccgagtaggtaggcaacgcgcacgcgcttgtcggcgggcactttcgagaccgcatcgttgacctgcttgtaggctgaatcgcaataggccgcgagcgtctcgcagcggtcttgcatgccgagcaggtcacccagtttgcggtaggcgcttccccagtcatcgaggggcgtttcgatgaacacgacgggaatgcccagctggtcctggaggttgtcgaggtcctctttcaggccgtctttgtattcaccggtgtcgattacgatctgcgcgcccgatgccgcgactgcttctttgttcatgtcgcccttggcgccaaacgccgccccaaagaccggcaggtcggcaagcgacttgtcgaagtacttgagctggtcatccgaaagcttctgcgagaggccggccatcttctcgggcgcgacggtgagcagcacctgattggccgtgtgccccgacggggcaatcttatcgatgttggtgggcacctcgaccgtgcgcccggcagaatcggtgaactccttcgtctgcgcctgtcccgattgctgtcccgattgcgaagaccctccgcatgcggcgagtgcgcccgccataccgagcgccaatacgagcgtgcaggccagcgccaggatgcgccggagccgtgctctctttggacgtgccttctccatgttgcttcctttctatcgttcgatttcctgcacgggcacgcagacgcgcaccctgtcgtcatacagcgaattcacctcgacatcgacgtggtagatttcgctgatgagctcccgtgtgatgacgtcttgaggacgcccgaaggcgagtacgcgccctctgttgagcacgagcgtccggtccgagtacagaaacgcctggtcgggctggtgcgtggactgcaagatgctcagcccctctcgcgcgaggctcctgatggtggacagcacgcgtacggtgtttccgtaatctaaggcactcgttggctcgtccatgacgatggtccgcgcgttttgggcaagcgcgcgggctatcagcacgagctgctgctcgcctccggatatctgcgtgtaggtgcggtgggcgaggtgcgcgatgccaacgcgttcgagtgcctcgtatgcgatgcgcttgtgacgggggccgggcatcctgagcatgccgaggtcggcgcccgtgctcatgagcacgacgtcgaggacctcgtaatcgtagatgggcgcatgcgactgggggatgtaggagatctcgcgggcgcgctggcggatggagagcgtgcgcatatcgtgcccgttgaccttgacagtgccggaataatcgccgttcagacccaagatgcagcggaacagggtggacttgccgactccgtttggcccgaggatgttgacgagcatgccgtccgggatacttacatcgatgtcctcgagaacggggtgcttgccgtacgagaagctcagatgcgagatgtcgatgctcatagcgacttcttcctcgtgatcaggtacaggaagaagggcgcgcccacgaatgccgtcaagatgccgatgggaatctcggcggttgtcgcgagacgggagatgttgtcgacgacaagaaggaagctcgcacccatgagcatgctggcgggcatgagcttgcggtagtcgcatcccacgatgaaacggcataagtgcgggatgacgagcccgacccagccgatcatccccgagaccgccacgctcgccgcggtcacgagcgtggctgcgatgatgacgaccaggcggatgcggcgcgcgtcgacgcccatcgtcgatgcttcgtcgtcgcccatggtgaggatgttgattttccagcgcacggcaaacagcacgacgcagccgatggtcatcgggatagcggtaaaaaagagatttgtgtcgagcttcgcgccggtcaggctgcccatcagccagtacgtgatggcgggcagctggtcttgcgggtctgcgacgagtttggtgaacgagacgcccgcggagaacagcgagctgatcatgacgccggcgagcactgtgacgagaatcctgttccccttggcccgcgcgctgatgagcaggacgagcgctaccgtcacgattgagaacgcgaaggccgatacggagacgccggtcgcgcccagacccgcgagaatcgccacggcggcgccgaatgccgcgccctgacttgcgcccaggatgtccggcgagacgagcgggttctggaatgtcccctggaatgcagccccggcggcagccaggcagcaaccgaccatgagggcgagcaggatgcgcggcagacgaacgttgaaaaacatcgtttgctgttgggtggtccaggtctggtcgaccggaaacacgaggctggcaagcatctgcactgcctcgccgggtgagatagggtagcgtccgagcagcagcgagacggccatggcgacaaccatgaacacgatgaggaaggctatgaaggcatcggcgcggtggccacggtcgaaaaggcgagggggcgtgcgcgattcatcagctctttcggcattagcgacagatccagatgtgctccccaacacgcctgattcctttcgtctctcgcgttccaagagtttcggtacccgaataatttattccgaacacagaataaattatgtaacatataatagttgaacgaaattatttgtaaataaggataaatatgttgtatctactcacagggcaggtccagacgggcaagacgcgctggctccagggtctcgtgtcggcgtacgaggcacgtggggttgtggtaggcggggtgctcgcgccaggagtctggcgcgaggtgacggcgcgggacggcgccacatcgttcgagaagctcggcatcgacaatatcttgcttccggaacatgagacgattccgttcgcatcgcgtcgcgacctcgcggttttggatgggaccttcgatgcggaaagccagagcgcacgcgcgcagcttcattgggagatttcgcaagacgcgctcgcacgcgtgaacgcgcacttcgagcagctcggacatgaggcgggcgtcaggaaggcggcagcgtcgttgctcgtcgtcgacgaactcgggcggctggagctcctgcgcggggaggggctcgtcggtgcgctcgcccttctcggactcgggccgacgccagcgtatcccgatgcgatcgccgtcgtgcgcgaaacgctgctgccgcgggcgcatgagctgttggacggcccgtggaaaggcgatgtgcgcgagatcgcccccggcgcctcgctcgagctgtcttcctcgtgagacgcaacggttggggtttcgtaacgcttgccgatgcggcgcggtgctagcatgcaacgctgatagcagacgtggaaaggcagcatatggcaggcgagctcatcgggttcgaagaacgtgggacgcaccagggcgaccacatcgtccgtggcaccgcggcagacggcatgattcgcgcgtttgcgatcaccgcgcgcgagacggtgcagacggcgcacgaaaaccacagcacgagtcccctcgtgaccgcggcgcttggccgtctgatgatggcgggacagatgatgggcgtcatgttcaaggggccagacgagctggtgacgctcaccgtgcgcggcgacgggccaatcggcgggctgacggtcacggcaaacacgcacggacaggtcaagggctttgcgaaccaccccaatgtgtggcgtgcgcacaatgcgctcgacaagctcgacgtcggcggtggcataggggccggcacgctgaccgtgatacgggaccagcccggcatcgagccctattccagtgccgtcgagctcgtctcgggtgagatcggcgacgacctcacctcgtatttcgtcttgagcgaccaggtgcccacgtcggtgggggtcggcgtgctcgtcaacggcgacacgagcgtgaagcaggcgggcggcttcatcatccagctcatgcccggctactacgactaccttgtagacgaactcgagcacaacctcgcgggcgttttctccgtgacctcgcttctcgaggacggcatgacgcccaccgatattctgcagtatttgctgcgcggcctcgactaccagcagctcgaggttgtgcccgcgcagttccactgcggctgcaacgaggagcgcgccacccgtgcggtcgttgcgctgggaagagacgagctgcgcgacatggtcgagaaaggcgagccggcccaggctcactgccatttctgcggcaaggactacgtcttggagacttcgcgtctcgaagagctgctcgcgcaggcatctagccagaaatgacggcgccgcagcctcggtggccgcgtcgggcgcctggtgcgtgcaatgctgcccgccactacgagtcccctgtcgtgcgagggctacttgacctcgatgagctcggtgccgtcggtggggtagtccgagagcgcgaccgagcggatcgcggggtcgtcgtacgtgttgtagtagtaggtgttggtgcgggcagaaaagccccccgtgtagacggttatctcgaacgcgccgtcggtcatgcgggcggcgccgtcgatcatgctcacgccctgcagcgtatggaacatgcgggcgacgttttcctcttcggtgtctttgaccgggtagttcgcgttgaggtacgcggcgcgcacgaagcgggacggcgagtagtagtcgccggggatgccgcgcatgccgccgcccgagccgtacggcgcgagttcggccttgtcccatttcacgcccgtgggaacctcgggcgtggcgttgaggtagttgcgcacgttctcggcgtgccaggcaaagccgggctgattggcgagcacgtcgaagtcatcgtggaacacctgcatgccctcggaggtgtattcgacgacgatgctgcgcgtaccgtcgccgatgatccagtgcaaatacgagacgggcatctggtcgctgagcgtcttgccgacgatggcgacgttgccgagctctgcctcgacctcgtcgacagtcgcgtgcttggcgacgacccacagcgggaactcgaaggcggcgacattcgtcttgccctcgacaggcccttcctcgtagtgcgcgtatcccgggaagttcagaccggcaaccgcgaggccgcgctcgttcgcgcagtcaaagtacagcggcgtgcccgccgccgtgatgcccatgccgatgatggggtagtcgattcggtctgtcgcgccgaacagcgagacgaccttggcgtttgtcggcgtgatgacgacgtgctcgccatacgagcagctccagtcaaggttgcgggcaaagtagagattgccctgagcgtctgagaagcggatacccgtgcacatagaacccatcctttcgtctgacgggcagcggctctgcaaatgcccaatctcgccgcccgtactttcttcaaaggacacgccatgatgtggtgtgctctgtgagtcgatgatagtgcgagcggttggcgtgcgggcgtatccccgggttttcttcaccgaatcgatgaattggacgcggttcctgtcgccggaaccgccggagcagcgggctgctggggctccacgtcgccgattgcctcggaggccttgaccaacacgcgctcatcgtatccgctgaagcaccactcgacgtgctctttgcccatgccagatggcgtgacgaggctcaccagcgggaagatgacgagcgcgccgaccattgcgatggcgccgcagttgatggggctgtcgatgagggggtgccctgcaaggcccgtcgccatgttgaccacggtgaggccgacgccccaggcgaagcagacccaggccgccgccttggacgagcgcttgaggtacagcccgtacaggaacggggcgatgaacgagccggccaacgcgccccagctgtagcccatgagctgcgcgatgaacgtgatggagctgttgtactggacgagcgcgatgacgacggagatcaccacgaagaccacgagcaagacgcgcatccacgcgagcgcctcggagtcgagcatcctcttgcgaaacaccggcttgatgaagtcgagcgtgagcgtggagctcgaggtgagaaccagcgaggaaagcgtggacatcgaggcggagagcaccatgatcacgatgataccgatcaagatgtcgggcagccccgagagcatcgtggggatgatcgagtcgtaacccgctgcgggcacgagcacgcccgcggcattgacggtcacgtcgagctcgtcggagaacaggcgtccgaagccgccgaggaagtacgagccgcccgcgacgacgatcgcgaagatggtcgagatgatggcgcctttcgtgatggcggactcggactcgatggcgtagaacttctgcaccatctgcggaagcccccaggtgccgagcgaggtcagcacgacgacccccagcaggctgagcgggtcggggccgaacatgctggcaaagacgccggcgacggtgccgttgggaacggttgggtcggatgcgttcgcgaggctgatgagcgcctgcgtgaaaccgccgtgcccgttgagcacgctcacgatgacggccacgattgacacgagcatgatgatgccctgcacggtgtcgttgagcgccgtggcgctgtagcctccccagaccacgtagatgcaggtcacgacggccatggcgatgacgcaccattcgtaggggatggcaaacgccatgccgaacaggcgcccgaggccgttgtagacggaggcggtgtaggggatgagaaacacgaagatgatgagtgcggaaacgatacgcagggcctggctgtcaaagcgcttgccaaagaactcgggcatggtcgtcgccttgatgtggtgcgtcatgatgcgcgtgcggcggccgagcacgaaccaggcgagcagcgagccgaccagcgcgttgccgatgcctgcccagaaggcggcgagaccgtacttccagccaaactggcccgcgtagccgatgaacacgacggcggaaaagtaggaggtcccgtaggcgaacgcgctcatccatgggcccaccttgcgaccgccgagcacgaagccgtcgacgtccgtcgccttcttgcggctgtagtagccgatgtagatggtggtggcgatgaatatgacgagcagtgcgattttgacgatcatcgggtgtgcctttcctcctgagaagcgccgttctctcctcgacggcttggtggcatcctagcttctttagcgcgcgatgctaaaattaataatcgatataacagtttgtgatagcgtcgagagggacggggcaggcgtggacatcaaacgatgcgaggcgttcgtcgccgcggtggacaacgggagcatgtcgggggccgccaagcagcttggatacacaccgagcggcatcatcaggctcatcaacgcgctcgagggcgagctgggatttcctgtggtcgcacggcgttcgacgggcgtcgagctcacgcccgagggcgcgcggatgctgccgctgtttcgggagatgatgcggatcgacgaccaggcgcatcagacgagcgcccgcatccgcggcctcgcagaaggcgagcttaccatcggaagcctgtcgaccctctcaagttattggttgcctgcggtgctgcgggagtatcggcgggggtttccaaacgtgaaggtgaatgtggttggcggcagcaacgcgcagcaacgtgcgctgctcgatcagagcaggattgactgctgcctgtgccatgggcctctcgagcattacgagtggatcggactcgggcgccagcagatcatggtgtgggcgcgccgcgggacggcgctcacgcggcacagcgaggtgctgctggtcgagctcgacggcgttccgttcgtcatgacgaaccccgatgacgactcattgttccaggacctgatgtacgcgaaggggattgagcccgacatacgcttcacgacctcgggctggcgcacgacctattcgatggtggaggcggggctcggcgtgagcctgtgcgccgacggcatcgccgaggagctggcggggggcgtggtggcactgccgctcagcccgcaacgctatttggagtttgggattgcgcttccgccgggcatgtcgccggcggtggaggagttcgtcgcgatagcgcagcagttcaagggacggtggcccgtgcaccccgcatgaggcgcggcggatgccacgatatgcgcgagatgtgtggcactgccacggtttttcgtgcgccttgcagcggatgcgtggcactgccacgtttcccgtgcgtaagacgtgggatgtgtggcactgccacggttcctgtgcgccatgcatcacgcgcgagcaccggagtgaactttgcgtcaaatgcggcaggcgccacgaactgcgagctatggtttctccgaaatgaaatgtgatgagagagcccaaagggtttgggcgtgagaaggagaaatcatgacgacgattattgcctgcgacatggacggaacgctgctcgacaagaactcgcggcttccggaagagacgtttgacctcatcagagacatcgacgcgcacggcatccgctttgtcgcggcatcgggcaggcgcctcgacacgcttctctcgctcttcgaccccgtcttggacaacatggatttcgtcgcctcgaatggtgcgcaggtgatgctccgaggcaagatcttgagccgggagatattctcgcgcgtcgcgctacgcaagcttatcgagctcgtggatcagttcgattgcatgcacctggcacttttcgaccgcacgcgcacctttttgctggacgaccggcaagcatacacgccggagttcgacaaggacctgcccgagccggtatacacggagctgcccctcccgtgcatcgacatcgtcaaggtatccatcaactgcgacgaggacgtcatggacatggcatatgtgctcacgcgcgagctgggcgatgacttcgtatttgccccgtcgggaaaccgctgggtcgatgtgctgcaacgcggtgtcaacaaggcgaccggaatgcgagaaatcatggaatggtatggctcggtccccgtcgagctcattgcctttggcgactcgatgaacgactacgagctcatcaagatggccgggcatgggtatgcgatgggaaacgcgcgcgctgcgctcaagcaggtcagcgaccgggtcatcgggacgaactccgagcatgccgttcaacgcgagctggcgcggatactgcgccagggggaataggggcacgcgcttgcaccttccgcgcatggcgcgtgcggcgtgtggcgcggccgcaatcttcatgagaaaaaacgggcgggcaggcgtctgccctttaccgatggcctgttgggggcgggcgggcagctgctgcccgccccgtgcctagttttctttgccaagaagcttgatgagcgacctgagctggtcgccacgctccctgagcgaagcaccgagctcgtactccgggttcttcgtcttcatgttgcggtactcgtccatcatcttgctgaagatctcgctgttggaaggcggggtgaagacgatggtgttcgcgccggcggcgatggtgtcccggatggactcctcggtccttccgccgctcgccatgatgggcagcgacgggtactgctccctgatgcgcgcgaccgcctcggcggtgcgcttgccggcggccacgttgatgatcgaggcaccagcgtcgatccttgcctggacgtcttcctcttcggtgacaacggtggcgatgatggggatgtcgatgacgcttttcatcagcctgatgttcgagttgctgatgggggagttcacgactacgccgtaggcaccttgggcctcgacgtcctgggccatgatgaccgagcgcatgcccttcgtcgtgccgccgccgacgccgcagaagacgggcatcggggaggcgctgatgatggcctgcgagatgacctgctggggcgtgaacggatagaccgccatgaccgcatcggcatcgcagttgcggatgatcgcgaggtcggtcgtgtagacgacgcttttcacgcgcctgcccatgatcgccatgccgcgcgcgtctcgaatcgacttgggcgtctcgatggcgtgcgctcgcagcgtgcccgtgatgcgcgggatatcggtatcgatgctgtgctcggtcatgagctctccttgcctgcggtcggtagtgaggttctctgcattatagagcgtttcattgtggccggcgcctctcgtggtgcgttgttttcatatgagtagcatcgttgggaaggtgttacttcgcgggcagaatctcgatccactggccatcggggtctgcgatgaagtacaggtgcatgcgcgggttctcgaagacgatgcagcccatctgctcgtgcagctcgtgcgccgcatcgtaatcgtcgacctcgaaggcgatgtgcgtgtcccgaccgccattttcgtagggctcggtgcgcccgttgttccacgtgagctcgatttcgaacggcgtctcgtcgttcgcgaggtacgtgttggtccaggagccgtcgtcggggcccatttcgcgcacgacgtgcatgccgagcgccttctcgtaaaacgcgatgcttgtctgcttgtcgagtacgtgcgtgcaacggtggatgaattttgctttcacgggaattcctttctgttttgttctcgcgaggctatattttacaaagccattcttgtccgaaggagaaacaacatgaaagtactcatgctcaacggcagccgcaaagagcagggctgcacctatacggcgctttcgctcgtgggcgagtcgcttgccgaggcgggtatcgagaccgagatcgtgcacatcggcgtcgatgtcctgaaaggcaaagtggatgcgctcgtgaaagaggtcggcgagaagggcgcgctggcagatggcctggtcattggctcgccggtgtattacgccggcccctcgggagagatcaaggcgtttctagaccgcctgttttcgggttatgccgaggcgtttcggtacaagccgggcgcggcggtgacgtctgcgcgcagggcgggcaccacggcgacgctcgaggtgctgcagaagtacctcacctacaccgagatgccgctcgtgagctcgtgctattggccgatggtccatggcagcaagcccgaagacgtcatgaaggacgaagaaggcgtgcacatcatgcatgtgctgggccgtaacatggcctggctgctcaagagcatcgaggcgggcaagcaaagcggcgtcgagcagcccgtcaagctcgagaagccgaacacgaacttcatccgctagccgccatcttggtccgaggggccgtggatatcgtgtcattttggtccgaggggccgtgggcatcgtttcattttattgagtgcgaggggattcattcgtgggcgttgggaagggaaactgtgcaatctgcgggaaaccgcttatgtattaccgtgatgcgcgcgagatgacgtgcgtcacctgcggcaaacgcgagcttggccacagcatctgcgaggacggacactacgtgtgcgacagctgccatcgcgccggtggcgtgagctgcattattgacgtatgcctgcacaccacgtcggccaatcccatcgagattgcgatgcaggcgatggacgatgccaggatctatcccaacggccccgagcaccacacgctcgccggcgctgcgctgcttgcggcatatgcaaacgcgggaggcgagctcgaccgggaagaggcgctcgccgagctcaagacccgcagtctcgacattcccgggggcacctgcggcttttggggcgtgtgcggcgctgcgacgagctcggggcaggcgatgagcatcatcgtcggggcgacgcccatgtcgcgcgagccgtgggctctctgccagcgcctgacctcggaaattctcgcgaaccttgccgagctcggcggcccgcgctgctgcaagcgcacgtgcttcaccgccatcacgactgccgtcccgttcatcgctgaggcgaccggcgtccagatggagcttccggatcaggttgtatgctcgtattacagctgtaatccccagtgcctgcacaaggagtgcccctacttcccggcgtctgccctctaacgttgcgcccgttcgcgcgcaacggctgcataacgcccgcgcgggccgcgtgcgatgcggtatagaatatcctggtgcaattttggctacacgggagtttgctgcatatggcatttagagatcgaatcaggcgcagccgcgagcgcttcagcgagcgggtgaacatcatcttcagacgcggccccaagctcgacgaggagttctgggacgatttggaagagacgctcatcttgagcgacctggggggctccgcttccgatcaggtcatcgagaacctccgcgaacaggcgacgcgcaaggcacttcccgatgcatatgccgtgctcgaccttctcgctgacgaaatcgagggcctgttcgcgccgacggacaacgacccgttcaggctcaacccggtttgcgtgctcttcgtcggcgtcaacggcgctggcaagacgacgacggtcggcaagctcgcctatcaggcgtctgccgctggtcgcaaggtcctcatcggctctgccgacaccttccgcgcggccgcgatcgagcagctcgacgtctggggggagcgcagcggcgtcgaggtcatcaaacgcgagcgcggtgccgaccctgcgagcgtgtgctacgacgtcatggagcgcgcggagcagctgcaaagcgacctcgtgctaatcgacacctcggggcgtctgcacacgagcgacgagctcatgcgcgagttgcagaaagtcgtcaacgtcacgcgcaagcgcgcggacatcgatgtgaaaaccgtcctcgtcatcgacgccacgaccggccaaaacggcttgcagcaggcgcgcgagttcaacaaggcgctcagccttgacggcgtgatcatgacgaagctcgacggcacggcgaaaggcggcatcgccgtcgccatcagccacgagctgggactgcccatctgccgcgtcggcgtgggcgagggcatcgaggacctcgagcccttcgtcgcccacgactatgccgaggcgttgttcggcgacatgcgcggtgaggaagccgctcatgaggatgccgaagagcgcgaggccgaggatcagctggagccggctgtcgaagagccgcgtcaggagaaggagcctgcagaggaatcggagcccgagcccgaacccgagccgctgacc

SEQ ID NO: 576 - DNA, 21687 bp, Unknown
  16S sequences of unknown bacteria
tacaggaagaaaggattttaacagccttccgtcttttattcagagattgtattttatataaaatttcgggcgttttttgttttcgaaaattcagaaataaacttctattctctttttatactatactttatttctacgtttcccaaacttcattctatgataaaaagaaaaggccgcgtttctcgcgcgacctctctcctcccaatttcttataaaacaagcaatttcatttttctcatagattattatccgtcaaaaaagtcagttcgagcaggaggcaatttaaaaaaatgtaaaatcttccttacggataggaaaagtcctctttttgcgcgaaaacttttatgaaggaaatatagataaaaaacgatggaatcgtcatataatcttataaaacggaagacgacagaaaagccgcaaaggctctttccatcttcggcgtccaccattcgagatatcccgcccgggtcggatgaatgggatccgccatataaagggcgcgattctctgcggaaatggcgttaaattttttatccgtataaaaatcgagaatgccgattccgtactttttcgctatcttgtgcagcgacgcgaccatcgccgcataattttcattttcgtaaaaagggtttgtatagaaaagcacggggcagttccacgcgcttctcgcgtaacgaatgatatattcgatggcgccgcaaaccgtcgccgtatcgagttcctgcttttccgaagaaattttccccagcggctttccctgagccgcgtcgtttgtagagagctgacaaacgaacaaatcaaaatttttttccttgatttttttcaggcgagcaatataggaatcggaggcgcaatcgaccaatgtagtaccgctcaccgcttccttggtatactcgtttccattcctttttgcgatatattccacgaaggaaacgcctttcgccgccgctccgtacgtcaccgaggagccgagataacagatcgtttttcccgtcaaacctatatcgggaagcctctttacattttcgggcgcatacctttgcgcattgccccgcagttcttccattttgttcttcctcctttcccttattatatcatcccttttctcaaaaagccagcttttcacgccccgtctttcttcttttacaaaactaaaacgcccttttccgctaagaaaaaggcgttttattcattgttattttaccgcttccgcaacgatttttttcatctcggaaaaactcttttccatttccgccgcaaggcgcagttgtgtgcggctgcgcaccaaattatggtcgtcatacttgatggcgaaatacgtatcgcccgcaaggtaatccgccaaaaaacgcatcccgcattccatcgtcatcagataagagccgtagggaagaagctccttttctttatccgtaatgctgtctttgaccgccccgcagtatccttttgcatacgcttcgaacaatccgatgtcgaaatgtaccttggtgaggtctttttcgtcctctgcggcggtagaagcgccgaaacggatggaatccccgaaatcgtaaagcatagaaccgggcatcaccgtatcgaggtcgatgacggcgcgcgcctccttcgttttcgcatccattaaaatattattgagtttggtgtcgttatgcgtcacgcgaaggggcagagaaccgtcatttaaagcttttgccgcgtcgccgtaggtatccttgcgcgacaaaataaattctatttcttctgcgcagtcttttgcccgaccgcatttatcttctttgaacgccataagaaagtcctgaaaacgcttgggcgtatcgtgaaaatgcgggattgtttccgtcagcccggacgcgtcaaattcggaaagatagttctgaaattccccgaatgccttgcccgaattgaaaaacacttttttatccgtcacctgttgataagtgaccgtattctctataaactcgtatacgcggaagcattcctcgtccttcaaaaagggcgcgcccgactttgtggggactacgttcagcgtttcaatgccgcgggaacgcaaatgctccgtcacgccgcagatgtttttcatcagactgtcggggtcgggaaagacgcgggtattcatcttttgcaggatatacctcttttccgtcgtcgtgacgagcagcgtgaggttgatatgtccttcgccgtagggacggatatccgtcacttctcccaaaaggcggaagctgtccgccgctttcttatattccttcgtacaatccgtcatttacgtatccccctatcgcttctttgacctccgcgagatcttcgcggtaggtgatgccgtaccatttatccgaatttttgaacatacgcacggtcgctctgccctcttccaacgctttggaaatgacggaaggaataaagaattcgtccttttgcagatcggcgttttggagaaacttcgcgtattcctcccggagaatcccgaaaatgtcgggcgtgagtccccaaaggttcatggaaacgggcgtatcgccgggaagccgcaccttcgccccgtctttttcataactgccgtcgggagcgattttcgtgatttccgtcacccttttcaagtatccgttctccgattgacacacgccgcgggaaaccgtgccgtttttgctgagcgtattttcgagcagatacgccgtcatcgcatactccccgttctttgcctcggacaaatgcttttgaatatcgaaaaaggcgttatgtccgtaataatcgtctgcattgatgatggcaaaaggctctttgaccgctttttcactgcataaaatcgcgtgcgccgtaccgaaaggcttagttctgcccgcgggcagatcgctcctatcctgcaatacgtattccacggcggtatgctttgcaatcctgtcgcctacaagacggcggaaatcttcttccatgtcctcgcggacgataaacaccgttttatcaaaacctgccttgaccgcgtcgtatacggaaaaatcgagaatcccctttccgtccgccgtgacgggctccgcctgtttcagaccgccgaaacggctgcccatgcccgccgccatgaccacaagtgtcgttttcatatttttattacctcgcattgactttcttgttttgttatgctataattatagcatataaaataccgtaaccctatacatttttttatcatatatcttcgaaatctgatattttttgaggaaagattatggaaagcaatctctatcccgaatgtcccgtcaaaaacgttctatccatccaatccctgttcactttttccaatcggaaattccccgacggctattccttcaagggcgaaacgcacgatttcaccgaagtggtgtgtatagcggacggaaaggcgggcatcaccgtcgacaaaaacatctacgtcctttcggcagggcaaatgatcgtgcatatgccgggagagtttcacaccatctggtcggactgcggcacggagcccgaaacggtgattttttcctttcgcgcagacgcctttccccggctgtccccccgcgtttacacgcttttgcccgaacgaatttccgagctgaaaacgattttccgcgaggcggaaagcgctttccttttgaaaggcagcaatgtggagggcatacgcgagggaatggaaacggaggcttccgccgtcgtgaagaaattggagctttttctcttatccgtactctcaaaagacaacgccgccaaatccgaatacagcagccgaagcacggaaaattatatccgtattctctccgtcatggaaaacaggctggaagacgccctgacctccgccgaattggcaaagctgtgcaatatgagcgtcccctctctcgaaaagacggtgcgccgatattcgggctgcggagccatatcctattacaacgaactgcggatgcaaaaagccgccgaacttttatccgaaggttcgagcgtgaaggaaacggccctttccttaggattttccaatcaaaattattttagcgcaagtttcaaaaaatggtcgggcaaagcgccctcggaaataaaaggagtcatacataaggaatgatttagaaaaaacgttttttgcgctgatcgcatccctgccccctactttttaaatttttcccattcgtaccgcaaagcgcggcgattttatacccgtccttttaaaagatagaatttttcgctgcgcccatccgccgaggtcaaggaggcgacggattcctccggcgctttttctattttccgctctcgtttttcaaaggctcttaccgatacgcttctttttcttgttgtaaagataaaagagagaatctcttttcctatctttctgcgcggacgataattgaaaaaacgttttttttctttaacgattcaatattttacggtcgtatctttatcttaaaaagcccgaatgcaaaaaaggcggcggatcttttcgttttcgaaaaaatccgccgtcttctttccgctttgcctttcggaaaatcccgtaaggttaagcctgcgttatttcagagagttccgccgcaacgtccgccgcgtcgatactgaaagaaacattggtgaattccgctttcgtgccgctcatcgtcgcaagtccgaatttgtttgctcccgcagtaaattcccaatcggaatgccccgcgtcgacctgcgtctggtgcccttccacgagatatgccgcaaggctttctttgcccatatatgctccgttgacaaacaggtacacgtcgtcgccgtttctgactactttgaattttatcggggaagacgtgccgccgttgtccgtgcgggcggccgtcagcgcttcgtcgaacaccaatttttcgtcgtccgcataagccgcggcgtattttttcgtccacgcccaatcctgtccgtatcccacaaatccgacgcgcacatctctgtcctgaatgatgaggagtatcttttcggaaatctggaaccctactttccattgagtccagccgccccaatccatgacgacggaatattccatgacgtatttatcgctttccacgccgtccagagtgaataccgactgccagccgcccgccgtgtcgccgctcttgcttcccgtcgtcgtgtattttccgttttccgcatcgcagaaaatagggtcggaaatattccccgccgtaaattttaacgtgaatcctttgatttcgccgccgttaaagccgtccgctgtggcaagaatctctttcgccaaagcgttatagcccgcgggcgtaatgcggataacgtccgtttttcccttgcggacgggaacggtggcaacgccgttttcataagttcccgccgcgcccgtcgtgacgttgagcacggcgacggaaacgccgcccttgacgctcaccgtgagcctggcgccgatcgtttccgtcaattcttcgaaaacggctttaatggcggtattgcctgtgataaaaaacgtatacgttccctctttcgccgcttccgtacaatcgacgccgtctatcaaaagagaggacagcgtccagccctcgtcgggcattatctcgacggtgacgggcgtatacttccaagccttgttttcggaaaggacgagtttaccgtttcccgccgtttccgcggcaacggaatactcgcattccccggcctcttggatcgccgcattgacctcttcgacgttcaccgtataggaaagccccgtaatgttcactgccgtgccgctcatcgccgcgacgccaaaaatatccgagcctgcatttccgattttgtccgcataagctttaaaattgtccctggcgataaattcgtcgttgatgaacagataaatgtcgtatccgttcctgacaagtttcagcttgataggcgtaagcgccgtttcgccctgcttattgcgatactcgtcgtccgtccagctggcacggaaggcgtcctcgaagacgagcccgtcgatcttatttccccaaaggtcctgccccgcgtcttggggctgcgcgagggggaacgccttggcgagattccattcctcgccgtttatctgcgcgaactggatgcggatatccctgtcttcgatgatgagcaaaatgccctcggtgagaaggaatcccgccttatactgcgaccagccgccccaggcgaacgtcgcggagtattccaccacccatttgtcgctttcgacgttatcgaaggcataccccgcctgccagccgcccgaagtgttgccgtcgcggtttcccgccagcgtatagcttcctttttcgtacgagtagggaagcgtcggcgccgttccgggcttattataggcgctcgccgtaaaggaaggcatgaatcccgactgttcctcgatgacataggtttcgtcggatgccgtcaccgaaactactttggcggcaaaacccttgggcgcgacggaaacggaatccgtcttccccttgcgcaccgatacggtatagctgccgttcgcaggattgtatgttccctcgccgcctaccgtaagattgacgatagtcgcttccttgggtatgccgtatgccccgcagtctatacttccgctcacttcgataagctcgctcttttcctcaaaaatgatcttgatctgcgtattgccggacacgtcgaaataatagagataattattttcgataagctcggcggtatgatcctttccgttgacttcgaacagtctgacgatgccgttttcattcggctttgcctcaaacttgacgcggtcgtttttccacgcttcgcccgcgacttcataagagccgtaggcgcttccttccgcggtcgtggaaacggtgcataaatagttctttttcgcctgcgcgatatattcgtcgacgatcgatttttccttatagagaacggtgtctttgaacgcgcagccgccttcgtccttggaggaaacgctggcgtaaaatttcgtggcgcccgcaagatccgcgtcggtgagaagatagcgcgaggcgaacacccattcctctttttccgctttgcccaccgtgctgatcgtataataaatataatttccgttcttgatgatgcgcattcttgtcgcccggatatttccttgactgtcgggcgtcccgaacgcctcgggaagagtcgtaagcaccccgccttcataggaataccggcttacgctccgcgccgtattgtcgcagatattgacccgatattcgcccttgccctcgcccgttcctttccgccatccgaactgaatgtccctaaggtatccgttggcgccgtaaaaatgaagtcccggaccgacgagcgacttccatctgtcgtttttccatgccgtcacttcgaggacaaaatcgtcgtccaaagcaaattcgtcggggaaacgtacggagttgcagacgccgagataataggtcccttcggccgtgagggaaacgtctttggtttccagcgttcccgccgccacgtcgggatctgccgaccagccgttatgtcctttaaaatgctgcaagatcgcattgtcaaagcggatgtccaaagacggcgttccgccggcttctatggtcacttttctcgtttcgggataatatcccttacaggagaatacgacgtcgtacgttccgggaagcatataatcgatttccgctttgccgctttcatccacggtaaattgcagtttgctgacggcgctcgccgccgtgacagacgcataatcgatctcgccggtagccgtaaagttgacggagaggactcccttttgcgcaatgcggacgaattcggcgcggatgcgcgcgtcgtcctccgccgtaaaggcaaaggagccggttttgctctcttccctataatcggtgccgttcaccgtaagcgaagcaagttcgtaagaatattccgcttctacgccgaaattgacgagtccgccgcgataggtgacgagtttcgtttctttatccgaagaaacgacctctatgccgcccgcataggtgttttccgccgtcacggagccgttgacgacgccttcgatgacgatttccacctttaactcttccagttcttcctgtactgccgtcatgcccgtttcgtaataataatcgtaaaagtccgcactcgtgcccgagcggacggcaaagccgaacgccatagaaccgcgtcccgaagcgctccacgaagaatagttcatcttccccgcatataagccgtctataaacaaatacagatcgtcgttgctgcgtatcatcttcaaggaaacgctgccctcggactcgcttcccgcggcgccgatatgcgtcttgccgagagcggcgtcgaagcgggagatctgcgattcgtgcaaaagggtctgcgtggagaatcccccgccgctgttccatgccgtcgcgcagaagcgatcgatgtccctgtcttttaagatcatcgagtatctgtcgccgacggcgaatccgaattgatattgagcgtaagcgccgccgaggacgtttttcaccttcgtttccatcacccaatactgatcctgcacgccgtcgaacaaaaggttcgccgcccagccgcccgcggagttttccgtgctgccccgtacggaatacgtgccgtccgcataggaagcggagccgccgctgccctgcaaaagggacagggtcgccgcaggaacgagaggaagatccgccgtcgcctgatcgctgccggccgatacggaggcttcctgcgcgacgaacaaaggagaatccaccttcaccgttacgtccctgtccgaaggaactttcagcgaataggtgagcgtgccgctctcctcgtcgagctgtgcatccgccttatattttccttcacacgcggatacaaagatctctcccgccttgttcgcataatgagaatccgtttctccgaggcgccccgtcaccgtgcgcgccgcaatcgccgtcgcgttcaccgtcagcgcgccctcgatatccaattgaggcaaagcgtcgggggcatatgatttgccgttgatagaaatggtgtcgatgatataattttccgaagcgcttatctcgaaagaaacgtttttcccgtactcgatctcctcgccgtttcgataggtcttttcgttttcgtccgtaataacgacggagatattgtcccccgttaccgtgacggcgaatttttccatttcggcagccgcttcgatgacgatggcgccgtcggccgtgaattcgtaagcgccgtccgtcagcgtcacggtttcgccattgagtttgacgacgagattttccgtatgcgaatccgccgtcgcttccagcaccaattgcgttcccttttccacctttccgccgtccgcgtaagaattgtagtccttatccgtaagcgtgacggacgcgttcttctccgtgatggaaacggtgcattcgctgctctcctccgaagaatcggaggcggacgaatgagaagtttccccggaggaagacgaatggaaagaagtttccgaagaagcactttcagagctttcttttccgccgcagcccgctcccagcgaaagtccgagagccatcgccgccgtaagggcgaatatcgccgcccggcgttgtttcttgttcatattttttcctccctgaatgataatgatatcggtattgcggtcgctttgcttccttttctcccggcggccgtccgagaaaaaaggcaacctcccgatccgtcaatgtccgacaaagctttttctttctttttactcgaaatatcaatccattttattgaaacgataatcgagttttgcagctactttccccttttcctttacgacggcgcggatacgacagctcgtttcgggcgtgaatgcgcccgtgtatacggctgcggtgccgctactttcaggatcagagccgtccagcgtgtagcggatttccgcctctttgatcggcgtcgttatctcgacggcggaaacgatctcgcccccgtgatagttatagtccgccttggaaaacctcgccgcccatccccgcgcattggggagattgaaggtcacttcgtcttccgcggtaaccgtgcgggtttcgtgttgaagccccgcattggaatcgtaccaaagatccattacgtattccccctctcccaaaaactcgtccaagggaatggaattcgcaatcgtcttgccctgattgctgatgcctcccgcccaccagtttccgtccagctctttcgccatggcgatgtatttgccgaacgcactgccgccgagcacccgcgtttgatcgaacgaagtgggtatgctcttgatcatctctatcgcgggatgagataaaagttcttcgcaagtggcggtgatggcgttgaacggagcgtccgtcaacacaatttccgccaacccgatgccgtcctgaatctgcggcgtccaatccccgtgaccggccaggccgcgcacgtacgacatcgtggtgaacacatacgcctgtttggaatagctattggtcccgttttcggtataggcgcaattctccatgccgtaaatgccctcgcggttgagctcattgggatattgcaccgcaagccccgtgggtttgttgcagccgtggttgtcgatgataaggtgcttttccgcggcgtattccaacaggtcgcggtaaatctgcacgccgctgtaaaggctgtcttccgtctgataaaaatccactttggcaccgacgaaacccgcttcggcgatcttatccacaaattccttggcgctctgttgggcgccgcctttctcgtcgaaagaatagggattcaattcgtttcccgtgtaaccgccccaggcgatctgtcccacctgccaatcctttccgtactccgccactctgcccgccagcgcatagcaatcgttatagacgccttcaatttcctgccccaatcccttccatccgccgtcgaaaatgttgtattcgaaaccgagttttgccgccgtttcggtatatttcatcatcatttcgtaagtgggggcgctgccgtgccagcccgtgctgctcttttccgcataccaatgccacgtggaacgccccggcgtcacccaggagaaatccccttcgggcgcgggcgaaacggcgttgacaatgtcgttattatataatttgtccagcgtatccccgaagctcatgatgcgatagggcgtcgtcacagactcgcccgcgatggtgaacgcgcggaattgcccctctttcgcgtcggaagtcttcgccgtggtgttgatgccgaatttgtatccgccgaaaggacgcagattgatgcctacgtagtcttgaatatccgattcgagaatcgcgccgaagctgccgtcttcgaatgcgatcgccatgggcgtgaggacgtaattatagtattcgtccttgccgattctgtcccactttttgacgtcgttcgtcgcctggaatttctccgcgggatcgtattccgcgtaattacattcgtagcagactgattcatatcccatgaaagcgttattgcaggcgggattacggcagccgaaagtggcgtatactttgctgttttcctccaagagaaattccgtattttcctcctgtacgtactgtcccgcctctttgccgaacagataccggaaagccacgccgtcgttataaacccttatttccacgtcgaaaggaatattgctcctctccacgtgcacagtggcgatgacgacgtcctcgatatgcgcgtattgcctgccgtaaacataaaattccctgccccgcacgacctttccgtctatccccttgaccgtacaaagttttgtatactccttgtcgttgatcttcatacccaactgcgcttcgcggaacttgatctcgtcgtaacgcatcacttcgtaagtcagtttcctgtcggccgtatgcaaaataaaagtagtgtttccgtccagggaagcgatctcatagccgtcctgggttttagtaatatattccattgcgtcctcctcaggactcgattgcgattgggaactgccggaagaagtattcgaatccgacgaattccgggaatccgaagcggatgaatcggaaggggaaacagaggattttccttcgtttcccccgcaaccggcaaaagcaaaaatcagcagagcggacatcaacaccgaaatgagtttcttcattctcgttcctcctttaatcgcgtttttttccgcgcagtatcatggcgaggcccatcgtcgccgccgcaagccccgaaaatcccgcggcgctcttgcagccgccgcagccgcttccgccgtccaaagagcttttttccgtactgctgtgagaatcgctgcccgaatccgaagaatcgtcgggttcgttgatgcccgtacccacgatataagtgagttccacttcataatcggagccgtcgtaatccttgacgatccccttcaagacgaaagtgccgttcttatcggtattccactctccccatttgacgctgagcgtcgctttatagccgctcgtataagtgacgcggacggtgtcgtaaataaatttcgtcaaatcgtcgccgacggaaaccgtcacgttcttgggctttgtatagctctcgatgacgctgggacgcagatattttctcgcgtcttccagtttttccaccaattcctcaaattctgttgcgttcatcgcagccatgccttccacggaagtgtcgagcgcggagatttttttgacgaaggtatcgatggaatttttactgtatgccttgggatcgtacgatttgagttccacgactttggagatagaaaaattcttataattttccgccgcgaattttacgtccgaagaaccgaaagaaaagcatacgtcgtttaaagaggtggattttaaatccgcggacttaaacagcatttttcccgaagcgtcggcgatcatgagattatacaccgccttatctcccgtctgccgcgccagcgtcaccgtatacctgcctgccttaaaagtaatttccgtatcctcttccgcggcctcgtccgcgccgaagggaagggaggagaattttcccgttttcaagtctatcgcaaaggtgtccttgacaagccccgtggcgtccgtggcatatacgtacagcgcgcccttctccccgatctcttccaaatggaaatccacgcccgcaataaagtcctgcgaagattctccgctcgtcaaaaagctttcgccggccgcgacgctcactttctcctccgtcacctgcgcgttgccgtacacatcctcgaacgtttgcgtcccccgttccctgggcgtgcctttgacgacgagattttcgatattacaaccggaatagtaaccgccccaaacgacctgcacgccgcccttatatccgtccagatcgatgacgtaaacgacgggctcgaaagtgctttgggaaagtgtgacttcgatatacgatctgtccccgtcgatcatcctccgggcgacgatatgcaccgcttcgtcgcgggtgagaagtatgtacgactcttgcctgcccagctgtttgaccatttcgtccaattctctgtattgccgcgtgagttccgcgatctccgcctccaaaattttcatttcggcctgtaccttttctttttccgcgcccgtaagcgcgcttaaagattggtctttggctctcaaatcgatggttttgagcgagttttggagattgatttcctccatctgcttttggtagggcatgaggatataatcgctgtaatcgattctcaaaagggatgtgggcttgacgtcagcgctgtaccattccccgaaatagcggatactgccgatattcagatgctgcgcgttaaagctaagcgccgaataggacagctgattttccacaaaatcgggatacagcgcgtcgaattccaccgtaaattcccccgtcagataattggtggcgagaaggttgacgttatcgctgcccgtctgcgggatttgcagcttgtatccgcccttatccgttaccacctcgcccactaatcccagatacttcctcaacacgttaagttttccgtacttctgtgccagcacctctatttttcctgcgatctcttccgccgagtccgcctcggaaaggagatcctgcacctccttatacgcgttcgcgtactccgccaccgccgcctcgtcgcaatattcgtcgaaaccgtccgcgacgaattcttcgagcgccgtcttgatttcggcagaggaaagaagttggtccgctacggaaagatagtcgtctgcgagcgcgacgtatatccttttatattccgcgcctgccgcgccgcccgcatacgccttcgcggcggccagggacttcttcaccgccgcaccgaacgccgtttgggtggaggcgacgtattcctgcgacgaaaggatcttttccgtttcggcaatcagctccgtaaggtcgctttcaccgatctttcccgtgacggtcaattttaaggacgcttttcgccccgagctgtccgtcgccgtgcccgtatagagaaccgcggtttcggaataggcgtactttttatcccaagagagcgccagcgtttccttggagccgtcgctgtatgcaaattcgtaaagatcgggcagggcattgcgggtgagatagtccgccgtaacgctcttttccgcgttcacggggtcgcggaccaccacgcggacgggatacatggcgcgggtatagggatgctgcacataggaaacgcccgaacgggaaatatctattcccgaaaaatcgggagtgaaggaagtgccgtacttattgaagtttaccgcgtagttatcccccacggaggacgcgcccgagggcaggtccaccacgacctcctccacattatgagtaaacgccgcgatttgaccggcgtccgccacatagtcataaaagagaatattgtcgatactccctttaaagaaatccctgtcgaaaaacgcgtcctgcaccgtttgaccggggtccttcgaggcggcgtcgtaagaagtgccgccgatgaagttatagacgtacgcttgcagatccacgctgttcgaagaggaaacgataaagagtccgtccatatagacgctcatcgtgccgcccttgaaagtgcacgtgtacgtatgccaggcggtgtccgaccaaatgggcattttcgtatattgacagcccgtcgactgctccgcgtcgcggttggcgtataaatcgtggcagaggctcgccgtagcgcccgacggaacaaacacgccgttaaacgcctgcaaacggctttcataataggtggagccgccgtccgctttcagcgtatgcggaccctcgtatcgggacatatagatcatgcagtcgtttctcgaaggcacctcgcgttgaaaatcgaaggagagcgtaaattccgaaacgtttttaaacatattttcgggcagtttgacatatccctgctttccgctgagatgcacttttccgtccgcgatatagcttcccaaatcgagtccgcccacctgcacctcgctccccgccgtcgtgcgcgtaccctgattggcaaacgaaaccacgttgccgcccgcggaatccctgtccgcgtcctcgtcgaaggtgtagtgcaggagcggcgcggcgcccgcggggagagaagaatcccccttcattccctggatgacagcttgaatgtcggcgctgtggctgcccacgctcatcaaacggagcatatctcccttgacatagacgggctgagaagaaaaggtcacttcgtccagacagagggtgtccaactcctgctgcgacgatccgatatataccgtacccttgcgcagctccgccatcatgcccttaaaaaatttcacgttagcgagtctggaagcgctgtggatataacaaagctccgtatcctgataaaatctcaattcgctgtcggtgatgacggcggttatgtaatgccagtcggaggaaacgagcttctcggcggtgtccgtgccgtacacataggcgccgtccgattgtgtgccgtccgccgccaccccgtcgtccccttccagtttaaaaccgccggccgtcaccgaataagtgccgttttccgtgtccacgctgaacaggcggttgtctttgctgccgatcttcgcccacgcggaaaaagtatatccctcctccgcgtaaggcagagcgttgacttctaccctgcctgcgccctccatagagatcatcctgcctttcgtccctacgccgcccgcgacgggagccagtccgtcatacaccgcgttcgagggcaaatccccgtcgaaatcgagtcgaaggctctgtgcgggatagttcgccgcgctcgccttcaaaatacccgcgccgcccgtaaacgcacaggcaagggcaagtgccgcgattagtttcgtctttattttcatcgttatttcctcccggtttttttatagcgtccgccgcctaaaagctcatttttggaaaggaggccaggcataatcgagccccaaggcgtccttcttcgaatggaatctttcgtccataaaggtcttgcatttttgatatttcatattcaccatcgtttcccaggtagagtcgaacatttttttcgcttccgcttcgctgcccgcgtttaccatcttggtccagttaaactgcccccatatctgattgttgagcaccgcgagatctcccgagtcgggattgagattgttgaacagcctgtcgtcgtacgcccactgagaaaaataatggagaaagttatatacggcttgcgcggcgggatcgtcgggctccgcctgcacggagtagagaaaatccgtcctttcgagcagcaccgagagccagcccagccccacttcccgcatcatttcttcttcggtgtggtcgtaataatatttaagataataatactgaccgttttcatccacgtcgtacgtcttgcccttgatgccgaacttgctgagcacctgtccctcgtcgctgtaaagaaaggaaagcagttttatcgccttttcgggattcctgcaatttttggaaacgaacgtttccagatatccgttcatcgtccagggcgtcagcatcggctcgtcgttttcgtcgttgcggataggtcccacttccacccattcggtgccgccccgaatagactcctgcaaacgcacataacagttgggccaattgatattggcgatgaatgcgccgctcgtcgccagcatcgtatgctcgtcgagccgccctgaaagcacgttctccgtcagatagccctttgtcttgaagcggttgagccgcgcgatgatctcccgcgtttcgtccgtggcgttccattcgcggaaatcgcccgctttcggggactcgacgccgcggtcgcccgcgtttaaattgctctcgtcatattccctgtccaccgccatatattcccgccagctctcccccttcgtgctgtcgaaatacgccaccacgtcgtttgattttaaatcgctcgccatatatttcgcgcacgcgtcttccaaagcgccgagggaagtgatctccgcggggtcgatattcagcgcgtcgagaatatccttccttgcgatcatgatattggaggacaaaagttgttccttgggcgtatttgtattccagaaatgactgacgacgccgtacatctttccgtcgaagccccgaagcgtacgcatatcctcgggaatgaaattttccaccccgtactgctcgcacaactcgtctaaggaatatacctgaccgctttccaccatagtctgaataagctctgtttttcccacctccaccgtcacgatgtcgggcagatttctgtccataatcatgcctaagagatcgtcgccgctggaaccgtcgcggaaatcgatgaccatgccctcgaatttttcgtccagcacctgatccaccagcgtattttcgtagtccttaaacgccgagatattgacataccaatcgaaatgcgtctttccgtccttttccgtactcggaccgccgcaggctgcggacagcatggataccgtcaatacggcgctcgccgcgcaaaaaagcagtttgtttcgtttcataaatgtactgatttcctccttgaaattctctttttattctcctcagccttttacggagccgatgagcacgcccttgatgaaatatttttgcatgaagggatacacggcgacgatgggcagaattgacacgatgatggacgcgaattgaatggaatcggacgtgacgttgttgctgacgatgccgagattgacgcccgaagacgccatatttttcgccgcgtccttttccgtcacgagtttcatgacgatgtgctgcaacgtatatagctctttgcggctgctcatgaagatcatggagtcgaaatagctgttccaatgccctacgctcgtaaaaatgacgagcgccgccaccacgggcagggaaatgggaaacacgatctgccacagtatccgatactcccccgcgccctctatcctcgccgattccaccaacgcttcggggatccccgtgaaaaaggttctgacgatgagcacgttccaatagctgaatagtcccggcaggatatacacccaaaaggtattgttgaggtgcagcttgacgatcacctgataatagggtaccgttccgcccgctacgaacatggggatcaggcagagtatcgcgtagaagttctttcccgtgagtttgcagaaatagaatccgtaagcgaacgtaagcaccacgacgatatgccccaccgtcccgatcaccgtcctgagcgccgtgacgccgaacgcacggtaaatggattcctcgcgcagcaccgccttataattttccagagtaaacgcgcgcggaaagaaatagactccgcccttcataaagtccagccccttgttgaaggagccaaccacgacgtaccataacggatagagcgtcaaaaggagaatgacgatcataaagatcacattggcggcgtcgaaaatttttgacgcccgactctgttttccgacaatcatatttttcgcctcctcaataaattccgctgcccgtcagctttctcgaaacgcgatccgaaagcagcagcagcgccagcgcgatgagcgaacgcagcagccccgccgccgtcgccatcgactgccctgcgaaggtgcgggtattgccgagcgcgatgtcgtaaatatacgtatcgagcacttccgcattcgtgctgtccacaatattggatttcaagaccagcatctgatcgaaattgctgcccaaaagtccgctgatcgtaaacacgagaaagagcacgatggtgggcgtaatgcagggaaggttgatgtgaacgatccgctgaaaacgatttgccccgtcgagcgccgccgcttcggtaaggctcgaatcgacattggaaagagcggcgacatagacgatggagccccagccgatatttttcaaaatccccgaaacgatagcgattccccacgtataacggggattgtccaaaatattagagccgggaaaaagtccgcgcacgggatcgaggatcttgatgacgatgccgcagtaaacgatccagctcaaaaaatagggaagataagaaatacactgcacaaattttttataggactgacttttgagttcgttcaagagcagtgcgaagataatattcaagggaaaactgacgacgaggcagatcaggttgattcctaccgtattccacagaatccgccaaattttaggatcgcggaaaagggcgcggaaatgtttgaacagatccagctgccccgcttcgtttctagcccaaggcgcgtcgaaaaaggtgaacgccttataggacatatccttgaatccaccgacgatgccgtaaatgggtatgtatgaaaaaataatcaacaaaataatgcccggcagtaccatcgaatgcccggcacgttccttccaaagtctttgaaagatatttttctttccgggcgtttccgccgcccccttccgactcgcttcccctacgtttttctcggcttctgctgtcgtttcctttttcatgcggatttctcctccctcgcggcgccgatcgggcggcaccctgttttttgtcgtctgtctttttctgacggaaaagccttcctgctccgtcgccggaaattctttttgacgctttttaaaaacggctcttttcggcttgcgttttcgtgcgttttattataaaataaaagcgataaattcttcggcgtatcggcagagaacatatagtttccgcacgcggaagcaagttatttgtaaaatattccctcttcttccgttataaaacatcttatcttttacataatcttttcaccctttctttgcatttctattataatttctaatcggcgcccatttcaatattatttgtttacaaaaacatagaatttgtctgtttggagttttccatgaaacatatcgaccgacacgaaaaaaacatctctatctggaacgattttgtcaattgcgtggacgttcagatcgtcggggcgggcctgcaaaacgaaacccggcaccgctacaacgccgacggtttcaacccgacgaacaccattcaatatgtggcaaaaggcaggggctttatcgaaattgcggggaaaaagcaccccgtttatccgggctgtatttttcttgtgcccgccatgacgccgtgcctttactgctcggacgacaccgatccctatcgctattattggcttacgtttcaaggagaatatgccaatttactgttaaagcggacagggctttcccccgaatctcccgttctcgaaacaaagagcaggcacctcatccgctattttgccagggtctttgaaacgatgcaaaaacgcgaagcgtatgcgccccttcaaatgctctccgatttttataatatcttcgccattctcttccgcgaacaatcggaaaatagcacgccgcctaaaaaaagtgccctgatcgccaaagcgctggactatatgcagaaaaattatcagtacgacgtcacctgtcaggatatctgctcccatctttttgtaaatcgtacctatttcatcaagctgtttaaacaggaaacgggttacacgcccgggcagtatctatgcagtatccgcatttccgccgcggtagttctgctcctggacagcgaactcaacctcagccagatcgccgcagccgtcggatttacgcctttaaattttacccaggcattcaagacccatatgggaatgacgccttcggaataccgaaagaaaaactcccataaaggaacgagcgtcgccacaaacgattgaattgtttttatctacataaaacgctgtaacgccattcggtgttacggcgttctttttatcctcccgccggccattcttttccaatcgtcacgacgttcggcaaagtatttctccgtgcggggtaaacggttgtttttgatcgtcaagtatgctctgcgaacaaaaacattccgcaaaatagaaacatgggcacgactccccgcggcgcttatttcaaaaccgtcgcttccctattttttaactttttcgaagaggcaatcttcaagcgacgcggattttgcgattttccacaaaggactcttggcggcaactctgtcgtcgcttactctttttaccctttccgccgtcccgccccctgcgcttttccctgccttgttttttccttattcctttcttctcctcttcctcgttacttccctgcccctccttatcccttcttttctccccttcgctctcttgtgtaaagcctctttttttcctctcttttcctaatttttgttcctgaaaaaaacgccttgcttccgacacgggaggaggctatttttttcaggccacaactttgaaaaaacgatttttcccctttttcggatagattgtaaatttattttaaaataataaa

SEQ ID NO: 577 - DNA, 3231 bp, Unknown
  16S sequences of unknown bacteria
gctcctcctgcttgctcgcaagcatttttttcgggaaacaatggtagcttccccttgcaggcacagttccagatattttttcatctcctgaatgctcatcccgcattttttcaggcaagtaagatctttgatccattttacatctttctcatcgaaaacccggcggttgttgtggtcgcgcttgacgtttgggaccaacccctcgttgcagtagaatttcaaagtctggtaggtcatatccagttcccggcagacctgcatcattgtatacacagacttacacctccggttgtgtctacaaaaagtcattaaaaattttaaaaggctattgaccgatagtaactaccgtataatataatcgatcttaacaagcggttaaaacaaacgcattgtagcattgaaataacaaaattgcaagagaaaaagagggatattcaaatgaaagtgttgcttgtaaacggcagctcccgtaagaagggatgtaccaatgccgcgttgtgtgaagtggaacgtgccttgcaggaagcgggaatcggaaccgagcagttctttatcggaaatgaagctctgccggattgcgttgcctgccgcaagtgccgggaaaccgggcgttgtgtgttccatgatagtgtgaatgagtttgtagaaaaggcaaaatcagcagatggttttgtatttggttctccggtttatttcgcccatcccagcggcaggctgttggcttttatggacagggctttttattccggcggagcggcatttcagtttaaacccgcggcggcagtactttctgcccggcgggcgggaaccacagcttctttcgacgttatcaataagtattttaccatctgctctatgccggtagtttccgccacctattggaaccacgtatacggcgcacagccggaggaggtcgcaaaggataaggaagggctgatgaccatgtataatatcgggaagaacatggcgtggctgttaaagtgcatcgccctgggaagagagaatggacttccgcacccggacaacgaaaaggttttgacgaactttataagataagaaaaggatggcttttatgaacaaaaacgcggagagcagagcgcgaagattatttgcaggggtaaattcttctttgagccggaccgatcctgagtttgtggagatcatctcaaatttttctcaggacgaaaccgcgaatgcaaatatcctcacggaaaaggaacggatgctttgtatcctggcgccctgcttggctgccagggcatgggcgaatttcagaacatgctccacgcagcactgaatataggggttgaccccgttgcgatcaaggagaccatctatcaggcaacggcctatcttgggatcggccgcacctgtgattttctcattgctgcgaacgggattatggagcagcatggcgtcaggctgccacttgcgccgcaagcatccacaaatgaggaaacccggtttgagcgagggcttgccaaacaggtggagctgtttggccccgatatggcgaagcgccaaacggatggcccggcgcttcgcagaaacattaaccgctggctggcggacaactgctttggagactattatacccgcaacggcctgaacggccaggaacgcgagatgatcactttttgtttccttcttgcacagggaggctgtgaaaaccagcttcgcgggcatacggcaggaaatttcggcgtgggcaacggaaaagaaaaactttacagtgtcgtggagcagtgcatgccatatatcgggtatccccgcagcctgaatgctatgagcatcattgacgaaatcgccgcaaaagaaaaataaggaggagctgctattatggaatatgcaacactgcaaaacggattgaaaatgcctatggagggctttggggtttttcaagttcgtgataaagaggaatgtaagcgttctgtgctggatgcgatccggacaggataccgcctgattgatactgccgcttcatacaccaacgaggacgccgtgggagaagctgtgcgggaagccattgctgaaggcatctgtaccagagaggagctgtttatcacctctaaaatgtgggtgcaggatatgcagaattacgaaatggcaaaagctgccattggcgcctctctggaaaaaacaggactggaatatctggatttatacttgctgcatcaggcgatgaaggactactttagcgcatggcgggctatggaggacgcgtacagggatggaaagctgaaagctatcggcgtgtccaacttctatcctcacgtccttacgaatttctgcgaaactgtcgagatccagcccatggtgaatcaagtggagcttcacccttatttcacgcaagagaacgcattggctactatgaaaaagtacaatatcgttccggaagcatgggcgcctcttggcggcggccgatatggcgcgttccatgaggggctccttctggagattgcttcggcacacggaaagacagtggggcaagtgatgcttcgatggaacatccagcgcggagtagtggtgatccccaaatccacccatccggaacgaatcgaggagaatttcaatatctgggattttaccctcaccgatgatgaaatgcagaggatcagttctttggatcaaggttatacaggtactgccgtgaaacactttgacccggaattcgttcgtatgtgtacaaacagaaagattcacgattgaaggaagagtataacatgaacagtttcactttttcttatccgacgaaggtgtattttggtgaggggagcgcggcgcaggctttccgcacagagcttcgaaagaaaggcaagacagtgctgcttgcctacggcggcggctccgtcaaaaagaatggcgtctatgatgaagtaaaagcgctgcttaaacaagcagataaaacgattattgatttttccggtatcatgccgaaccccacctatgcaaaggtgcaggaaggtgcggccattgcccgtgagcagcatgtagacttcattctggctgtgggcggcggcagcgtgatcgactgctgcaaggtgatttccgcacaagctctgctggacgaagacatctgggagatggagtacggcaagggacagttccctaacgcaggaatcccggtaggtgcggttgtcaccgcatccggcacaggggcagaaatgaacgcgggcggcatcatcacccatgaagaaaagaagtggaagggcggcattttcggcatcgctc

SEQ ID NO: 578 - DNA, 3062 bp, Unknown
  16S sequences of unknown bacteria
agcgcgattggtcaataagcgagagtcaaaatctctgattttgctcctcgagcttatacagcgtagtcgaacccatgcagcgctgtggaatttctgtgccgaaggcgcagaaattatgcgcgcagcagggtgcaacccccttcaaatgcgagcccagcgtagcggtaagcgagagtcaaaattttaattttgcccctcaagcttatacagcggagtcgcgtttgagagcttgtcaaaaattctttttttgacaagcccaataaagccgcctttgaccaaggcggctttgtgtgctatgataggggacaagattaaaattggagggctgcagcatggcggaatttctgcatcataccattgcaccggtctacgacgcggaaagccggatcctgatcttaggatcatttccgtcggtcaaatcgcgggaggcggcgtttttctatggtcacccgcaaaaccgcttttggcaggtcctggcagcgctgacaggcgcgcctgtcccgcaaacgatcccggaaaagcaggcgcagctatcgggccacgggatcgcgctgtgggataccatcgccagctgcgagatcaccggctccagtgacagcagcatccgcaatgtcacgcccaatgacctgacaccgatcctgcaaactgcaaagattcacaaaatctattgcaacggcacggcgtcctggcagctgtatcagaaatacctcctaccgcgaacaaagctgcccgcggaaaagctgccctcgaccagcccggccaacgccgcctggacgctgccccggctggtcgacgcctggcatgtcattctggattagctggctgcgtgggtatcgaggatattgcgcagcgccgccatcgagctggaatgggaccgggcgatgaccgtcggcagaccctttgtctcccgcagcgcgctgcgcagcattttgtgggacatcgtactggtgaagaagatcatcaggtccggctggcccatcttgttctttaaattgcccaccggcttgataaagaccttgacccggcacttatagtcccggcacaggtccttgtactgccgctccatacattcatttccgcctaaaatcacaacgctcatgcaaaatctcctttctttagttagctttcgctaaccatcggtgcaagtatttgcgcgctctctcgcgcgccggaggccgctgccgcttccttgggcaacgggaatcatcaaatccagttagcgtatggtaactggatttcctattctacccaaattgcagaaaaaagtcaatcctttttttggaaaaaagcctgccgacagcaaattttttccattctattgaaaaggccaggtccgcagcatcttctcactgcggacctggcttctctatcatttagtacccgttaatttgcgcagacaggtgctttgagagcaccgccagcgatgttgccatattttcgtactgcacgaggatatccgccggggcgtcaatatgcgtgggagcaaagctccagatggccttaatcccattgttcaccaaaagatcgcagacctcctgtgcatgggctgcggggactgtgatgatgccgatcagaaccttgttatcccggcaaaactgctccagctgagaaatatgcaggatcggcttgccgctctccagtgtccccacgatgctctcatccacatcgaaggccgccgcaacgttcaggccgtattctgcaaagccgacatagtccagcagcgccttgcccagcttgccgctgccgacgatcaccgccgtattggtataatcatagccaaaaaactgctcgatatcgtcaatcagcgctttgcggttgtagccgaccttgggccgcccgccgtcggagaccagcgccagatcctttcgcacctgcacctcgcccatatttagcgcattggctaacatcgtcgcagaaatattggccggggagtcctccggcatcgccttgagatacatgagataacgcggcagccggtacatgaccgattttgaaatttctttttgcgccaattctttcacacccctcctgcggtcgttttgtgtgttctattttattttagcacaaggcagcggcatttgcaatctaccgcgcccggaaaaataaaaaaacttttttggcgccgaaaaaacttttagctatgcgctgaactgccgggagatctcgcggcgcagacgcagcatgatccgcttttccagtcgggaaatatacgactgggagatgcccagcaaatcggccacctccttctgtgtcttctcctggcagccacctaggccatatcgcaggaccagaatatcccgctcccgctgcggcagccgcagcagtgcttcccgcagcagttgccgctccacgctctcctccatggggcgcatgacggtatcgccgtcggtgccgaggatatcgctcagcagcagctcattcccatcccagtcggtattgatcggctcatccagggagatctccgacttctgggccgtcagcttgcggatatacatcaggatctcgttttcaatgcagcgggaggcgtaggttgccaacttgatctttttatccgctcggaacgtcccgacggctttgatgagcccgatggtcccgatggagacgagatcctccagattgacgcctgtgttttcaaagcgccgagcgatatagacgaccaggcgcagattgtgctcgatcaggcactggcgcgccgtgtgatcgccctgggccaagcgcaaaagcagctgctgctcctgcggccccggcagcggcggcggcaggacatcgctgccgccgacatacatgacctttgccggctgcagtagccccaggcggacaaaaataatatgtagcttctgattcatacaacgcctcctaaaagtccggaatacccgccgccatctgagaccggcgtgggagagagcgcgactgtcatccgggggatcacccttccagccagcgtgacctgctttgcctggaaggccagcagcacccccttgacgcccacggcgcggtagggcagcagccgccagtgcagctgcggcgccagttgggttagggcagtaaacgccgccaccggg

SEQ ID NO: 579 - DNA, 1565 bp, Unknown
  16S sequences of unknown bacteria
tgcacaatcctgcgctttcatctcggtaattgaattgccgaggattcccgcttattatcctaatatcgaactttcatctatggaagtctgttttttaacatgctataatatataaaaatttattaggatgaggtaaccaaaaatgtatcatgacttgaccgaggggaaaatctcccgctcactgctgctgtttgcgctacctatgatggccggcaatcttctgcagcagttctataatattgcggatacactgatcgtcgggcgtgtgcttggaagcaatgcgctggcggcggtgggatctgcttatactctgatgacttttctgacttctatctttctgggactcagtatgggatcgggggctcttttttctatttataagggaaaaaacgatcaggattctctgcgcaatgcgatcgtacatgcttttgcactgatcatggctgtcacagtgcttttgaatgtcctggtgtacataggaattgatccgatcctgcatttcctgcgtgtacctgacgaggtatgggatggcatgaaagcttatctgcttgtgatatttgcgggtatcattgccacttcactgtacaattacttttcctgtctgctccgtgcacttgggaattccacgattccgctggtatttcttgcggtctctgctgtcctgaatatcggactggatcttttgttcgtggctgtactcccatggggtatccgtggtgccgcactggcaacggtgatcgcacagtatgtttcaggcatcggcattacgctctatgtactgctgaaatgccgtgatctgcttccttccagagaggatctacaattcaaccgccagatccttggtgagattggaaatctgtcttctatgacctgcgtccagcagtctgtcatgaactttggtatcctgatggtgcagggactggtaaacagcttcggaccggtcgttatggccgcttttgccgccgctgtcaaaattgatacgtttgcatatcttccggtgcaggatttcggtaatgcatattctacctttatcgcacagaattacggtgcaggcaaaaaagatcgaatccgcaaaggaacaagggaatcattcctgatcagttttcttttctgtattgtgatctcggcggtggtatgtatttttgccgcaccgctgatgcggatctttgtcagtgcgaaggaaactgcagttattgcttccggtgtgcgttatctccggatcgagggggctttttactgcggaatcggctgtctgtttttgctgtatggttactatcgtgcagtcaagaaaccgggcatgtccgtcatcctgactgtgatatctctcggaacacgtgtagctctggcgtatatcctgtctgcatatatcggagaaaccggcatctggatggcgatcccgatcggatgggtgcttgccgatgttaccggtctcgtttatatgaaatttcatgaaaaatagtggtctctgacagctccatacagatacaaaaacaaaagagtgcagttcccggtgacatgctcccaccacttaaatctttgattttgaagtgggggcttcttgctca

SEQ ID NO: 580 - DNA, 2047 bp, Unknown
  16S sequences of unknown bacteria
catgtcgttttgccagttgaagccaatgaatgcgcagccgagccacaggagcgtggacacgaagagcagccccatgcatgccccgtaggcaaggctttccgcatagaccacgacgactcccacgcgaaacagctcggtcgagcccgacgccgagaacaaggggttcgcggcgcagatcagcagcacgagggggagctgccacgcaaaggacgagaacgtctcgcgcacgccacgttgcagcatgctgcacgcaatccccgcgacaaaagaaatcgcgatgagggcagggtggaacgccgacatcgtcagcacgcagacagccaggtagaaggcagcctgcactccagggtgcaggctgctcggcatttcttgtccgtcaggggaaaacgccatctcgccttggttaccctgcggtgtagtgccagttcacggtgtcgccatcggaaagcgtcacggcatcgcacgccttgttcggctcgaccccgttcacgctgtagagccacccgctcgttgcgccatgctccttttccgccaagccgttgatggcggcgacgtacgtgccaaaggacgtcggacgagcgttcacgctcatccccgtcgcgacaagggcatcatagggagtcgaccccttgggaagcgtgatcttcgcagacgcagagcccgcaccgcccgcactgccgtctaccgtgatggagacggaaatcttgttgcccttggcctttgcccccgcagagctgccgttgctggcggcaggggccctgcgacttcgccgtgtccgcagcagcacccgccgaagcggtggagctgtcatccgattgctgggcctcctgcgtcccctcttcggacgctgctgtctcatctgccgcctgctggtcggattcggcgtccgacgacgatgcctcgacggcagcgggcttgccggaaatcatcgcgatagggtcgtttccctggacgtactgggacatcgaccacgcgcaaaacgcgataaccgcaagtgcgagaatcacgatgactgccgtcagcacaccacgatgccgcttcggctttgcattgggagcatcgggggtattgccacccgctgcggtatttgccgcccgatcgtcttgcttggtgaactcttcggacatgctagtgttccttcctgctcttcaggtagtacaagacgacgaggacgaggaccgcggccgctgccgccatgccgacgaggggccagatgggaagcgcggcttgcttgttatcgtctgctgccttcttggaatcggctgcgggctgcgcggaggcaacggcgcctgtcgcctgcgagtcctgacccgcagattcctgtgccgcctgcgagatgaacatctccgccgcagaacccgacccgctgatggacatgggagatgcgccgccagtcgacgcgttgccgtctttctccgcgacaccgttctgggaatcggcggaccacttggcatacagcgtgagcgggccttcgacgggaccggaagcatcccagggctgcgagcacgcctcgtcgagataccatccgccaaaggtgtagcccgcgcgcgtcggctgcgggacgctcgagagcacatggccgcgcgccaccttgaccggcgcgagagattcgccgcctctcgtatcgaacgacagcgtcgcgcccggctgcgcgttcagcttcatcagcttgcgcgcgtcgtttgcatagtagaggtttccgctcgcatcggagatgagagacgccgtgcagtaattctgattgtcggcatccggcgtgaagatctgatacgcctggtcgtcaccgagcttgtacgcgtagaccccgcccgtctcgttattgcaggtgaaataggcgtagacgccgtctgcctgcgccgagaccagcggtgagctctgcgccgcgcccttgccgccccggacggttttgagaactgtcatcgtggacaggtcgacaacggagagggtaccgtaaccatcggcatccatgccgcacacgtatgccttgccatcgtagacggcgggcgtggacgtcgaggccgatgaaggggggagtatcgagcatggg

SEQ ID NO: 581 - DNA, 13111 bp, Unknown
  16S sequences of unknown bacteria
cgatctgagagaagttggtgccggcgccgctgcgaacgcgcagggaggaagcggtcaccatgtaggtcttgccgtccttgtcgtcgtcatcatcgtcggtcgcgccctgcgcagtgacggtgatcttcatggaagacgaagtatactccttaccgtcgttagtgatgtacttggcggtgatgtaggcaacaccctcctgagtaccaatgacggtggtatcgtcgtcgatgtcgatgacctgcttgtcagtaccctgaccgatcacaaggtccgcatcaaccttgcggttggtagccacgcccatgacgacgggagagtaagactcaccaatcttaatggtcttggcggtatcagagaagtagatacccttcgggtcagcttcgacaacattgtcgcggtagacgatctcatattccttggtctcgtagatcgcagaagcagtctcgagctcaaaggtaacagtgggttcgtcggtcaggtcatagaggttgtactccagagcggagtcatccagcttcttgccccaacggccgtcgaccttctccgccttgacgggcgccagatacttgtttccgttgtcaacatccagcgcttcgtaagcccaggtaacgacatcaaaggcatcatgattgttgtcggcaaaggtaatcttgacggtctcgctgtactctctattttcccagccaacaggatcataaatggtcgcgttgccaacaaaatcgaagtacatcttgtcgccaacaatataagcgtcaaggacacgatcctggctctcaatgttggtgatgtaggcagtcttggaattcttataggcagcagtattctccagacggacagagatctttgcagtttcgatgatggtgtcatcaccgatcttcgccttaacttccacgtaatacgtgtcggtgtaaccagccttggtcagctccagcggcatgtacacggaatcgtgctcgctccagccgatcaggtcgatctcgccgtactcagagtaacggttgacttccagcttcttgccgtcgacggtgaccgtaatatcggcgtcgttagcggtagcgatgcgggaatcccaacccttgatctcgaggatagccatcttcttgttctcggtgaactgaccggtgatgtcctcgtcctcgtcctcgtagttgtactcggcagagacgctgttgccagaatcttcatcgcccagaggagagctgctaagcttgccctcgtcccaagaccacacgaccaggttgtatccatcgccctggatggtggtggtggcggcgaaggcggcagggatcatgcacagcaccatggcaagcgccagcacgatcgcaagagtctttttcatagtggtttacccctttcggtgcaatttgggactcggctattgaatccatctatactatagcacaggcttccacaattgtaaataccctgtcgcaaacttgaaacaattttgtgataatttcttcgtctgcccggcttccccagggaatctcttctccgtagtgttagaatggaattcttcatttgaacgaatacgtattcgcatttatgcgctcttcgactctcgtggcaacaggcaaagtgcttttttctgttgccacacgcccaaaatccccccaaatacccgcaaacccccatgctttattctcttgcgatcgtgctggcgcttgctatggtgctgtgcatgatccccgctgccttcgccgacacgctgacgaagacagttgccgacaagccctacaacatcgaggtgtttagctggaacagcgataagctcggtgggatgctcggccacacttcgggcaaggcgaacagtgtcaccgccaagtacaactacgaagaagaagttgccgatgtcaccggtatgttcaccgaggatggcaagatggccgtcgtgaagttctacggcctggaccccgacttcgagaaggctgatcagagcaccatcgaagtgaccgtcgatggcaagccgctcgatgtcaacatgctggctggctacagcaaggatatcggctatcaggttggcactcagggctacgtcatgttccccatcgagctgacgaagggcggcttcaccgatacctttatcattcagatcactggcgatgtgaagaaggacgatgataccatcaagctgacggagaccgccaagatttccgttaccttccagaacaccgctgcgtacaagaactccaagaccgcttacatccagaagatcgagagcaccagcaaggatctgaatgcctacatcgtgggcgacaagatctacctggatttcgtcgcggaaaacctggctaactgggataagcccgatggcagcgattactcggagtacaccaacgagcgcgttaagatctacttccaggacaacaaccatcgtgccttcagcgacgtcacctgggcttactgcgtcaagggcgttgattctgtcaagaatcacaagaataccgagtacttcaagccccatccgctgcagactgccacggatgataatggcaccacggtctatggcgcgaagctggacgatgattccgcgatgacttacaccatgtacgacatcacggatgaagcgaccgttgtcttcaagctcgagactggttccgacatctacgagaccaaggagttcgatatcgtttaccgtgatggcgttgaggagaaggatcctcagggcatctacttcaaggagaccgagaagaccatcgctatcggcgagtcctacactcccgttctgatgggcgttgcgactggctctcccgttaagggcgctaccatcctgcctggccagaacaccgacaagcaggtcatcgacattgacgacgataccatcatcggtacccaggaaggcgttgcctacatcaccgctgagtactctcccgcgctgctggataactaccagggtgctgctggcacggtctacaagtccaactccatgaagatcgttgtcaccgctacgaaggttgacgacgacaccaccaccgacggtgcttcctacatcgtcaccgcttcctctctgcgcgtccgctccggcgcgggcaccaacttctctcagatcggctccctgaagaatggcgcgaccgtcaaggtcgagtccatcgccaacggctgggccaagctggagaacggcggctacgtctccgcccagtacctggccaaggtcgtggagaacggtgaggcgcagaccatgtacgtcaccgcccgcaccctcaacgtccgcaagggccctggcacctcctacgcgaaggccggcaccctctcccgcggcaccgctgtgcaggtggtcggcttctccggcaactgggcgaagctgagcaacggctactacgtctccacgagctatctggccaagtaagtcaggcgcacacacttcctgacgaaccgggatctcggctgtgaaaacaggcggcgcccgcaaggaaagccttgcgggcaccgctctttttggcgctgggggaatcgggagggggaaacgccgggagtgccgtcgggctgcacagttccgtgttgtccccaatgcgtctgcgtgtccggcggctgacctcccggtgacgccctggagaaggcgttcccgcgccgctcacatttccgggcagaagaagggcccacgccgtaacattcggcgcgggcccttctcactttgttcactcgtcctcgtcaggcgtttcggggaagagttccttgccgcaggaggggcaggggtgctcttcggacaggtcgaaggcgctctggtcgtagtagacggaagcgccgcagtgcgggcactcgtactcgatgaagtcgaggctatcgtcctcgtcctcctcctcgtcttcgtcctcgtcttcgtcctcgtcctggccgtggtgatgatggcagccgcagccgcaatcctcgtcctcgtcgtcttcgtcgtcctcctcaaagacggcttcctccagctcgccaaggtcgctgtccagctcgtcgatgtagcgctcggcctcgtcctggcggtcgcggatggaatcgagctcctcggcgatgaggtccagcgcgtcgagcatctggaggaggagcttgtccttggcgtccttggcggtgtccgcggtgagctccatgccctcggccatgcccttgatgtaggcaaccttcttcgaaatctcgctcatgctgtcgagcctcctttgcaatggcgccggaaatttgagcctgcgctctgcgtataggatgcggcccttaggcgcgctccatgtattcgccggtgcgggtatcgatgcggatcttctcgccctggttgataaagatcggcacgttgagggtgtagccggtctccagggtcgcgggcttggtgacgttggtggcggtgtcgccgcggacgccgggctcggtgtcggtcacctcgagcacgacgaagttcggcggctcaacggagaacgcggtgcccttgtagaagcgcacggtgacgttggtgttctccttgacgtagtgcatggcgtcctccacgatgtcctggccgagcgggatctgctcgtaggtgtcgacatccatgaagtagaagaagtcgccgtcggtgtagagataggtcatctccttggtctcgatggtcgcgcgcgggaccttatcggtggggttgaaggtgcgctccaacaccgcgccggtcatgacgttcttgatgcgcgtgcgcacgaaggccgcgcccttgccaggcttgacgtgctgaaagtccacgatgttgtagacggagccgtccagctcgatggtcacgcccttgcggaaatcgccagcagtaatcatgcaaaaaacctccaatgcagcaatccgagtgtttacttatccgattcattttaccacatatcccgcggtttgaacagggcaggagcgggtaatttttgcgtaaaggtccctagcggatgcggaaaatgcgcaagaggatgcgctccaggacgcggttgacgcgcgtcccggtgaattcccgcgaggggtccaggggttcgagcagcaccgcgcgcatccccgcaagccgcgcggcgagaacgtcggtcaagagctggtcgccgatgagcgcgcacgcgtcaggggcagcgcccatctcccgcgcgatgcggcgcagcccggagggcagcggcttccccgcgcgcggaaaggccaggattccaagcgcctcctccagcgggcgcaggcgctcggcgtccgagttggaggcaatgcacaggcagaaccccgcggccttggcgctctccacccagcgcgccgccgcgggatcgggcacggcgccgcgccagggggcaagggtgttgtccgcgtccaggaggaggacgcgcgcgccgccaagggcggtaagcggaacgtcggcaaggcgcggggcgcagaagtccggtcgaaggctcatgggcagcgccctcctttctctcttccattttacttgaaaaatgtaaagattgcgacaattctcgtcgcattcgcaaaaattttctatccaaggcgcacagttcatggtatactgaaatcactaaagtagggaggttgtgtctcatgctggaacattcatcccgtctgggcgtagacccgcagccggtcggcccgcttggcctcatcgccatggacggctgtaagcccctgggcgaaaaggtcaacgaatatctggtccgctgggagaaggagccggaaaacgcagatcaggtgctgctcacctatcccggctatcagcgcgatagcttcctgctggacgccgattgcccgcggttctcctcgggcgagggcaaggccgtgctgcggcagagcgtccgcggatacgacctgtacatcctctgcgacgtgacgaattactccaatacctaccgcatgtacggcatggaagtgcccatgtcgccggacgactacttccaggacctcaagcgcatcatcgccgccgagggcaagaaggccaagcgcgtttccgtcatcatgccctacctctatgagggccgtcagcaccgccgctccacgcgcgagtctctggactgcgccatggccctgcaggagctgacgagccttggcatcgacaacatcatcaccttcgacgcgcacgacccccgcgtgcagaacgccatcccccactccggctttgagaacgtgcagcccacgtaccagatgctcaaggccctgctgcgcaagctcccggacctgcagatcgaccgcgaccacatgatgtgcatcagccccgacgagggcgccgccaaccgcaacatctattatgccaccatgctcggcctggacatgggcctgttctacaagagacgcgactactccatcgtcatcaacggccggaaccccatcgtcgcccacgagtacatgggcgagtccgtcgaggacaaggacgtcctcatcgtcgacgacatcctggccaccggcgactccatgctcgacatcgcgcatgagctcaagcgccgcaagtgcggccgcgtgttcatggcaacgacgttcgccatgttcaccaacggcatcgaggtcttcaagaaggcccatgccgagggcctgttcgattacatcctcgccaccaacctcagctacgtgcgccccgaggtcaaggagcaggagtggttcatcgaggtcgacatgtccaagtacatcgccttgatcatcgccacgctcaaccacgaccgctccatttctcccctgctcaaccccatgacgcgcatccagaagctgctcacccgccaccgcgccaaccaaatggccaacgagcagaagtaagcgcccaaggcgcgggccgccccctggtttttttcgtttacaggcagcgcaaaagcatgtatactgaagaaaagccgcgaaaggaggcgctttttcgcatggaatttcttccggacgatcctccggtccggcgcgacccggacggctttgccgaggacctgcgccgcaatgcgcgccgggcgcttgcccgggaggacacgctctatctctgcgtgctgcgcgcgccggacgccggcgccgcccagcgcctggaggcgcacttccagctccacctctaccatggggagatctactgcgagagggagccgggcgtcttctacctccaggtctttgcgccgcaggagcgcgcggtgcaggtcctgctcgaggacgcggcggactgcgtgccgggcgtcacgggcgcagtataaatccgttcccaaggactagatataaaaggtagaaagaaaaaaagggggagacttcatgatcacacaggcagagtaccgcagcgccgtcgagggcacgctggccctctttgccaaggcgcacatcgccgtcacggaagaggaggccgcttccatcgaggttgcggactttggtctttccaacctgcgggaaattgggctgcagctcctcgtctacgtcaacaccccgcgcgtctgcgccaaggagatggcgctgttcccgggccagacctgcccggagcacatgcatcccccggtcgaaggcgagccgggcaaggaggagaccttccgctgccgctacggagagtgccatctcttcgtctacgaccccgcgtatgcggagcgctcgccgcgcatccccgcctcgcgcgcgccgtacttcaccgcctgccgggagatcgtcctgcggcccggcgagcagtacaccatctatcccggcacgctgcactggttcaccgccggggacgagggcgccgtggtctcggagttctccacgacgagccgggacgagacggacatcttcaccgacccggccatccagcgcgccccggtcgtggagggataggccgccaacgcgacgcaaattttgtcggaacgagcggattccggaaatatatatggcgaaacaacgcaagagtgtggtaaaatagaggcggatcctccgcgacctttgtccgggcggtccgcctgctctgtgcagacgacagactatctttgcgaggatgagcgaatgcaagagatcaaattgatcgccattgacctggacggcacgctgctctcgagcgagaagaccatctccgaggcgaacctgaccgccctgcgcgcggccgtcgcgcgcggcgtgtacgtggtcctggccagcgggcgcagctaccgcaacgcgatggacttttccgaggccatcgccaagggccagcccctgatctgcgccaacggcgccatggcgacgctttccgatccgtacgaatgcgtctactgcgagtgcctttccaaggacaaactccgcgcggccgtggagatcctggagagggagaagtgctactacaacgtctactgcgacgacggagccgtgatggaaagccgcaccggcagcgcgggccgcaagcgcgaggccaacggctacgcggtctaccggggcaccgttctctccggggacgagatgcccaagtacgtcggcgacggcgcgctcaaggtcgtctgcttttccccggaccgcgagaagatgcagcgcatccgcagcgcggccgagcgcatcccgggggtggagatcaattcctcctggtgggacaatctcgagatcatggccgcgggcgtgcacaagggcgccgcgctgcgctgccttgcacagcgcctggagatccccctggatgaggtcatggccatcggggacaacgaaaacgacctgcccatgctccaggttgccggcctgcccgtggcgatgggcaatgcggtggagagcgtaaagcagcagtgcgcctttgtcacggcgacgaacgacgaggacggcgtggcccgggcggtgcgccggttcgtcctgcacgaggagcagtaagagatggcaaccgtcattctgaagcgatgtcatgagtacgacgcggcccgcctgcaggcgctcctgggcgaggcgatggagtccctggaccttcccgccctgcggcccggagcgaacgtcctgctcaagcccaacctcctcatgcgccgcgagccggaccggcacaccacgacgcaccccgccgtggtggaggcgctggcgcgcctgctggccgagcgcggctgccgcgtcaccatcgccgacagccccggcggtcccttcaccgcggggctcctgcgcggcctgtacgagagcacgggcatgcaggcggctgcgcgccgcgccggcgcagagctgaacttctccaccgagagcgcggatgtggaggtccccaacccctgccgcacgcacatgctcacggtcctgcgctgcgcggccgaggcggatgcgatcgtctcggtgggcaagatcaagacccatggcctgaccgcctacacgggcgcggtcaagaacctcttcgggctcgtgcccgggatgctgaagatcgactaccacgcccggttccccgacatcgacgacttctgcggcgcgctgctggacatcgcgggctgggcaaagccctgcctgtcggtcctggacgggatcgtcggcatggagggcaaggggccttccggcggcacgccccggcgcatcggcgcgctggtcgtctccgacgacccccatgcggcggacgtcgtgggcgcggcgctcattggccttgccgtagaggaggtccccacgctgcgccttgcgcgcgaaaagggcctgctgcccgtgcccctggtgctgggcgagagtgtggaagacctggccgtgccggacttccgccgcgcgcccgtggagatcacgcgccgcggtatcctgaccgacaagcgctttgcgcgcctggtccgctcgcatccctgcgtgcaccgcgaaaagtgcgtgggctgcgggatctgccagcgctcctgcccggcccaggcgatcgaactgcgcggcggcgttccccattttgactacaagcgctgcatccgctgctactgctgtcaggagctctgtccgcagacggcggtggatgtgtttcagcccttcttcatgaagtggctgcgataaagacaaggaggtgcgctatgttctgtccccattgtggcgccaacgttgcggattcggcccagagctgcccgcagtgcggcgcggcgcttcacgccggcgcggcggagccgagggtggaggtttcccccaatcccggcgaaatcaaggattacctgacgatgaacatcgtccttctggtgctgtccgtgtgctgctgcggggcgattccctccattgtcacgggcatcatcggcgtcatcttctcttcccagacgcgcgatcacctgcgcaacggccgcctgaacgaggcggcgcagaagtcgcgcacggcgcgcgccatggccattgccaccggcgtcatcctggccgtgacggcgctgatcctgatcgtgatcatcgcgctgtacggcacgctcttctttgccatggtatccagttacacttgagcaggcgctccccccgtttgcaatttccagaccgatcaaaaaagaaggaggactcatcatgttttgtcccaactgtggttccaagctggaagacaacgcggccttctgcccgtcctgcggcgctccggtgaaggcggcaagcgccaatgcggctacggacaacgcggccccgaacaacgccgctgcggactcgtccgcgcagaacacctggcaggaggcgcccattgcgcccccgcccgcgccgaattcggacccctggcagcagcagaacgccggcgaggcgaccgtcaccaacggaacgaacccgcccgattacctgaccatcaacatcgtgctgaccgtggtctcggtctttgtctgctgctttagctgcctgagcattgccgcgctcgtgaccggcatcatcggtatcgtgatgagcacgcaggtgcgctccgccatccaggcgcacaactacgccctggccgagcagaagagcaaggccgccaagaacatgtggatcgccacggccgtgatcctcggcgtctccgtcctgctgggcctgctgctgaccgtcaccggcttcatgaccggcttcatggaagagttctacagcggactgtactgatcttcccatgcgccagctctcacctgccggcaagcgccgcgcgatgcgcgtcctctcctggtcgaccgtcgcggcgcttgccgcatttacggcctatgtgtacttccacaacccctttgagggcggcgtcacgctgtgcaccttccacgcgctgaccgggctggactgcccgggctgcggcatgacgcgcgccgcctacctgctgatgcacggccatcccggccttgcgctgcggcagaatccgttcatcgtggtcattccggtggtggcctacatggggattgcggagctctcgccctacctctttgggcgcaagctcaaacagatccccgtcgcgccctggatgctgatcgtgctcggcgtcctggtggcggtctacaccgtggcgaaaaacctgcccaagttcttttgaacgcgtgccgcatgcggccgcgttctttgttcgccgcccgctgcatacacattccaaaaaaggagagaccttctttgcacattgtactggtcgagccggagatcccgcagaataccggcaacatcgcaagaacctgcgccgcgacgcacacgacgctgcacctcgtccatcccctgggcttctccatcgacgagcggcatgtccgccgcgccgggctggactactggccccttgtgaccatcgaggagcatccctcctttgcccagttgcgcgaggcctatccgcagggcgagttcttctacgccacgacaaaggccccgcgcggctactgcgaggtgcagttcccgccggatgccttcctggtcttcgggaaggagacaaagggcctgccggagtccctcctgcacgaccagtacgaccggtgcatccgcatccccatgatcccgcaggcgcgctcgctcaacctgggcaactcggtggccattgtgctctacgaggcgctgcggcagaacggcttccccggcctctccgcagagggacacctgacggaattctgatccccctgccggaaaggaggattcccgatgacgtggcaagacctggcgctgctgggcggcgggctcgggctctttctcttcggaatgaagcagatgggcgacgggctggagcgggctgcgggcgacagcctgcgccgcttcctggagatcctgacgcgcagccgcttcctggggctgctggtgggcctcgtctttaccatggtcgtgcagtcctcctccgccacaaccgtcatggtcgtcggctttgtgcgcgcggggctcatggatctgcaccaggccgcgggcgtgatcttcggcgcgaacatcggcacgaccatcaccgcgcagctgatcgccctgcaggtttcggacgcagcgccggtcctgctccttgcgggggttctcctgcactgcttttgccgaaggcgcttcctgcaggaccttggcggcgtgctggcggggtttgggatgctgtttctggggctgacgctcatgggcgaggcggcgtcaaagctgcgcgacatgccggaggcggccgattttctggcggtctttgcgcgcacgccggtcctgggcattctcgccggcctcgccgtgacggcggtcatccaatcctcttccgcgtccgtggggctcctgcagctcctggctgcacagggcgtcatcgggctggacagcgcgatctttgtcgtgatggggcagaacatcggcacgacggtcacggcgattctggcctccgccgggggcggaaaggcggcccgccgcgccgcgcttctgcacctgctcttcaacgtctttggggcggtcctcttttttgcgctggtgcgcctgcttcctgtgacggcgtggattgccgcgctcacgccagggaaccccatgcggcaaatcgccaatgcgcacacgctcttcaacgtgtgcagcgttgcggcgctcctgcccttcctggacccgatggtgcgcttaacggaggtgctcatcccggaggcgcggcccgcctccaggcgcatcagcgggcgcaaagcgcatccctcccgaaacgcctgacgaggacgagtgaacaaagtgagaagggcccgcgccgaatgttacggcgtgggcccttcttctgcccggaaatgtgagcggcgcgggaacgccttctccagggcgtcaccgggaggtcagccgccggacacgcagacgcattggggacaacacggaactgtgcagcccgacggcactcccggcgtttccccctcccgattcccccagcgccaaaaagagcggtgcccgcaaggctttccttgcgggcgccgcctgttttcacagccgagatcccggttcgtcaggaagtgtg

SEQ ID NO: 582 - DNA, 2093 bp, Unknown
  16S sequences of unknown bacteria
caagcgtagcgcagcgcgattggctaagtcgaacccatgcagcgcatacgtcgggaaaaactctttacaccctgcaagttgggtgagactccaaacacgcaagctttgcgcagcgcgtttggtcagtcgaacccatgcagcactgtggaatttctgtgccgaaggcgcagaaattatgcgcgcagcagggtgcagtcccctcaaacgagaacccagcgaagcggttctcgtttgaagcgagtcaaaaattcatttttgactcgctcagtctgggcggcggtttttgctgcatagtttctgggtctggcgcgcaggataacgggtgcagacgtatcttttccttgtaatatacggcggcatgtattataataggatagttaaagaagtcttcatttttggggaggcaatttcatgactgccacgaataaacaaacgttggagcaatatctcacccccgggacccgggtgcatctgatcggcatcggcggcgtttccatgcggccgctggggctggtgctgcggcatatgggcctcaagatcaccggcacggatatgaacgcgtccgtcatgacggacgatctcatcgaaagcggcatccccgttttcatcggccaccgggcggagaatatccgcggggccgagtgcattatccgcacggcggcggtgcataacgacaatccggaggttgcggcggcccgggcggcgggcattcccgtctttgagcgggcccaggcctggggcattatcatgcgggcctaccgcaacgccatctgtctttccggcacccacggcaagacaacgacgacctccatggtcacgcatatcttcatgcaggcccagcgggacccgaccgtcatgatcggcggctatctgccgctgctgcacgcggggcaccgggtcggcaagggcgatacgatcattatggagagctgcgaatattgcaactcgtttttgaattttttcccgaccatcgcggtcattttgaacatcgaggcggatcatctcgactttttcaaggacctgcgggatgtccaggcatcgttccggcgctttgcgcagctcgtcccggcgggggggcatgtcgtcgccaacggcgatgatgccaacacccggcgggcgctgcacgggctcgactatctcacctttggcctcatgcaggacaacgacatccacggcgagaattacacgacggactggcgggattttgacgtcatcgccaaggggaaattctactgccatgtgcatctgaacgtcatggggcagcacaacacatacaacgccctggcggcggcggcctgcggatatctgctgggcatcgacggtgcggacgtcgcagcgggcctggagagcttccgcggcgcggggcggcgcatggagcacaagggcgaatatcacggcgcggccatctatgacgactacgcccatcaccccggtgagctgcacgcgctcatccaggcgctgcagacaatggagcaccggcggatcatcctggccttccagccccacacgtacacgcggacgaaggcgctgttttccgagttcgtccgggagctgcggcaggtggaccatgtcgtcctggcggagatttatgccgcacgggagcggaacaccatcggcatctcctcccgggacctggcaaagcagatccccggcgcggtcgcctttgacacgctgccggaggtcgccgcgtatctccgcgagatcgcccagccgggggacatcatcgtcaccgtcggcgcgggggatatttataaggcgggggaaatgttgttggagaagtaagttggggcgctgcagcgctggacgcgctgacttgggtgagactccaaacgcgcagcgtttggctaataagcgagagtcaaaatcttaagcgagagtcaaaatctttgattttgcccctcgagcttacacagcgtgccgattttgctcctcaagcttatacagcgtagtcgaacccaaacagcgtagagggattgatgcactgcaaaagcaaatttgcaaagcagtcctcgactactccagacacaataaacttgagaatttctacaagccaatgtctaccagacaatagggctagcgccctccgggggccc

SEQ ID NO: 583 - DNA, 8534 bp, Unknown
  16S sequences of unknown bacteria
caagcgagcttgcgagcgtcggaggccgcgaagcggctggagccccgaggacacggagcgaagcgaagtccgcaggggcggaacagcgggccgccgaagacggcacggtgcgaagatgcgagacgactatgccgcactgtggaacggtggcacggcgtagccgtgacggagggatcgggaggtggcgcgacgttcacagcgcctccacaaagctgggatagatctcccggtagcgcggatacgtccaatccgccgcgcgggtgaaattcttctgatacaggcggaaaacgacgggaatgtccttgggcatccactgttctttgtaggaatagcggtaggtaaggcccagccgccgcatgaccgcgccgcttttcgggttgttcacgtcgtgcgtggccgtcacatagtccagcccgtccgcgcgggcgcggcgcaagagcgcctcgcccgcctcggtggcaaagccctctccctggcattcccggcgcaggccatagcccaaatcgtgcccctcttccaggcccaattggatatagccgatgggaatgtcctcttcccggcggcaaatcgcgtattggtacgacgcgcctttgcggtattgcgcggcgtagcgctcctcataaaacgcgcgcgcctcttccagcgtgtttacgggaaaccagggcaagaaggtgttgacctcgcggtcgcccaaaatcgccagcatggcggggagatcttccggcgcaaagcggcgcagcaccaggcgcggcgcgatcagccgcggcgaattggcgtatggcatgcgcatccgtcctttctagagcacgcccttaaaatactgccccgtggtgcgggggaaatcgggcggcgcggcgcgttcaaaggcttccagcaccgcgcggcactcgcgcggcgattcgatggtgaaatacagcgtggcgaaatccagcccatccagccgcttatcgccgatgtatagcggcacgctgttgaagagcgtggcatagcggcgcgcgtcgcacaggaggggaaagcgcacgcccttgcggtcggtgagctcgctttggcccgggcaagcgcggcaacggttgaccgggcaggcccgcagccgcatcagcggcaggcggccataggccacgacgccgcgctcgaggctgccgcccatgcgcgtggcggcgcgcagcgtcagctcgcaggaaagcgtggcgctcatgacgcccatctgcgcgtaggcttccagcgccagggaattgaagatgttgagcccgtgcccgccgaacacctgcgcgcccgcctcgcgcgccaggcgcaccgcgcccaggttttcgcacagcgcgcgggaaacgccgtccggcagggcgtctatttccatgccaggatagagcagcgcgggcaattcgcacaccaggttgggaatttccagcgcctgcgggtgcgcggcgatttcgcgcgcgggcaggatggcgtactccacgcgttccagggggaaaccttctagctgcgcgaagcgttcgaagcgcgcgcgcagcttgggctgccccgccgcgcggcgcggcgcgatggatagcggcgcgctttggcagggaatgggccgcggcgcggcgcgcttttccaggagcgccgccagcgcttcccggcgcatgcggttgatttgcgcgccggggagcgcgacgccttccggcaattccaccgcgcattcgcgcaggaaaaagggcgtgtccccggttttgcccaggctttcgcgcacgcggctggcggtggtgggcgcggtgcgcgccgcctcgggcgcggcgtccgcgatttccacggcgttctctccgtcgctcaccgcgagacggctgcccgccgcgtccgccgaaaagcgcatgtccacgcccacgcggtgacattccccgcggtacagcgcgcgcatctgcgcgtattccttttccgccgccacgtcctcttcccgccggtggccgaacatggcgagcgtgcgcttgcccgtcaaatacccatcggtgaatcccgcgcgcgagaacatgcgttcgagcgcttcctcgtcgtagggttcgccgcgcagggccttgcggcaggcgtccacggcgctggccacgtattcggcgcggcgcatgcggccctcgattttgaaggaatccacgcccgcctccgtcagagcgcgcaggtgccgcaaattggaaaggtctttgagcgaaagcgcgtattcgcggccgttttcgcgaaagttcaggcggcagggctgcgcgcacaggccgcggttgccgctgcgctcgcccagcgcgctggaaagatagcacatgcccgaggcgctcatgcacagcgcgccgtgcacaaacacttccaattccaggcgcgtctgccgccggatggcctcgatttcgcgcagggagagctcgcgcgcgagcaccacgcgcgcaaagcccgcgtcttccgccattttcgcgcccgcggcgttgtggatcgccatctgcgtggaggcgtgcaacacgagcgaggggcacttggcccgcgcgcgccgcgccacggcccaatcctgcacgatgactgcgtccgcgcccgcggcgcagatttccgtgagttccgcgtccagcgcgggcagttcatcgtcgctcaccagcgtgttgagcgcgatgtgggtctttacgccgcgcgcgtggcaataggaaacggcctcggccaaatcggcgaagttttccgcgttgcggcgggcattgaaccccttggcccccaaatacaccgcgtccgcgcccgcgcgcaccgcggccacgagcgcttcctgcccgcccgccggggcgaggatttccggcgcgctcatgcgtttagcgccgccacggcgcgcacggcttcgtcgatgcgctgggccatgggcgcgtcctgcacgccggcgatttgcgtgccgcagcgctgcacggggatcaacacccgctgcgccgcgctcgcgcccacggcccgcgccatttccggcgtgatttcgcccaacatggcgtccgccagcacgatgcccagcgcgcccacgatcacatccgcctggcggcaggccactttcaccgcgttttccccggtcgcgcccgcgtccgcgcccgcgcgcagcatggccgcggtcgccgtggcgttggcgcccacggcggtcacgcgcgccgaaggcacggcgcttttcagcttttccaccagcgcgcggccgatgccgccgccctggccgtcgattacgagaacattcattcgtttcccctctttgcctggataggatatggtagcgaaattataccacgcccgggccgcttcctcaatctttctggtattatttttgcgcgcgggccttcgggcgattgacatttgcgcggtttcgggtatactggaagaaaaagcgcaaaaggagcgatggcgatgatcgaagttggcgcacaggcgccggatttcaccttgcgcgacgcgcagggcaacgcggtgtccttaaaagactaccggggcaagaaggtggttttgtacttttacccgcgcgacaacacgccgggctgcacgcgggaagcctgcgcgttccgcgaggcgcacgggcagttccaggcgcaaaacgccgtggtgctgggcgtgagccgcgatagcgaaacttcgcaccagaaattcgccgagaaatacaatttgcccttcacgctgctttccgacccggaacataccgtgctagaagcctatggcgcgtggggcgagaagaaaaactatggcaaggtttccatgggtaccatccgctccacggtggtgatcgatgaaaacggcgtggtggaaaaggtgtacgccaaggtgaagccggatacgcaccccgcggaggtgctgtccgcgctgcaaggggagtaggccatggattcccgggaactcgtgctgcgcacgctggagtttcgcaacgccagcgggcgcgtgccacggcagctttggacgctgccctgggcgtgcgagaaatatccgcaaacgctggaaaaattggcgcgggatttcgtttgggatttcgatgggcccgtcgtgcgctacgcgcgcctcccgcggacccagggcgatccctacgccatcggcgaatacgtggacgaatggggctgcacgttcaccaacgtacacggcggcgtgatcggcgaggtaaaggcgccgctggtgggggccgacgattggagcggcgcgaacagggtacacattcccgaggaatggctcagctttgacgtcgcgcaggtgaacgcctcctgccgggaaaagcgcgagaaattcctcatggccggttgctgcccgcgcccctttgagcaattgcaattcatccgcggcacggccaatctctatatggacctgctcgacccgccgccgcgcatgctggccttcctggagaaaatgcacgatttctattgccgtttgctgcgaaaatgggcgcagaccgaggtggacgcgctgaacttcatggacgattggggttcgcaaaacgacctgctcatcagcccggcgctgtgggaccgctatttccgccccatgtaccgggattacatcgatatcgcgcacgcgcacggcaaaaagatcttcatgcactcggatggcaacacgctgcgcatcctgccccggctgatcgacctggggctggacgctttcaatacgcagatcttctgcattggcatcgataagctcgcgcctttcaagggcaagatcaccttctggggcgaaatcgaccgccagcatctgattccttctggcacgccgcgggaaatcgacgcggccatccagggggtgtatgatacgctgtggcaggatggcggcctgattgcgcagtgcgaatttggcgcgggcgccaatccggataacgtataccgcatctaccaaaaatggcgcgaagtgcgcgctgggaaagcggaggattcccgatgagacacacaagctggaacgatggctggcaattttccttgcagggcggcgcgccggttccggtgcaattgccgcacgatttttcctttgccctgccgcgcgagccgcgcaatccttccgggatggatggcggctggttcgcgggaggcataggggagtataccaaaactttcgcgaggccggaagaggagcgctgcgcgctgctgatcgacggcgcgcaggggctgagcgaagtgtggatcaatggcaaccgcgcggccttccatccctacggctattcgcccttcgtcgccgacctcacgccctttttgcgcgagggggaaaacgcgctgcgcgtcgtttgcaacacgcaaatgcagcccgcttcgcgctggtacacgggcagcggcctctatcgcgatgtggaactgctcacggggcccaaggtgtgcatccccgtgtggggcgtgtgcgtgcgcacgctttccattgaaaacggcatcgcgcgcatgtgggcgcaggtgcaagtgctgggcggggcgggctgcgtgtacgcctgcgtgcgctcgcccgagggcaacagcgtgatcgaaatgcgccgggaagcggcgcagggccgcgcggaattcgtttggggcctgcccgccaaccagctatggacagcggaaacgcccttcctgtggcgctttgaggcgcgcgtggaggcggaagacggctcgatcgacgcggaaagcgtgcgctttggcatccgcaccatagccgccgacccggagaaggggctgctggtgaacggcgcgagcgtaaagctgcgcggcggctgcgtacaccacgacaacggccctctgggcgcgtgctcctgggccgacgcggagcgcaggcgcgtttttaagctcaaggaagcgggcttcaacgccatccgcaccgcgcacaacccgccttccacggcgctgctggaagcgtgcgacgccctgggcctgtatgtgatcgacgaggccttcgattgctggcggcagggcaagcgcacctttgattaccacctgttcttcgatgaatggtgggagcgggatttgagcaccatgctgctgcgcgaccgcaaccatccttcggtgatcctttggtcgcacggcaacgaaattcccgagcgcggcggcaagagctttggctgggaaatcgcccgcgcgctctcgcagcggatccgcgcgctggacgaccggcccatcacccacgcgctgtgcagcctttgggacaatccggatctccagcgcttgcaggacgcgggcgtgccctttggcgaaatggacgcctgggcgcgattcacaagcccctgcgcggatacggtggacatcgtgggctacaattatctctatgagcgggtggaggccgaccaccgccgcttccccaaccgcttgatcgcgcacacggaaacctttccggaagccgccgcaccgtcctggcgcaccgtggaagaaaacgattttgtggtgggcgatttcgtgtggacggcctgggactattttggcgaagccggcatcgggcacgtggcgtatgaaaaggacagcaccgcgggcctgcgcccctggccctggctcgcggccaattgcggggacatcagcctgtgcgggcagcgcaggccgcaatcgtactatcgggaaatcgtgtggggcctgcggcagaagccttatctggcggcgctggacccgcgcgcggcggcgagaaagcgcgccgtttcgccctggggctttgaggacttgttcgcggcgtggaccttcccgggctgcgagggccaagaaaccgaagtgcacgtgtttgcctgcgcggacgaatgcgagctgttcctaaacggcgcttcgctgggccgcaagccgctggacgcgcaataccgctgcgcgtttcgcgcgccctatcagccgggcgaagtgcgcgccgtggtctatcgggacggcaaggccgtgggcgaggagttcctgcgcaccgctggcgcgcccgtcaagctgtgcctcgccgaaagctggcccggggaggaactcgtgttcgctaccatctgcgtgtgcgacgccgaaggaaacgccgttccctacgcgaatccgctcatccgcgtctccttcgagaacgcctgcctgctcggcctgggttccgacgatcccgctagcacggaggccttcaccggcccggcgcgccacgcctggcgcggtgcggtgctggccgtggcccggcgcggggagcaagcgccggttttgcgcgcctgggcggatgggctcacgccgcttgagattgtcttgtaagaaggaaggcgcaagccgcgcgtccgccgcacagcgcaaaacgcctgggcggcggacaatttgcgctgtttgcaattttttccgcgcgcattcacaatccgttcacgacttttccgaaagtggctgttatactatagccatcaagaaaagaaagaggtgctccatatgaagagcctaaagaaatggtcgctggtcatcgcgctggcgctcgtcgttgcttctgttggcggctattgctatatgaaccagcccgcgcaggcggaaagcgcaggcagcgaaacggcaacctactattcggtggccgatatcgcggagcaggtgcgtcccgccgtggtacaggtgatttccaaggccatggtttggaacccgtacacgggcgaagtttccgaaacggaagcgggctatggctccggcgtgtacattgacgaccgcggctatatcgtgaccaacaaccacgtgatcgccgacgcggaagcggtggaaatcgtgtggctggacggcacgaccatggaagccgaaatcgtcggcaccgatcccagcacggacatcgcggttttgaagtttgaaggcagcgtagacgcgcaaccggtgtccctgggcgattccgacgcgctgcgcattggcgaattggccatcgccatcggcaaccccggcacgggtagccaggtgctctatggcacggtgaccaccggcatcatctccggcctaaaccgcgagggcatccaggccagcggcagctacacgcgcaacatcgaagtgatccagaccaccgcgcagatcaacagcggcaactccggcggcgcgctgctcaacgccagcggcgaactgatcggcatccccacgctgaagtcctcgttcaactacgatagcatcatcgaaggcatgggcttcgccatcccgatcaacacggcaaagccgatcatcgaagagctgattgaaaacggccaggtcgtgcgcccgcgcctcggcgtgacggtcgtcacgaacaacggcccggaagagcccctgcgcaactacgctccggctggctcgcagatccaaagcatcgaagagggtagcccggcggaagctgctggcttgcaggtgtacgacatcatcacccacgtggacggggaacgcgtgatgaccaacgaagaactgacggccatcatcgacgagcaccaggctggcgataccattacgctgaccatcgcccgttactttgatgcgcagggcaatgagctgctcaatccccaagtgctcgatgtggaagtcgagctgcagatcatcgattgacgccgcaaccgggttgcgaaaatccctttgtcataacgatgggggctgtgaaaaaaacagcaaaagttttttcgccacccctcagtcagcttcgctgacagctccccttgattccaaggggagccttttgga

SEQ ID NO: 584 - DNA, 3162 bp, Unknown
  16S sequences of unknown bacteria
accatcccgccgctcccgaacgcgccgattatcagcgcgcagcctaaaattttcagcatattctgacaacatccgccggattttcaagacaagacgccactgaaaacgaaaatttgccgctatatcgtccatttatccgttcacgcgatatcagaatgtactcatcgaagacccgattttcctgaagcaggcggatgtttggccgtgccgcgagttcggcgaagcttccggcgtgagcgctcgcgatcagcgggaccccggtgttctgcgcttcgagcaccgcgcgcgtctcttcgactccgccgagctcgtcgcagatcagcacctcgggagacatggttctggtcgcgagctcgattcccttcccgcggctgccgccggttatcacatcgcatattgagttttcaaacatttcctctatgtaaatttcacttcttgtgtcaataattaccacacgttttgtgaaactttcaccaagttcagccgctatatcgcgcagaagtgtcgttttaccgactcccggcggcgaggctatcaggatcggtcggactcgtccgccccgaaagcaacgcctgatgaccggcgcggcgacgccgcggagaatgtgcggcacgcggatgtttatcgacgatatatcatatatgctcctgtccgaatccccggaaagatccccgcagaccccgactctgattccgttttcagcgctgatatatccgtcgctgatggtattcgcgtgcgcgtagaatgagccgccgcagaacgcgaggacgcagttcgcgagctctttctcgccgaccggctcgctgaaaacgacatttcgcccagccgccgtcaccgaacagggtcgtccgcgccgcaggcggacctcttcgatgtccgaaacgctgacacctccgctgacgagccgtatgagcgagtccgcgacgaccggcggaagccgcggacaaagcgtgggcagaatctccgaatccttcatttgaccatcctccttcggaatggtacattatacggacaagcggcaaaaaaaatgcgtggaaagcaagctctccacgcaataattttcgcgtttattcacaaatatttttcattcagcgagcgtatcctgcgatttcagcagaaactcttccggcttcgcgacctcaagcgtgtttttcgcaaaatcaatgatatacgcccgatcctcgaatgaatcgacaaacagcgcctgatttgccctcagataataaatcgtccggctgccgtcagtcagcgatatcgtgtagacattgcacggctcattcaaatttcgtcgcccctcgtccgcgttttttgtataatatagcagtccgtgagcgatcgagtgtatccacccttccgcgacaacagtttccccgctgccgtcaagtgcactgcgtattatctccccgccccgcctcagaaacaacgagtcgtcgtaaacgtacatctcgggcgagccgaacagaaacgtcttcgtgccgtcgtccgacacgacgatatttcccttatatttcagatagctctgagcgttgagccccgcctcggtctcgaattcaaaccaccggaacccgtcacgatcaacgttaataatcggaacgtccgccgatgaattccagtccgcgtcagcagcataagaagccccggcgctgtccttcggtatcttctgacacccgccggtgccgtaaaagtcgggaacaaacagagttttcccgtcggtcacgaatgtatcgccgtacatatccgaaactttcacaagtatgccgtccgaaaagcgccagattcccgcctgctcacctgaaacaggcggctccgccatataccacaggcacccgcccgcgacaaacacctgctccacgtttatgtcaaactgttctacagccaaagtctccttgtcgcacgaataaagccgcggaccgttcagaaaataaacggtatcctcagaatcgtccgcaaggcggctcgcgaaagcgacagacttatcccgtcgagcagcgccgcaggagcagaacgaaagaataaacacagtgataaatgccagaacaatcagccgcgctttcacaagtcacacctccgaacagtttttctgaataaattatatcacataaaagcgcgtttgtcaagccctttccagaaattattttcgatttttcagaaaatagaaagagcggcaggaaccaagcctgtcgctctgtaaatttttatgcagtaatttgtgaatttactgacgcgaatacttctcgctctgcgccctgatgagctcctcgtccgagaaataatcgatcttcatcgacttcttgacatcggagagagtcttcgccgcgacctcacgagccgcctcgctgccctttttcaggatgtcgtagacgcccgcgatgtccttctggtactccgcgcggcgcgctctgatgggcgtcagcgtctcctcgaggacgttcaggaggaactttttgaccttgacgtcgccgagcccgccgcgcctgtagtggtccttgagctcgtcgaggttcgcgtaatccgggagatactccgcgaagtgctccggcttcgagaacgcgtcgaggtaggtgaacacggtgttcccctcgatcttgcccgggtcggagaccttgatgtggtcggggtcggtgaacatgctcatgactttcgtcttgacttccgccgaattgtccgaaatataaatgcagttcccgagagatttggacattttcgccccaccgtcggtgccgggaagcctgcgcgccgccgcctcggtcgggagaagagcgtccggttcgacaagtgtctcgccgtagacatcgttgaatttacgcacgatctcgcgggtctgctcgagcatcgggagctgatcctcgccgaccggcacggttgtcgccttgaacgcggtgatgtccgccgcctgacttatcggatagcagaagaatccgacaggtatcgaggtctcgaaattccgcatctgaatctccgccttgacggtcgggttgcgctgaaggcgcgagacggtgacaaggttcatgtaatagaacgtgagctctgtgagctccgggatctgcgactggatgagaatcgtcgacttcgccgggtcaagccccgcggagatgtagtcgagtgcgacctcgatgatgttctggcgcaccttttcggggttgtcggcgttgtcggtgagcg

SEQ ID NO: 585 - DNA, 2584 bp, Unknown
  16S sequences of unknown bacteria
atgcgcagtctgtatatcgagaatgaggcactgctgaatctctatatccgtccgttcatcgaggaggagaaccgcctcaatgatgaactggcggaggaatttctgaatcagatcatagaggcagatgacgaggggtatgaggatgatcttgcgatgcgcagtatgatggaggtactgtcgcattattttgagaagcatggaaagctctcttcttatatctggagcctgaataccctgggcggtttttacaaccgcgcagcggaggtgagcggcgggaagcgtgcggcagagtattttgggaagctgcgcggtctgaaatcgcactattttgaactgacagattttaatgtacgcaagcggatcatctactccttctacaattatccgatcgtgctttacaattttcagctggcagaagcgtcgttgatcaaccagcttctggatgaggcgctggagttttacaacgacccgaaggtgcgtgccctggatggagagcagtttgatttcccggagctgatcgaagagctgaattatgatgtcctgggaaattatgttctgagccatgcacgctggacgatcaaccaggcccttttaaagcgggctaaagaaacgctcggtgcaatttaccagcgatatctggacgatggctgtgcgccgtatgacattccggatgaggtttactgcaattatcaccgctgcctgtttttttccggcgagatcacctgcacagattatgtcgaaaattacaagcgtttctgtgattacagccttgcgcatgattcgatggaaaatcaagatggggcagacttttatgacagccgcctgtttcagattgctatcaatcatctgccaaatatcatcgagacgctccgactctataaggacgaatatcatggggatgcgacaatccagaagagctgcgtagagcagtatgtgcaggtcatgcgggaggtgccgcgggccggaagggcctcatttgtcaatgatgtcatgagccgttcgatcattgaggtgcttcgtctaatatcggacgacgatgagaactgtggcgtgctgatggaagtaatgctgatgcgggatgaggtcacgcttgtgcatgcttcgatggtggagcagatcgcccgccggattttaaatgcagtgctggatcagaggccggagttgctgatcgggtcggcaggctgtgaaaatatcgttgaggtactggagcgtagagaagaattgctggactatgttacccaggctgcaaagctgtttgatgttggcaagatcgagatcgccgagattgtgaacaagcagtcgcgtcagctgacggaacgggaaaaatgccagatccgcgagcatccgaagcgaggagcaaagctgattgaagatattccggcgttccggaaataccgggatgttgtcatcggtcatcacaaatcgtggaacgggaagctcggctatccggcagattgggacagactataccggcaagctgccgatcgtcgcaatgacagcaaatgcatttcaggatgatgtcatccatgcacttgagagcggcatgaatggccatgtgacgaagccgattgatatgaatgtggtctgtgcggtactggagaagtggcttggtggtgcaggaagaacagagcaggagatggagcatggagcgtaagggagagcttttgtatcagcgatttttaaataccgcccaggagactgtgcggctgacggcggcactggaaggcttctttttagaggcggatatcgaggagagtcagcgtgatgcctatgcagcttacctgaagcgccggatccggcctgcgatggagcggctgatccgggaaaatgcactggaaaaaatggatgtactggagcagcgcggctgggtgggggcgcaggagatggatgcgtttatcaggcaggcacagagcctaggacaggaagcggcgatgctctggctgatgcgaagaaagggggagcggtatggataccacgaccgggatttcaccctctagcgtggaggctttggcactgcggatttttggcggctgtcgcggtgtggtttaccggcaatacccgcatctggatgccgcgcttgccggacttgttccggaatgcgctaaggagactgagatagtcggaaccgatgggctccggcttttcttttccgggcagaaagtgcttgccgactatgccgcctgtccacagagaatgcaccggaggtatctgcatcttttgctgcatggcctgtacctgcatgtgattggcgcaaagcagtatgagccgcggcggtgggatctggcgtgcgacattgctgtagagcggatgatcaggcagatctgtaaagatcaggcggaattctgcagcccatctgaggagaaagtacggcaggttcatcaggcaatggatgtgtggcttggcagcagcgtgctgtcggcagaacagatttatgccaggcttggcgcagagaagctgccgtatgcaccggaacagctcttgcggatctacacatgggacgatcatcgtccgtggcgaaaggcggcggtggacggggagggacttcgcaaaaaatgggagcggatacgggcacattccggaagct

SEQ ID NO: 586 - DNA, 16644 bp, Unknown
  16S sequences of unknown bacteria
gcccagcgccagcggccacgccgcagctgccctggccgaccaggatgcgcatcccgccgttttcccgctcccgcaggccgcgaagaatgccgatggccttctccggcgtcagggagccgtaggtcacaccgttgatcatcatgaccggagacatggagcagcagccgagacacgctacttcattgatggtgaacaggccgtccgccgtcgtctcgccgctctgaatgccaagctcattgcagattgccgtccggatgcgctctgacccgttgacatgacatgccgtgccctgacagagcatgatcaaatacttgcccaccggctgcaggcggaagtagctgtagaacgtcgcgacacccatgacccgtgccgggctattgcctgtccgcgcggcgacatgatagatcacgtcctccggcagatacccgtaaattgcctgtgcttcctggagaatcgtgatcaggctggtagaatccttttcatgctggcgaagcacatcctccaacagagaaagatcactgccttttttcatttctgacatgacattcactccttaaatccaccgccgggaggcggcttggcgtagctataatctcagcttaaaacgcagattacataatctaaactatagcatccaggaaatacaatgtcaatcttttttcacccgtttttttgcaaactttctcgcaaaaaatacgctttttcaaaaatatccgtaaatgttttgaatttataatttattgtgcaaataacatgttattgtttatataaacattccgttttctgcatatttttactccaccattttctaataaaataaaaaaatatcaataaaaacgtactttttcaaaaagagccatctgtcatctgcagccgagatcccccccttgtttttgctgaaaatgtccacgatgcagctacgattgcgcataaatcaaaaacgttttcctttaaaaaaccggttgttttctcctgcatccggtggttttaaaacattttttggcaaaaaccatattgtaatacattattgagatttttccatttcttccgctgctgactgctgaaacatctgcacagcagcatcgcggtttttgcaggatttccttcatgttttagccctagcatacaaaaaagcacccgccgatgaactgaacctgaagcaatcccggcgggcgcatattttatttttcatcagccaccggtctgctctggcaccggcagggcgtcggtaatggagcggccattggaggtatggaatacattatccaccgccgggaccatgttggtgatgatcccccgggtggcgtacacggcgtaggccttgaacagcaccgggcagagcatcccgtttttcaggattgtctcgtgcaggctatagtagttgccggaattgcccagcgcgtccttacacagcttgagcatcgcctctgaggtgatacccccgttgccaaggctgctgccgttgaagaaattgctcaggtcaaaattcggcgacagcttcacctggccataatagaggtcatagtctccctggtagaccatataggtaaatttatccgacggctgggcgtcgatcttcagctccagcccatatttcgccgcctcatcggcaatcacctgggccgcctgaagccgcccgggatcagaggagcaaaccaggaatttcgcgctgcccagcgcgccgtccgtctgcaaagccgctttaaatttctccggcgcgtaatcgtattctgctgccaacgccgtatcatacagcgacgagaggggattgcacggcagcaccgccgcttctgcatagcctttgtagacatccgtggcaatggtctgccggtctaccagatacgtaaaggccgcccgcagtccagcgtcactgaacatgccgctcgtcgtattaaagccgataaaatccataatgggcgtggagcaattccaaagctcgtaatcgcagtgataatcggcgtaagccgaggagctggggtctgtgcagacgacaccggtggcgccatactcaaaatcgtcacggatcgccgccggggaatccgtctccaccagggtgatggactcgaccgtcaccgccgccttatactcctgccaccaatggggattgggcagcaggaccgtctccccgtcctgcaccgccgcatagtagggccccgtgcccatcggctgcacatcgttcaccgagaccgccgcgacaatggggatatccaacagcagcggcagattctcgtagggcgttcccagctggaactgcaccgttcgctggtccaccgccgtgacggaaaagacatacagcagccgggagccgtagaccgcgctgccccgggccgcgttataggaggcgacaacatccgccgccgagaccggcgtaccgtcggtaaaacaggcgttctccagcagcgtcacggtgtaggtcatcagatcatccgagacggtatagtggtcgcacagcaccggctccacggaaaaggtggacgtcacggcaaacaggccgtcatacaaaagagagaagatcgtccggttcgccaggtccgtacactggtacggattcagcccgtattgtgcctggtaggccaggccgaaggacgtgacctgggagttttgcgtcgcctccaccgcatcggagatgatatcaccggtatcccgaggtgtgtcctctgcgggaacatcagaccctgcgctgccgcagcctgccagcagcgccagcgccagaagcagcgccagccattttctttttttcaaggcgcacgcctccatttacggtgtagtttgcagcataatgatcgccgccagactgccccgctcatttccgacccgccggtgcgaccagaatcgctccggctggcatgcggtgcacagcgggcagatatcgatctgccggaccccggcctgccgtagccagatagcgttgagctgcttgagatcgacctggtacttctccccacagggcgtgatggcagacagcgccgccgggcccaaggccgagaccatcgcgtcaggcacatcccggtgggtctcaaagcagcaggcgccgatacaggggccgatggccgcccggatatcctccggctggcagccgtagcgctggcgcatctgctctaccgcccgataaacgatcccggccgccgtcccgcgccaaccggcgtgcacggccgagacgacccggcgcaccgggtccagcagcagcaccggcgtgcagtccgctgaaaaggcgatgactgccacatgagtctcattcgtcatcagcccgtcccggggctgggtgacctcccgctccaggccggcgccgcagtcgttccggcccaccggcacgacgatatccgaatgcacctgcttggtaaagaccagttcctccggccggaagcctacagcttggcccagaatcctataattctcccggacattttccggcttgtcaccccggtggatgccgagattcagcgccgccagatgcccttcggaaacgccgccgtagcgggtcgaaaagcaatggacgacccccggctcccggaggagcgcggactgcagatattccagctttccggcacgaatgacttcaaagctcatgattgggtccgttccgccgccaggtctttatcccggcagcattttttgtattttttcccgctgccgcaggggcagggatcgttggggccgactttgatctttttgcgcacaggctggcgcttgacgctcttgtcgccgccggcgccctcgccggtgatcttggcgaccttttcgcgcttgatctcctcatctgtcttgagccggacacggaacaggcgactgaccgtctccgcgccgatggctgcgatcatgccctcaaacatctcgtagccctcttttttatagacatccacggcattgtactggccgtaggcccgcaggccgacgccctggcgcagatctgtcatcgcgtcgatatggtccatccagttttcgtcgacgacccgcagcagaacgacccgctccagctcccgcatgacgggcgcggtgtactccgcttccttccgggcatacgtctcgtgcattttggcaagaatcttctccgaaagctgctccaccgtcaggccatccagctcccggtcggagacctcgaccgcaccgggggcgaagtacacgccctcaaactgggccagaatgccattgagttggccccggtcagccagataaccggtatcccggaacgcctcggccacatgggtgtggaccacctgctgcatcatgctgtcgatggtgctgcccaggtcctcgccgtcgagcaccttctggcgctgctcatagatgaccttacgctgcgtgttcatcacgtcgtcgtattccaggacgtttttccgcacctggaagttgcggctctcgacggtcttctgggcattttcaatggcgccggagaggatcttcgcgtcgataggcgtatcctcgtccaggcgcatcgtctccatgatcgccatcatccgctccgagccgaacagacgcatgacatcgtcctccatgctcagatagaagcgggtctcgcccgggtcgccctggcggccggcacggccgcggagctggttgtcgatccggcgggcctcatggcgctcggtgccaacgataaacaggccacctgccgcccgcacctgctgggactcttcctgaatggctgccttgtacttttcatacgccgcccggtactgggcgcggatatccagaatggccgggtccgtcgtctccgagaaggcgttggcctcctgcagcagatcctcctccacgccctgcttgcgcaggtcgttcagagccataaattcggcgttgccgcccaggacgatatccgtgccacggcctgccatattcgtcgcgatggtcaccgcccccagcttaccggcctgggcgacgatctccgcttccttctcgtgatgcttggcattcaaaaccgtatggcggatgccctctttggccagcattttggagagcaactccgatttttcgatggagatcgtacccaccagtaccggctggcccttggcatgacattcctggatctgccgcagcaccgcccggaatttggccgcttccgtcttatagacaacatccgggtagtcgattcgcgccaccggcaggttcgtcgggatctctaccacgtccagcgcgtagatcgatgcaaactcttcttcctctgtcagcgccgtaccggtcatgccggagagcttatcgtacaggcggaagaaattctggaaggtgatcgtcgccagcgttttggactcgttggcgacctccacgccctccttggcctcgatggcctggtgcaggccctcgttatagcggcggcccggcatcaagcggccggtaaattcatcgacgatgatgacctcattgtccttgaccacatagtcgatatcccgcttcatcacaccccgggccttcatggcctggttgatatgatgggcgatggtcgcattttccaggtccgccagattttcgatctggaaaaattcctccgccttccggataccgctggcggtaagcgagaccgtccgggctttttcgtccacgacatagtcgcagtccagatcgtccttggattctttttcatccgtcgaggtgaagacctgctttttcatccgggagaccaggaaatccgccatctcatacagcttcgtcgaggcttctcccttgccggaaatgatgagcggtgtccgcgcttcatcgatgaggatggagtccacttcgtcgacgatgacaaagctatggccccgctggaccatctctgtcttatagatcgccatattatcccgcagatagtcaaagcccagctcgttgttcgtgccgtaggtgatatcagcggcatacgccttgcgacgctggtccggggtcagatcatggatgatcaggccgacgctcaggcccataaaccgatagaccttgcccatccactccgagtcgcgcttggcaagatagtcgttgacagtgacgatatggacgcccttgcctgccagcgcattcagatatgctggcaggacggcaaccagcgtcttgccttcaccagtcttcatctcggcgatacgcccctgatgaaggaccatgccgccgatgagctgcacccggtacggccgcattcccaaaacacggtccgccgcctcacggacggcagcaaaggcgtccggcaggatatcgtccagtgtctggccgtccgccaggcgctgtttgagctgcggcgtgacagccttgagctccgtgtcgctcatcgcctggtactggggcgccagcgcttcgatcttcgcaatgatcggttcgatcttcttgacctcccgctcagagcgggtgccaaataatttcgtaatcagacccatagtgatccctttctgcttgccgcgccgctggcggcgtttttttgatcggtggccagggtggccacacgtgattttccgcgtttgcccacttcttagctgggctttgaataatccagccgggggctatccactggcattataacacacccccccaaaaaagcatagagccagcgcggaaatttacaatttgtttatgaaccgacaggtgtattatagcgaatttttcatgcaaagccgggcgatttttgaccgcttgcacaaaatgcaggagtttgcccgttaagacgtgttaactcattgaaaataaaagaaaaaattcactttttctactttacgtacaaccatttttgtgcaataatatgtaaaaattcatgaatgtctaaggaggaactcagatggtgtattatgagaatctgtcacaggcgcaaaagcaggaggcttacgccgcagccgtcaaggaatttgaggcttacaaagaaaagcatttgaatctgaacatggcccggggcaagcccggcgcagagcagctgaatctcgtcagcgggcttttgacgattctggcagagcccgaccagtgccggtgcgacgggatggacgtgcgcaactacggagagatcgccggactcccggcggcaaagcagctctttgcagaacttttgggctgccgcccgtccgagtgtatcatcggcggcaatgcgtccctgaccttgatgtatgacaccatcgccaaggcctacacccacggtctggcccactccccccagccctggagcaagctggagacagtcaagtggctctgccccgcaccggggtatgaccggcacttcaagatttccgagtccttcggcatggagatgattaccatccccatgaccgcgtccggcccggatatggatctgattgaagagctggtcaaggacccggccgtcaagggtatgtggtgcgtaccgaagtactccaacccggagggcattatttatagtgacgagaccattgaccgcatcgccgcgctgcgtccggctgcaccagacttcacgctgatgtgggacaacgcctactgcgtccatgaatttgacggtccgtttgtccccttccgggatatcatcagcctgtgccgcgcagctggcaacccggatatggtctatgaatttgcctccacctcgaagatcaccttccctggtgccggcgtctccgtcgtggcgtcttcggaggagaacatccgctatatgacaaagctgctgtcgatccagacgatctcttatgataaggtaaatcagctgcgacatgtgctgttcttgaaggacaaggccacaacgctcgcgctgatgcagcagcatgcgacgattctaaagccgaagtttgacgctgttatcgctacgctgcagcgggagattgcccccttaggcatcgccacctggaccgcacccaaaggcggctactttatctccgtcgatacgctgccaggcctagccacccgcaccttgaagctctgcgccgaagcaggcgttgtcatgacccccgccggggcgaccttcccctatggcaaggacccgcaggaccggaatatccgcattgcccccagcctcccgccggtggcagagctggagcaagcgatgggggttttctgtatctgcctaaaaatggcggcactggagcaggccttggcatgaagcgggccgttattttcgacctggacggcaccctctgggatgctgtcggcccgctgacggattactggaacgaggtgcggcagcaggagctgcccggctgccgccggatcaccgccgcgcaaatgcagtcctggatggggcagggggtacgggagctggcccggtccattctgccggagcggccgctggacacatggtttgacgcctacctgcaatacctgcacggcgaaaatgactatctgctgcatcacccgcccacgctctatccccagctgcaccagacgtttgacgcgctgcgtgcccaggggctctcgctcatgatctgcagcaactgcggcctgggctatattgagacctttttgcagctcaccggtctgggccccgccgtctgcgacacggaaaaccccggccggaccgggctgacgaaagcggaaaatatcaagcttttgctccgccggaatgagatcgaccgcgctctgtacctgggcgataccgccggtgaccaggcggcagccgcgggggccggaatcccctttgtccacgcggcctacggcttcggcgccgtgccagacgcggcgctgcgcattccagccctcccggctctcccggcgctgacggcccgctgcctgcccgtttgagcgtccacctccccgccgtctgcatcgcccatttcgtgcgctgcagcggcggttttttcggaaacgccagactgggcattaaaacggcgctgcaagtactttgtacaaaacgaagcagcgtaggtttggtctatcccagctaaaaaaagttcaaaaaaacattccgattcgcgaaaagccagttgaattttccaccgatttgtcttagaataactgcattgaagctttttcccggcgcaaggccgggcacaaagcatagcgcgggacccgcgcagggagagaacatgctgcacattgtattggtcgagccggaaatcccggcaaacacggggaacatcgcccgcacctgcgccgccaccggctgcgtcctgcacctcatccgccccctgggctttgacatttcagacaaggccgtcaaacgcgctgggctggattactggtggctggtagacgtccgggtctacgatgacctggcggactttttccgcaagaacgaggtcggcgaactgtggtgcctttcgacgaaagccccccgggcctataccgaagctacgttccacgacggctgctatctcttcttcggcaaggagacaaaaggtctcccggagccgtttctggaggcccacgccgcccggtgccttcgcatccccatgcgggcggaggcgcgcagcctgaatctctccaactccgtggccatcaccgtctttgaagcgctgcggcagttggactaccccggcctttccgcggcgggtaagatggcggcagaataagcaatttcccggggtatgcccggtttatcaggaggtacggtatatgaattacaacaagaaatccgtaaaagacgttgcgctgcagggcaagcgcgtgctgtgccgctgcgattttaacgtgccgctgaaggcgggcgagattaccagcgataagcggatcgtcgccgcactgccgacgattcggtatctgatcgaccacggcgcaaaggtcatcctctgctcccatatgggcaagcccaagggggaatttaaaccggagctgagcctggcggtcgtggcaaagcggctgtcggagctgctggggcagccggtcaagatggcgaaggatgtcgtcgggcccgatgccaaggccctggctgccagcctgcgcgacggcgaagtcatgctgctggagaacacccgctttatgcccggtgaaacaaagaatgacccggctctgagcaaggagctggcctccctggcagacctgttcgttaacgacgccttcggctccgcccaccgggcccatgcctccacagcgggcgtggcggactatctgcccgccgtctgcggcttccttatcgaaaaagagatcagcatcatgggcaaagccctggccgacccggagcgcccctttgtcgcgattctcggcggcgcaaaggtctcggacaagctgaatgtcatcagcaacctgctggaaaaggtcgacacgctcatcatcggcggcggcatggcctatacgttcatcgccgcccaggggcatgccatcggcaactccctgtttgacgcggaaaaggtcgactactgcaagcagatgctggaaaaggccgcccagaagggcgtgcagctcctgctgccggtggataccgttgtcgccgccggtttcccgcatcccattgacgcagccatcgagacgaaaaccgtcccctgtgatcagatccccgcggatatggaagggctggacatcggcgaagcctctcaagccctgtttgcccaggcagtccggaatgccaagacggtcgtctggaacggccccatgggcgtctttgaaaacccgacactggccaagggcaccatcgccgtggcccaggctatggcagattccgctgcaacgaccattgtcggcggcggcgactcggcagccgcctgtgagcagctcggctttgccgatcggatcacgcatatttccaccggcggcggcgccagcctggaatttttggaaggccgcgagctacccggcatcgcctgcctggcagaccgctgatacaggaagcaaccttagataaagtaggagaaggatactatgaacagaaaatatcgcaagaccctcatcgccgggaactggaaaatgaacaagaccccgtcggaaaccaaagcgtttatgacagaatttaagagcatcctgcccaagggtcggtggtgcgatatggcgctgtgcgtcccggcggtctgtattccggcggctgtgcgggccatgcgggagacccgggtcggcatcggcgcagaaaactgcaacgccaacgtcagcggtgcctacaccggcgagatctctaccgggatgctggtcgacgcaggctgtaaatacgtcatcgtcggccattctgagcgccgcgccatgggcgagacggatcaggaaatcaacaagaaggtcctggccatcctggaagcgggcctgatccccatcctgtgctgcggcgagagcctggagcagcgggaatccggcatcacgacggaatggatcacaatgcagatcaagtccggcctgctgggcgtgccggaggagaagattcgcaaggtcgtcatcgcctatgagcccatctgggccatcggcaccggcaaaacggcgaccccggagcaggcggaagaggtctgcgagagcatccgcaccgcgatccggaagctgtacggctcgaaaaatgcccgcgctatctccatcctctacggcggctccatgaatgagcgcaacgcctttgaactgctggcccagccggatattgacggcggcctgatcggcggcgcctccctggtgccggagaaatttgtcaagatcatcgaagcagccaaccagcccacgctgtaaggcaatctttttaaacccacggcaagcagataccgcttgccgtgggtttttctatttttaagatatttacaaatcgttcatgcaatttacagcgcagatagtataataccagatagtctaatattgaatatttgtcagaaaggacaccgcctatgctggaaccaaatttcgtcgcagcaacgatgctgcgcaatgcaaacaaattcgcagaggcctattaccgcgccctgcagcctctgtgcctggaaacgggcctaccaccgctggctgtagatattctgctgtttttggccaacaatcccgcgtataataccgccaaggacatctgccagtgccggggcgtaaagccgggaatcgtctcggtccatgtagaccggctggtaaacctgggcctgctggcgcgccaggacgtgcccggcgaccggcgcaagacgcgcctggtctgcaccgaccaggccgcgccgctcatcgcccggagccgagctctgcagcaggcttttgccacccggctgacagacgggctcagcagcgaagagctcacgcagtttcacaaatgcatcgccgcgttttccgccaatcttgatgcgatccgggccagcggcatctgaggaagttacgaggagggtactatgctgaaacttttaaaaaacatgcgcagacaggagcggctgatggccctggcctgcctgctgctggtggcgggccaggtctattttgacctgaagctgccggattatatgacggagctgacgaagctcatcaagacggccggctctacgacggcggatatcacgtcggttggtcttcggatgctgggctgcaccctagcaagcgcgctgctggccatcgcctgcggttttttggccgcccgcacggcctcgggcttcagcttcatcgtccgggcaaagctgttccaccatgtcatggaccttggcacggaggagatgcagtcgctctccatccccagcctgatcacccggacgaccaacgatatcacccagatccaaatgattctcgccctgggcctgcagatgctcatcaagtcaccgatcatggcggtctgggctgtcatcaaaattctgggcaagagctggcagctctccgcggtgactgcggcgttcgtcgtcgtcatctgcgcaacggtactgacagtcatgtgcatttgcatcccccggttccggctggtgcagaagctgacggataaaatcaaccgggtcgcccgggaaaatctgacaggcatcaatgtcgtccatgcgttcaatgcggaggactaccagaataaaaaattcgacggccccagcaaagaaatgacgcagatccagatgaaaaaccagaagctcttctccctgatccagccgacgatgctgctgggaatgaacggcctggctctagtcatctactggctaggcgcggccctggtcaaccagatttccgtcggtgacccagctgcgcgactgacgatgttcagcaatgtactggtcttcagcacctatgccacatacgtcgtcatgtcctttatgatgctggtcatgatctttatgctgctgccccaggcgcaggtctctgcagaacgaatcaatgaggtcctggaccggtgcgccaccattaccgagggcacgcgaacccaggggacggagcagggcagcgtcgaattccgggacgtcagcttccgctaccccggcgcggcggaaaatgagctctcccatatcagcttccgggtcgagcgcggccagacgacactggtcgatctcattccccggttctatgacgcgacggacggccatgtcctgctggacggcgccgatgtgcgggagtaccgcttcgacgccctgtatgacaagctggcctttatcggccagcgggcgaccctgttctccggcagcattcgggaaaacgtcttcttcggccagagcgccggcgacgatacggacgctgacctgcagacagcgctggagttggcccaggcgtccgaatttgtcagccgcctggacaagggcgcagcctatcccgtcgcccagcaggggcggaacctctccggcgggcagaagcagcggctttccatcgcccgggctctggcaaggaagccggagatcctgatctttgacgacgccttctccgccctggattataagacggacgcagccttgcgggcaggccttgcccaggcactgccggagacgacgaagattatcgtcgcccagcggatcagtaccatccgccacgcagaccgcattcttgtgctggagcacggcgagatcgtcggcgacgggacacacgaggcactgctgcaaagctgcgaggtctatcgccagatcgccctgagccagctcagcgcggcggaattacagtaaggaggtgcgcaatatgcgaagagggcaagaatatcagcttccggaccgtcaggtcctgacctctgctgtcggccggatcacggcctatatgcgcagcagcatcggcattttgatttttgcgctggtcctggcagcactgagcgccgtgctgaccatcgtcggcccggatcaggtcggcaagatcgctacgcgaatggcagacggcctgaccaccggcatcgacctggcggccgtggcaaagattggcatcggtctggccattctctatgtcatcagcgcgctgtttggctttttccagcactatatcatggccacggtgacactgaagatgtcctactggatgcggggtgacctttcggccaagatcaaccgggtgccgcagaaatacttcaacacccacgcccagggcgatatcctcagccggatcaccaacgatgtctccaccctgcagcaggggctgacaaacagcctgccgaccatcatcagtgcggcgacccaattcctgggctgccttgccatgatgttcgtgacccagtggcggctggctctggtcgcgctggcgatcaccctctgcgggctgctgctgctcgttctcattatgaaacgctcccagccgtactttacggcgcggcaggagagcctgggcgcactgaacggctatgtggaggagatgtataccggccacgccgtcgttcgcagcagccgggcaacggcgcaggtgggcgcgcagtttgacaagctcaacgccgccgtctatgatgccaactggcgctcccagttcctctctggcgtgatgcagccgctgatgaacatcatcggcaacctctcctatgtggccgtatgcatctacggatcgatcctagcgataaacgggaccatcgccttcggcgtgattgtctccttcatcctctatgtgcggctgctctcttcgccgctgacgcagatcgcccagggcctgacgaatatgcagacggctgccgcctccgcccaccgaatcttcgacttcctggagagcgaggagctgtccgacgagggcggcaagaccgccaccctcacccggacaaccggcgcggtgcagttctcccacgtgcgctttgcctatccggacatgccggagaagctgatcatccacgatttctccgccgacgtgcggccggggcagaaggtcgccatcgtcgggccgaccggcgcagggaaaacaacgatggtcaatctgctgatgcgctttttcgaagccaccggcggccagatcaccatcgacggcacccccatcaccgacctgcggcgagagaatgtccacgacctgttcagcatggtcctgcaggatacctggctctttgatgggaccgtgcgggaaaacctagcctataatatgaccggcatcacggatgcgcagctgtggcaggtctgccgggcctgcgggctggagaaattcgtcaagacgctgccggacggctttgataccgttctctccgagcgcacgagcatctccgccgggcagaagcagctgctgactatcgctcgggcgatgctgcaaaatgcaccgatgctgatcctcgacgaagcaacctcgtccgtcgataccagaacggagctgctcatccaacaggctatggacgaattgacgaagggccgcaccagctttgtcattgcccaccggctctcgacgatcaaaaacgccgacctcatcctcgtcatgcaagcgggcgatgtcattgagagcggcacccacgaatcgctgatgcagcagggcggcttctacgcggcgctgtataacagtcagtttgaaaacgcctcctgacgcgcacatcggcactggaaaaacaagacagcttgtgctatgattggtctgtccggggatactgccccgggcagaccaaaatttttcgggtgaggtgagcacttcatggcaaatacacagcggcggcagatgtcggacgcctttgccacggcaatctttatcattctctccggcggcctgcaggacgcttacacctattgctgccgcggcggcgtctttgccaatgcgcagacgggcaatatcgtcctgatgggcactcgcctgtttcaaggcgacttttccggatgcgtccgttatttgattccaattttgtcgtttatttgtggtatttttgtagccgagagcatccatgcccggtataaatgtgcagagaagatccactggcggcaaatcattatcctggtggaaattctcattctcttcggcgtcggttttctgccgcagagctggaacgcagcagccaacgccctggtctcctttgtctgcgcactgcaagtgcagacatttcacaaggtccggggccatgtctacgccagcaccatgtgcatcggcaacctgcgcagcgggacagaagcgctgcatgcctatttccgcacccgggaaaagggcgcgctccacaaggcactaacttatttcagcgtgattgttttctttgctgccggtgcggcggccgggagcgcgctgacacttgccttgggccaaagcgccatctgggcaagctgcggcctgctggctgtcagcttcggcatgatgtttctcccggcaaacgaagcataacaaggacaaacaaagacgccgcggcgggctggaatatcagtccgccgcagcgtcttaggccttcaaaaaaacctcgcagagtttgcgccgcgcacggcgcaaataaagtcaaaatcattttctctggcggcaagtgggtgagactccaagagcgcaaagcgcgattggtcaataagcgagagtcaaaatctctgattttgctcctcgagcttatacagcgtagtcgaacccatgcagcgcatacgtcgg

SEQ ID NO: 587 - DNA, 15026 bp, Unknown
  16S sequences of unknown bacteria
ggggaggaaacgatgcgcgattcgctcgccgaaaagattgccgagctcggcctggacagcaagggcgtgctctcaccctcgcagaaggctgcacgtgccgccgagaggcgggcgtccgtaacgcccgaaaagacggcgggcacccccgtgcggatactcgccacgcgtatcgcgggcacctctcacatagacaattacgaggaagtcgtcgacagccttgctctgcaggagcgcctcgagctgcggcgcgagcctttcaacgaggcagattcgcgtgccgtggcgattctcgacaaggcggggcggcgcgtcggctatatcccgcaatctgacaacaaggtcgtctcggaactgctcgacgaggggcagtcgctgtacgcgcgcgtgcaggatatcgacgtccacaaccgctgggcagaaatctccatcgacgtctacgtcgaggagcagtgaggcggatgggcgagatggacgatttctggggcgagcagccgcagaagaaggtctcctacctcacgctcgaggagctcaagggcaagacggcgtttgcctacgatgtcaaggaaggtccctgggggaggcttttccagtcggcattcgcggagatgaccgtgggcaccaagctccggggcgatgacgtgctcatcgtgggctcgcgtgccctgtggcctccgacgcagcgcatccgcgtcgtggtgttcgctgaccatgcccatgtggcgcccgagtcgatggacgacccgtggcgcctcgcgtgcgttgagggcgggcgcttcttcacgctcgcggcgacgtgcgattacctcaaagtccaccagatgacgatagtcgaggtgccgcgtgagcgcctcgcgcagttcgatgaggtgctgctcgacgatgaggcggcagagttcgcacgccacctgctcgaggagtcgttcaaggcgcccgcgccctcgtacgtgcgggagccggctttccaggagctcatgggcaaccggactgccgcagagccgcaggcgcgctttctcgcgtgcgggtctttcgatttggaagggcctgcagatgcgagcggcgacgaggcgggggaggatccgctcgccaagccgcgctgcaacgaggaatggtgctcttccatctgcgccgagctctcgctcgacagcctgcccgactaccactacatctacgagccggaagacgggacctatcgcgtgcgggcgctcaaccaccgcctcgacgggcatcctgggctcgcgtacctggaggcgcgcaagaatgcccaggtcgcctttgccgagcagtacgatttcctgctcatgcagcgcctgtattcggggacgtgccagcccgtgtctcgctacgagcgcgatatgctctcggatcgcgtctggttcggttccttctcagattcgaatgacatctcggtggaaagcgacaagaccgaggagcatctcaaggagatgcgcgaggcttacgaaagcgccgcgcggcaagatcctgcgtccgtgctgccgcgcgcggtgttcgaccgtctgtgcgaatggttccgccgccgttcggagggcgacctcgacgcgtgcgcacaagagatcgacgatgcctgcgccaaggtgccctctcctttcaggtatgagttttccgccagcttcgactacgagcgcaaactcgcccggataaacgtgttcctgcccgcccgtggcctgttcccactcgtttgcgccaatcacgatctggcacgctaccccgagtacgcgtcgatcgagctcgacgagcaggggctcaacgaccgtcatgcggagctcgcgtgcaggatgggcatctactccgcccgtctcgtcaaatccaaggcgccctgggtcaaacgcatccaggttaacggcctgtatcgcgagctgcctcagcgccaggtggagggggcacgtcccacgccgtgctgtctgtattcgtttgagattggcgaagacgagctcgtcccgagcattctcgagggcttcgcgagcgtcttcgacatcatgcacgacatatgcgcgcgcatgcaccgcacgcgcgagcgccgcctcgtggccgtcgacccgctgtttgcgccagacgacgccctcgatttcctgttcggttgcgaaacgtatcgcgacggttggaccgtgccgtatcggtgccagaagtactctgagcacggcagtgccgaagagcttgcggtactcacgacgcgtatggaggacctcctcgaccgcggagagctcgaacgcgggagaaagatcggcgccgcgctcgaggaaaagtaccgccgggagtggctcgacgagctgccggtgggcgtgcgcgcgctgtcttgcaacagcgtgttcgaggagaagctcgcgcgcgagcttctcgaagagctgcgcttcctgccgcagggcctttcgcacttcttcgtcgtgtacggcaatatctgctacgagatggagcagcgctcggaggcgctcgagcacctcgccatggcagacgagctcaaccccgcgtttcccgagccgttattcggccagatcggaatcgcgttcgaggacgaggactacgagcgggccgacgagctggcgggggaggcgttcgaggtcgcgtacctcgcgcgcgacatggcgcaggtctaccgctgctgggtgagcatcgccatgcagcgcggcgaaaacgacgtcgccacgagcctgttcaacttcgccctcgccgtctcgcaagatcgccagaccgtgcagcagagcgtgcgcgacctggggctgttgcacgcgcagggcgctacgggcaccgatgccgatgcagaccccgtctcgacgctcatcttcaacggataccccatccacgcttccgaaaagatctacgccgtctcgaagggcgacgtggaagatgcgctgcttggcggaccacttcccgacccgtccgtgctcgcagcctacgtcaactcccgcaacaccaccgagcctcttcccgccgagctcaaaacgctcatgctcagcgtcatgggcgatgcgttcgcggatgcgccgctcgacagctatctgctcaatcccgtgatcgtcgacagccttcctgcgcttgacctgctcggggagggcagcgggctcgtcgagcccctagaagacgacggaagcctcgccctcctcgccgtgccgttcgtcaatgcagagggcgagctgcgcttccacgtggcggccaccgtgagcaggaacgaccaccacgtggtgcgctcgctcgatatgacgaagggccttgacatcagcgcctggggttgcgcctacgagcatttcctgttggcgcgcccctgcgattaccccgagctcgagctcgaagaccgctgcgccctgcttggcgaggtgtaccgcgcgccgcgtgagcgcgaggacacgcgcagcgtgagggcgctcgaccacctgcgcgatttcgagcatcccgacgacgtcctcgtcgtgttgcgctgggcaggcacggtcccggaagccgcatgggcacggctcgagtacgtcaacgacgaccatcagctcgtggccaccctcatgaccgagccgttcgacgagttctccgtgcattcgggggacctgtgcgtgctgcgggtcgtcagggactggcaggttgccggcggcgttgtggccttcatcgagccgccggagtatgagcggtagtcttttgccgccttttttgcgcgtgccgttgcctactggccatcttcgcgttgcgctgtggatgttggcgtgcgctacagtgacgggtatcgtgtgagaaacgattgcatgttcgacaaggaggcatcccaccatggacgatgaggagaagcggttctaccagaatgcgaagttccccgagggcgagggcggggtgcgcatgctcgagcgcatgaacgaaggccaccacgaacagcttgctgcgtggggcttcgcgcagctctcgccgcagccgggtgctcagattctggacgtcgggtgcgggggaggggccaacctgctccggctgctcgagcgtagcccgctcgggacggtcaccggtgtcgactactcgcagacgagcgtcgagatgtcgcagaagacctgcgccgaggccatcaaagagggacgctgccgtgtgcagctcgccgatgtggccgatctgccgttcaaagaccggagcttcgactttgtctccgcattcgagaccatctatttctggccggacatcgtgcgctcgctagccgaggtcaggcgcgtgctcaagccgggcggcacgttcatggtctgcaatgaggcggatggcacgcacgcggaggacttcaagatggtcgatgtgatagacgggatgaccgtctacacgccagacgagctcgaggggctgctggagaaggccggattcgatccggttcgcatctatcgcgacgagccgcgcagcttcatcgtcttcgaggccaccaaagaacgctaatctggcacgaggggccgtgggtatcgtgtcattttgaaccgatgtccacggcccctcgggtcacgtgagacgtaagaagggcccggcagctggttgctgtcgggcccttcgcatcggtttgccggagcagtgcgcgctacttgagctctgcggcgcagtgcgggcagcgggtcgcgccctccttgatctcttccttgcaaaacgggcaggtgggggcgggggctgcctcctccttttccacatgggcgagcttctctgccgtcgtctgcatcttgttcacggccttgaccaggcagaacacgacgaacgcgatgatgatgaagttgatgatcgcgctgatgaacgcgccgaagtcgatgtaggagtcgccgccgacggggatgacgaggccagaaatctgcgtgccgttgccgccggtgatgagcttgaggaacgggttgatgatgtcgttggtcagcgacgtgacgatggcggtgaatgcggcgccgatgatgatgccgactgccatgtccatgacgttgccacggttgatgaaatctttgaattccttgaagaagcccataatggtcctttcgtctcctgatattcggctgtcggcaattatagagaaaaaaaccattcgatggcacgtgcttgcatatgcgattttggcgttgcagaatagcggctcggttgtaaagtgtgactctatatatggcggggttctccggtctcgggcaatctcaaaaccggatatcagtcgatcgcgcgaaaggtgcatagggtagcttatgggtttgacgagcaagcagaagatgatgattgcagtgctgctttccggcacgctgctggtggtgttgaatgcgacgatgctttctccggcgctgccgcacatcatgagagacacgggcgtcggtgccacgacggtgcagtggctcacctcgggctacatgctcgtcgaggcggtcgtcatcccgatgaacgcctttttcgtcggcaagttctccacgcgcaagctcttcatcggcggcatagcctggtttggcattgcatccgtggtcgctgccctcgcgccgaacttctacgtcatcttgctcggccgtgccatgatggccatggccacgggcatcatcatgccgatgaccttcacgctcatcctgctcatcttcccacgtgagaagcgtggctctgccatgggcatcgtcggcctcatcatcagctttgcacccgccatcggcccgtcgctttccggtgtcttggtcgacaccgtcggctggcgcatgctcttcatcatcgttgccgtcctcgccgcgctcgtcgtcctgttcgcgagcttctcgctcaagaacttcgagggcttcgagcaggttccgttcgaccccgcctccgtgtttctgctggcttgtgggatgatcgggctgctctatggaatctcgtcggcgacctctgccgaaaacatcctcatcccgcttgcgctcatcgtcgtcggcctggtgctgctcgggctgttcgtctaccggcagaccaagctcgaggtgccgctgctgcgcgtccaggtcctcaagacccgcaggttccgcaccgtcgtcatcctcatcgcgcttctgcaggcttccctcgtcggctcagaagtggtcctgccgatttacgttcagcaggtcatggggcagacggcgaccgtttccggcctgctcatgctccccggtgccgtcatcggcgccatctgcggtttgctctcggggcgtctgttcgacaggttcggcgtgcgcgggatcgtcatcttcggttcggtggttcttgctgttggcgccatcggtgtcacgactttttccatggatatgacgatcctcatggtcacggtcgtctacacgaccatgtctatcggcatccagttcctcgtgaccccgctcaacacctggggcgtgaactcgctcgacaataaagtcgtccagcacggcaacgcgctcagcgccactaccaaccaggtcggggcgtccttcggcaccgcgttcatcgtcagcctgacggcgctcggcgcgctgttcgccccggccaatgccgacgcgctcaccgtcacgttcacgggcgtgcacgtcgccttcacgggcatgtgcgtcatgctgctcatcgtcgtcttgggcgtcctgctgttcgtgcgcgaaaagcccagcgacgagaagcctgcggaagagggcgtgttccacatccccggcattgtcggcgtggaccgcgagttcctcatcgcagacgtcatgaacccacgtccgggctacattggcgagcacgcgacggtgcgcgacgccatcaagatcatgcgcaagcgcaacacgagcggcgtgcccatcgtcgatgcggacatgcacgtcatcggcttcatctccgacggcgacatcttgaagtacctgtccaaccagggcgggcagtacttcactgacggcaccaacttctactcgatggtcgaccaggacgacttctggaagcgcctgggcagcctgctcgagctcgaggcgatgaagctcgccaccaagcaggtcatctccatcgagggcgatgagaacgtcgagaaggccttcaagatgctgtccgagaagcgcatcaagaaggttccggtgctctacgagggcaagctggttggcacgttgagccgcagcaacatcatcatcggcctcgaagatgccgaatatattctcactcatcaacaaaatggcgaaacggcgtgacgctcgtctagaatacggcccataccaaaggcaatcgaggaaaggaccatttccatgaagattcgctacaacgagaaccgcgacctcgtagagaagattcgcgccggcgtcctcaagaagggcggttactgcccctgccgcatcgagaagaccgaggagaactactgcatgtgccaggagttccgcgatcagatcgccgaccccgacttcgagggctattgccactgcatgctgtattacaaggagaagtaagctccccaatatcatgcgcgggaagagtggcactgccacaattcccgtgcaactgacgcgagatgcgtggcactgccacacatcccgtgcatgtcgtctgcgatcatcgacaaggagaccgagccttccatggcactcaacatcgtattgttcgaacctgagattcccgccaacaccggcacgatcgggcgcagctgcgtgctcacgggcgccagcctgcacctcatcaagccactcggcttcagcctcgacgaccgcatgatcaggcgcagcggcatggggtactggcacgacatcgacctgcacgtctacgaggactacgacgagttcctcgcgaagaatcccggcgctaacccctggctcagcacgaagaaggcaaaccagtgctatcacgaagtcgcctatcacgatggcgactacctcatgttcggcaaggagtccacgggaatcgacgatcgtatcctcgccgctcatcccgaccgctgcatccgcatccccatgttcgagcgcgaggggctcacgccggccacggcgggccccggccccacgggcgaccccaccgacccggatgcggtctcgctcaacctctccaacgccgccaacatcgtgatgttcgaggccatgcgccagctcggcttcccggggatggtgagctagcgcttccgcgctgcgcgagctgctcgtatcgcaaccgcagaccgccatgtttcggcctttccaatatcttgcgtgcatatgctcggacaagtgcgtggattttcacgtatagttctgagaattgtctgcgtttttcgcaggtgaatcagtttttccgtacggctcttcgagtaggaaagggggaaacggtttggaaactatcggtgtcggtaccatcgccttcttggtgctgttcccaatgctcatcgcgttcatccagctgctggtccgcgacgaccgggcgcgtacgttcatcacggtcattggtgcccttgtcatcgcttgcgctgcggtgttcctcgcgtatgagttcgttcctctcggttcccagaaatttgccatcaacagttccgtcgcagagctgctcggctacgtgatgttggcaatcgatgtcctgctgtgtctctacatcatcggcaagggcatcgcgcacaagaagtacatcgcgatcatcctcgccatcgtccagctgtgcctggcggtctacgtcgatttgttcgtcgcggacggcatcgcggtctcgcatgcgctctacgtcgacgacctctccgtcatcatggcgctcatcatcggcatcgtcggctccggcatcgccgtgtacgccctcggctacatgcgcgtgcacgaagcccacaacgagggcaaggaccgccgcaacgtctttttcgcggtgatgttcgccttcttgggcgcgatgttcggcatcgtgctgttcaacagccttacctggatgctgtgcgcttgggagatcacgacggtctgctcgtttgccctcatcggctacacgcgcacgaaggaagctatcgacaactccttcctgcagattgtgctgaacctcatcggcggtatcgcgttcacgtgcgcgctgttctggattggcagcttctacggtgtcatggagctcgacaagttcctcgcgtactcgctcacgttttccgagaacggctacacgctgctcgtcgacctgccactattactgctcgcgctcgccggcttcacgaaggccgcgcagatgccgttccacaagtggctgctcggcgccatggtcgccccgacgcccacgtccgcgctgctccactcgtccacgatggtcaaggcgggcgtgttcctgcttatcaagctggctccgtgcctcggcttcaacctgcccggctacatcgtcatgatcgtcggcggcgcgaccttcctattctgcgcgctcgctgccatcagccagtccaacgccaagcgcgtcctcgcgtactcgacgatctccaacctcggcctgatcgccgcctgcgcgggcgtcggcaccgatggcgcgatctgggccgcgatcttcctcgtgatcttccacgcagtcgcgaagtccctgctcttcctgtgcgtcggcactgccgagcaccacatcggcagcaggaacatcgaggacatggacgacctgttcgagcgcatgccgcgtcttgcccgcctgatgtcgattggcatcatgggcatgttcgtcgcgccgttcggcatgctcgtctccaagtgggcggcactcgaggcgtttgcgcagtccgaaaacgtcatcctcatcctcctgctggtctttggttctgctgcgaccttcatgttctgggccaagtggctcggcaagatcctcgccatcgccaatagcggcgaggaggacgtcgagctgacggtcagtacgtcggaatgggtgtcgctcgggctcatgaccgtgctgacggtcggctgctgcgtcggtttcccgctcatctcgcaggccgttgtcgtcccgtacctttccagcgtcttcaataacgtgtctgccgccatctcgagcagcgacctgtggatcatggcggttatcgccatcgtcatcgcggtcgtgttcctcgggttcaccggcgcgaccaagaagaaggtcgtccccgtatacatggccggtatcggcaccgacttcaaggaccgcaagttcctgaactccttcggcggcgagctcgaggctacgcagcgcaactggtacatgacagagttcttcgacgagaagaagatgagcttcgtcggcatcgtcgtcacgctcgtcctgctcgtcggctcgttcggcttcgccgcgcagaccgtctctgcccaggaaaacgtcttgaacgacatcaacgccgagcgtgcgtcctacgagcagagcatctgggcgcaaggcggcgccgacttcccgctctacatgcagtactaccagtactatcagagctattacgagcaaaacaagtccaccttgcagcagcagatgaacgtctacagcatggacgagttcatgaacatgctctacatgcagatgtactcgcagcagatgtccaactcctccagctcctcgagctccacgggcggttcggattctgcgggcggcgcgtctgacacatctgatggagctacgtctactcagggaggggggatgtaaccatggaactctttggatactctatctggagcttcgtcggcatggccgccttcctcgtggtgggccccatcgtcggctgcctgctcgccggtctcgaccgcaaactctctgcaggcatgcagggccgcgtcggtccgcgcatccgccagccctggtgggatttccgcaagctgtggggcaaggaagacgccacggtcaacggcgcgcaggacctgtacgtgtggctgtacctcatcttcatcgtgctcgccggcatggcgtttttcgcaggtgccaacttcctgctatgcgtgttcatccagacgcttggcgcgctgttcttgatccttgcgggctatgcgtcccgctccccgtatgcagagctcggcgcgcagcgtgagatcgtgcaggtcatgtcctacgagccgatggtcctgctcgtcgcgattggcatgttcatggcgacgggcactttcgaggtgaacagcgtcctcaccgctgacgttcccatgatccgctggctgccgctcatctttgccgggctgctgtacgtgctcacgatcaagctgcgcaagtcgccgttcgacatctcgatggcgcagcatgcgcatcaagagatcgtccgcggtatcgtgaccgagttctcgggcaagacgcttgccctagtcgagctctcgcactggtacgagacggtcatgttcctcggctggatcggcatgttcgccatgtggggcggcggctgggtcgccgccgtggtcgcagttgtcgtcgcgctcgcggtctggttcctcgagatcgtgatcgacaacaacttcgcgcgtgtcaaatggcaggccatgctcaagtccgcctggtgggtcgccctgatcctcggcggcatcaacatcgtctatctcatcttcgtctaaggaggtgccgtaatgtcctatgtaagcaaatccccttgggtcatccactacgatggctcgagctgcaacgggtgcgatatcgaagtcctcgcggcactgacgcccctctacgatgccgagcgcttcggcgtcgtcaacacgggtaaccccaagcacgccgacatcttcatcgtcacgggcggcgtcaacgcccaaaacgcgcccatcatcaagcagatctacgaccagatgctcgagcccaagatcgtcgtcgcgtgcggcgcgtgcgcatgtgggggcggcgtctaccagagctgctacaacgtcatgcacgagggaacgcgtgccgtgatccccgtggacgcctacgtcccgggatgcgccgtcaaacccgagtcgatcatcgacgccgtcgtcgctggcatcgacctgctcgaggagaaggccaagaaaatgaagaagaacccggcggataaagaacgcaccgacgccgatgccggccatggcgtgcacgcgtcggtggcaaacgtcgacgacgtgccgggcgccggctcggcagacgtgcgctagggaggtgccatgatccgtttcgagaaacctacgtttaccaacgtcgacctggcggacgtcaccaagatcgtcgccgactacaagagccgcggctacggcttcgtccagctgtgcgcgagcacgctcgaggcctcctgcgaccttttgtacgccttcaccgaccccgaggccgccgagcccggcatgatcggcatcatcgccaacgtgcctgacggcgtgcgcgtgccctccatcaccgagtggtacccggctgccttcgtgttcgagaacgagacgcacgacctgttcggcatcgacttcgacggcatcaacatcgactttggcggcaacttctacacgctttccatggactatcccatgaacccgcgcgccgccatgcaaaaagaagcccagcacgaggagaaggaggcgcaagatgagtaagcgcaccgtcgtgccctttggcccgcagcatcccgtgctgccggagcccatccacctcgacctcgtgctcgaggacgaaaaggtcgtcaacgccatcccgcgcatcggctacatccaccgcggcctcgagaagctcgtcgagaagcgcgactacacgcagttcgtctacgtggcggagcgcatctgcggcatctgctcgttcgggcactcgctgggctactcgcagtgcgtcgagcagctcatgggcgtcgaggtcaccgaccgcgccgagtacctgcgcgtcatcttccacgagctctcccgtatgcacagccacatgctgtggctcggcctgctcgcggacggctttggcttcgaggcactgttcatgcactgctggaggctgcgcgagcagatcctcgacatcttcgaggagtgcacaggcgggcgcgtccttttctccgcctgcgacgtcggcggcttcaggcaggaggtctccaacgagacgctgcgcggcatcgtcgtcgtgctcgaccgcatgcgcgacgagtaccgcacgctgtacaagaccctgctcgaggactcctccgtcaaaaaccgcatggtcggcgtgggctacctttccaaggagcaggcaatcgagtactccatggtcggccccttcggccgcgcctcgggactcgagatcgacgagcgcctgaggggcctcggcgcctacggtgagctcgccgccttcgagcccatcgtctccacgcagggcgattgctacgcccgctgcgacgtgcgcgcgcaggaggtcctgcagtcgatggacatcatcaaggagctcgtcgacaagatcccggacggcgaggtcatggtcccggtcaagggcaatcccaaagacggcgcgatggcgatgaccacggtcgagcagccgcgtggccaggcgttctactacgccaagggcaacggcagcaagttcctgcagcgcatgcgcatccgcaccccaacgagccagaacctcgccggcctggtggccgcgctgtccggttgcgattttgccgatgtgccgatggtcgtgctgaccatcgacccgtgcatcagctgcacagagaggtaggggagatgggcgtattcaaacttggcggcatgacgcttaagagcctgttcaagaaggccccgacgcgccggtacccctacgagaagcgcgaggacttcgcgcgtgcgcgtggtcgcatcgacatgatcgacatccacgactgcatcttctgcggcatgtgcgagcgcaagtgcccggctgactccatccaggtggaccgtgccaactccaagtggacgtactggccgtacaagtgcgtggcgtgcgattcgtgcgtgcgcgcgtgtccggtcaacgacatcgagatgctccaggaccgcgctcccatcgcaaccgacatctcggttccggtcgtctacgagctcacggcagaggaaaaggccgaaaagaagcgcaaggaagaggaaaagaaggctaaaattcttgcagccaagaaggcaaagcaagaacgcgaagccgcggagaaggccgctcaggcacaggccgagaccgcgtctgacaagacttccgattctgcgagtgagtgattagcaaacattgaaggcattcgaagaacagaccgttccagaggaagagatactcgacaaggtattcacggccccgaacatcattaccttcatcaggctgctgatgctcccggtgttcctctggctgctcttcggtgcccgccaggaggtcgcggcggtcgtcgtgtacgcggtcgccgcctcgacggattgggtcgacgggcaggtcgcgcgccgcacccaccaggtctccaaactcggcaaactcctcgatccgacggtcgacaggctgctcatcgccgtgggcgtcatcgccatctgcatcctggggcgcctgcccctgtgggtgctcgtctatctcatcgggcgcgactgcatcttgctcggcggtggcaagtacatgctctcgacggtcggcaaagtgccttcggtcgtttggctcggaaagttcgcgaccgcgtttctcatgttcgggtttgccttcctgctgctgggcgcacccgtcgtctccggtctgggcatcgttggcgcccccgcatggcttcccggtttcggcccagagccttcctacctcggcatctggctcgtgtacgcaggccttgtctgctcggtcacggtgttcgtgtactacctcgtgcgtgcgtaccagatgatctccgcatggaggagtgaccgcgcgtaacgttgcagcctcgtgacactttgcgcgaaactgcaattcggcgtatgtgcctgcccgtttggtggtattctccaatgctacatgtacaggctgctacgggagaagaaagcacgcgttggcaaagctcactaacataaacaatccgctcggcccccattctgggacaccccagaagaaggtccacaaacgttctgcgaaaagcgcgggcatcagcccgaaaaaacccgtacagcaaaaggcacagtccacggtcaagaaggtccatgcaagctcaaagtcttccgctgcacacccggcgccgtccgagcgcaacaacgtgcgctcggcgactgccatccgaaagccagtcgagcgctcccgcgccacggccaagcaggcgccttctaagcccgtgcgcgctgccgcgaaaaagccaggcgcaacacccgctgccaaaccgcagcgcaagcctc

SEQ ID NO: 588 - DNA, 3325 bp, Unknown
  16S sequences of unknown bacteria
atcctttgccagtgcagtggattctgccacgctggaggaaaaacgccgcctgctgcgcaccatcgtcaaaaaggtggtctgggacggcaaaaatgcctatgtttacctctttgcggaggacggagaggcggatttgccacccattgaccaacctatgtatccgttaggagaggatagcgaatgagattctgatgtatttccgctcgcagaaaaagctgcagggagaggtatctctgtctgattccatcgacacggatcaggacggaaacagcctttcgtttatggatgtcatcagtgtggacgacaccatgttggaagatttgagcgccagtgagactcggggggtactgcgctgcctggtacagacctgcctaacgccgcgggagagagacattgtggagcagcgctacggtctggatgggaaaccgccccgcactcagcgggaaattgccgctgcctgcggcatctcccgcagctatgtatcccgcctggaaaagaaagcgctggaaaagctgggcagggaattcgagcggacgcagaaatagaaatgcagcagcctgaaaaacggctgctgcgaagtcaggggttggattccggaaatacggggccatcgtttttctttttttgtgatttgcggagctgttgctcagcgaaggctgcgccgtacgcgatagcaccggctccgaatttagcgcggatctgatccatggcgccttccaactgctccgctctgtgttcctgttcggaggaaacggcggaaaacaggttcagctgttgagaccactggtcagcaggggcgaggttcagagcggtgacggtcagcatgcggatcgggtgaggcatttgccaggaagagtgcagcagttccatgcaggctgcggtgatgtcccgggccagatgggtgctgtgcggcagctgtttttgccgcgtgatggtacgaaaggacggatcgcggatcatcacctgtacgccggtgcagtacaggccatgttggcgaaggcggacggccaccgtatccgacaggatggtaatatggcgaaggacgtcctcccaacaggttaaatcgtggctgaatgtggtgccattgccgacggatttgaccggggcgcgctcgccgtaggggcgcaccggggcgtgttccagtccgttggcatattcgtaaagctgctgtcccatcttgccgaacagctcctgaagcattgcggggctggactgcgccagctggccaatagtgtcaatcccgtactggtgcagcgttttggaagcagtttttcccacaaacagcagcgacgacactggcagcgggaatacggtttcccgccagcagtccggggaaagaaccgtggtggcatccggttttttgtaatcgctgcccagtttggcaaagatcttgttgaaggacacgccaacggagcaggtcagtccggtttccttccgtactgctgcacggatttcatcggcaatggccttgccgttgccgccaaacaggtgcatgctccctgtgatatccagccagctttcgtcgatgctgaacggctccacaaggtcagtgtagcggccataaatggcgttgatttgcttggagtatgcgctgtagcgctcccggtggggcggcagcagaataagacccgggcattttctgcgggcctgccagatggtttccgccgtaacgacaccatattttttggcagcctcgtttttggctaaaataatgccgtggcgggaggtgggatcaccgcatacactgtctcttatacacatctgcagaaaagcccaggtccgggagcgggcctgggcatgagttcatcgatgcagcaagggcgataagggcttgtagatcaaaaaggcaatcagcacatccagcatacctttggcgaaggtaaacggcatattgaataccagaaggcactgtagcaggttatctacaaaaggaaggatcaactgatacataccgatgatgccttccataggcatgaaaacggcatagatgggatacgtgataaaatagttcagcggtacactgagcacagccatgattgccgagccaaccagcgaaccgagaaaggcgcctttgcggttcttcatttttttgtatagaaggccggcgggaacaacaaatgtgacgcccagaaggaaattgcacagttcgcctacgccgcccgtgctggtatgggtcagattgatcagatttttgaccaggcagacgaccaccccgtagacaggccccagggaaaaagaggccagaagggccggcagctcggaaatatccagcttgatgaaactgggcataatgggcacgctgaactccagaaacatcaatactgccgctacggcggacagcatggcggtgactaccattttgtgaattttactctgtgtgttggtatgcatatggtcaattcccccttttcttattgcaggcacaaaaaaacacccgaaaggcaagctttcgggcaaacggatacaacaccggaacggtgtgccagatcgtttcttccatccagactgtcactgtcggtatcggagttgcaccgattcagcacgcaaaaattatgcggctcgcggactgtaccgccggtcgggaattgcaccctgccctgaaacgcttctttctttgtggacacagtatagcgctgacagacggaaaatgcaagaggcaatgggtggaaattgtaaagaaatacagaaaaatggctgggaaaagcgggaacaggcaaggggattgacgcttgcaaaatagaatgtatgtgctataataaagaaaaacaagaataatggaaggggaggagcgcagcatgcggggaagacagacagcctgcgcatttacaggataccgccctcagaagttgccgtggctgagcgacgagcgcgacccgcggtgcgcagatttgaagcgacgtctgcgcgcagctgttgaagacgcctgccgctgtgaaatggagcattttttgtgcggcatggcccagggctgcgatttgtattttgccgaactggtgctggaaatgaagcgggactggccagaaatcaccctcgaagcggcggtgccctgccctacgcaggcagatggatggcctgcagaggacagagtgcgccggcagcggcttttggcggcgtgtgattatgaaaccatggtgcaggagcgctacggcccaggctgcatgatgcggcgcaaccgttatatggtggatcatgcggctatggtgatcgcggtttatgacggtcagacgggtggtacgcagcgaacggtggaatatgccctgcgtcgatgtttgcctgtagtgttggtgccgccggtggaagaaagcgagtatgcccgccgctgaac

SEQ ID NO: 589 - DNA, 3871 bp, Unknown
  16S sequences of unknown bacteria
cgcgcctggcccaggccgcggcgcgtctgctggctgcactggccgggcaggatgctgcaccaccgtgaccggcagcccatacgggtggcggggatgcagcagttttagaaaaaaagggggcacgacgatgcagacgacagaagccttataccgctacgcccgcagccgcgggcatgccgtttaccgccgcccgctgcggcatacccgggccatgtccgtccggatgccggatgggcgctgcgccatcgccatcagtaagctgcccttatccgtccgcctggagcggcgctgcctggcccatgagctgggccactgcgagacgggcgcgttttacacctaccgcgcccaggctgcggagattaccagctgcgagctgcgggctgagcgctgggcgatctgcttcttgctcccgtatgatgatctctgccgccagatcgcggcgggcttgcagatcccccatgcgctggccgagcatttcgaggttccggaagcgatggtgctagacgccatcgcctattacaaggccatcggccttgctgtcccagcgcccgccctatcgcccggcgcgacacagccgtaaaggtctgtatggcccgcaggagacgggactcctgctctgcggccagccgggcaagccgctcctgtgcggcgggacggggagccaatccgcccttttggaaatgcctgcccagttgcccgaccgccacgaggcagggacggccaacgtccccggcatcgcgggtctgcttgctgggctgcagtatatccgcaacaccggcgtggagacgatcctgcgccacgagtgccagatgcgggagcaggcggcgcggctttgcagccggtttgaccggctccgcatcttcaccggctctccgggcacccaaaccggcgtcctgagccttgtctgcgcagggatggatacggaggacctggcccagtgcctggccgcccgggagatctgcgtccgcgccgggcttcactgcgcgcccctggcccaccggacggccgggacctttgagacggggacggtccgcctgagcttcagcgccatgaaccacccgtggcagctgtgcgccctggagcgtgcccttgcagaaattctggaataaccgatgagaacgcgcctgtgcgggagccccgccgggcgcgatttttgtgccctgggtttccggacgggggcaggggacacaaaaaattcacgcatttgcccttgctattaccgccggtttgggctataataatttatgattacaattgcggccaacggggccaggcattgtaaaaaaacagggtaaaggtggagaagcgacggtgcgcgtgattttaaattatttcagcgaatttctgcaaatgatccccaccatcggcttctgggatattctggatatccttgttgtcgcctttatcgtatacaagggcatcaacatgattcacagcagcgccgcctcccggatcatccggagcatcgtcgctttgcttctgctgacggcgctgaccagcattttaaaaatgcggtcgctgaactatatcctcgataaaattctcgaattgggcatcatcgccctcgttgtcattttccagccggagctgcgccgggcgctggagcgcttcggcggcagaagtctgcgctccatctggcagggtaagccccaggtgagccagtatgagggcgtcatcgcccaggtcgtcatcgcctgcgagacgatgagccggcaaaaggtcggcgcactgatcgtctttgaacgggagacttccttgagcgaatttttcaaaacaggcacgatcctcaacgcccaggtctcctcggagctgatccgtaatattttcttccccaaggcgtcgctgcacgacggcgcgatggtcatccaaggcgaccgcatcgccgctgccggctgcgtgctgcccctgtctgagaacacgcacctgagcagcgatctggggacccggcaccgcgccggggtcggcatgagcgaggtatcggacgcggtcgtcgtcatcgtctcggaggagagcggcgcaatctccgtcgcccagggggggatgctcaagcggcacctggccccgcagatgctggaaaagctgctgcgcaacgagctcatcgccgacgaggcggactgtcccggcggcgtaacggcgcggctgcgccggagattcggcaaggatggggagcggcatgaaaagaaataagattccccggattctcctggccatgctcatttccgtttttctttggctctatgtcgtcaccgtggtcgatccgaacgacacgaaggtcgtctatagcgtccccgtgacgtatgagaacatgacgtccctgacggacaacagcctcgtcatgacctccggtcagaacgcgacggtcaccctgaaattctacggccgccggtccgaccttaataatctcaccagcgagagcctgacggtcacggcggatgtctcccgcatcaagagcgagggcgagcagaatttgcgctacaccgtgaccctgccggactcggtctccgacaacaacgtccagctgacagagcggaccccgtcgcgcctgacggtcgacgtcgagcgcgccgtggaaaagcaagttaacgtcgcggtggacatttccaacgaagtcgctgacggttacgtcgccgatctggaggcgatgaagatctccccggagaagattaccgtctttggccccgaggctgaggtctcaaagatcgattccgcccgagtcagcctggatatcggcggcgtcacagagacggtggacaatagtttcccctaccagctggtcgattccgacggcaacgccgtcgacacgacgaacttccgctgcagcgccgacgcggtcgatgtcatgctgacggtcgaaaagtataaagaaattccgctgacactggagctcaaagctggcggcggcgcaaaggaggaaaatgtcaccgtcacgctgtcgcccgcctatatcaccatctctggccccggtgctatcgtcgatgcgatggacagcttgtccatcggcaccctggatctggcgtcgatgacggagctgtccgagacgaaaacctatgacatcaccctgccggataacgtgacgaacgtctccggccagaaccaggtgacggcccggatcgtcctaaacggcctgagcaccaagacgctggaggtcgaaaacttcagcgtaagccacaagccagacggtctggatgtcgccatcgtcacgacgaccctggagatcacaatccgcggccccagcgacgagattgaagctatttccgccaaggatctgaccgtccagggcgacctgtcggatttcagccaggcggggacatataagatccccgtgacggtcacctccaaggatttccccggcgtcgggatgattggctctgccagcatcaccgtgacgctgcaatagcccggcgcccagcaagcactagggcccaaaattaagccaagcataccaagcctcaagccaaggaaaggaacgcagcctatgcgccagcaggtggaagtgaaaagtgtcggcgccgatggctacgcccaggtcgaagcagtccgccgcagcgcctgcagcggcgactgcgaccattgcggcggctgcgcctcggcgaagcagcatgttcttgtccgggcgaaaaaccccattggcgcggccgtcggcgatcaggtcatcgtcgagacaagctcccgggccattttaggcgcggcggctgtcgtctacctcgtgcccctggcgctgctgcttttgggctacggcctggcaagtatcctcggcgttgccgtatggctctgctgcctggcggggtttttcttgggcgtcttgctggtcatcgcctataatcgctacgtgacaaagcacgggcggctggaatttacaatcaccgccttc

SEQ ID NO: 590 - DNA, 28743 bp, Unknown
  16S sequences of unknown bacteria
tactgttgtcgtattcccttctgaacgcttcttgcggaatgctcgtagcaaaccactttgtatcgtcgtttctgctcgtttcgtagtccttattcgtcgtgccgcctacagcctttttaaactcttccgcggtaagcgtaacgacttcttcgtcgtcgccgcggcgtttgaaaatatcgatctccgcgttatcccttacggacaattcgtagcagagttcctgcgaatcgctctttaagtccgcaatctgccttgacggtttgattttgtcattgaacataaagtaggcaaagcccgcatactcgccgttttccggcattctgaacacgctgcccatacccgaccgtttaataaacgcgtcgctcgccaccttgattttcgtatagccaattttcggtttcatatcggcggcatactctttctctcgccactcttccgccgctttctgcgtttcaaagccgtatctgccttgctcccaatcgcccgtttcggtatggtaaccgatcgctacggtataatctccgttctctctcgccgtgcggtcgatgattgcaatatctctgccgttgccgtctttcgagatacttacgactttatctccccttgcggttactttcgtaaaatcgctcaatgttctgtcctccttgtctaattgttctttgaattctttaagatgcattgtaagtcattttacgcctttttcattctctcatgcaattcgactgcctcatcttttaagtaagtaacagtatcgaaattaccgtttttataaaacttccaatctgtttccgcattacaattcggacaaataactctgaccggttgacgaggttcatattctatttcgattttctgtccacataatccgcaatatttttcggctttcataattttcctccgctaattttccaaatccttaatcactttaattgcaacaccttgaattttacattcatctacaacaatatctttcattcgcttgttttcggggtgaagaacgattacaccgttttcattatcggggcggtaacgttttaaggttacttcattatctacaagagcgactacaatatcgttgtaatttgcttcttcctgctgccgaacgagaacaagatctccgtcgtttatcccggcgtctatcatcgaatttccgcttgccgtaagcaaaaaacactttttcgcgtttcctacaaacgatgccggaagccgaacgtatccgtctatgcactcatactcttcggaaagcggaccgcaaggaacatatccgagttttgctaccgatacggttctttccgttctcgattgctcgatagattcgtatccgtattctcccctcgctaaaattccttgctccaccatatactccaagtatctttgcactgaactttttccaacgtccaacgcctcggcaatatcgcggatggtaggcattctcccccttctatcgatttgctcttcgatatacaacttaattctgttcactaactcattgtctttcgttctcattttgtgatggccctcacttttatctatttgggacacttgtccctgatagcgaaattattataatctattcggggaatattgtcaagggtattttaggcataaaaataggggtgtccgcactcgcagacaccccataaaaaccttgacagtattctattgacaaacaaaagttacaaccctattggagaatttcacataaggcttgccctaatcgatgagcctcatcttctgtattatccttacttaaagaaatgcggattgtccctttcgccacactttcatccatatcaagtgctgacagcacatgtgaaatctgagtattcacactatcgcatgctgcacctgtggaaatcataatccctttaagatccaacctatgcaacaactgctcaccatctcgcccggggaaagatatgctcattattccgggctttctttctttatcacaattcaatacgaaatcaatacccttaatttcttctaagacaataccttcaagtttttttatgtataaactattagcttcaatatggtcgcaattatttttcaacgcaacagccattccgacaattgaagcaatattttcagttccagcacgctgtctgaattcttgatctcctccattgataagaggtcttatgcttgttcctttttttatataaagaaagcctattcccttgggaccgttaaatttatgagcagaggctgataataagtcaacccctaagtctttaacatctatttttatatgtcccatagcctgaactgcatcagtatgaaaaatagtcccttgctcatgcgctatagcactcaactctttaattggctgaaccgttcccaactcattgtttacgagcataacagaaacaagttttatcttgccagatatatgggttgcaagacatcccgccgttactataccatcaatgtttggctttatgtattcaacatcatatccggctcgctcaagctctgcgcaacttcttaagattgcatgatgttcgattgcagaaacaactatttgccctaaattcccattctgagcaatccctttaattgcccaattatcactttcgctgcctcccgacgtgaaaaaaatttcttcaggttcagcatttatacactctgcgattgtttgtctggcacttttcaatgcttttttggctgcgcgcgaaaaagaatacggctgggaagaattggcatattcgttcaataaatatactttcatcgcctcaaatgcttcaatatctaactttgtagttgccgcattatctgcgtatatcatttgtttcatatagcctcacttaaataacgtacacccgtcttctttgaattcttctatttttatctttaaatcatccacagagcaatcaaaggtatccgctaaacattccaagcaacaaaattcttgtagctctttactcaccaactttttgttgagtgctactgtatctttatctaataccgcgccacaatttttacaattatttgttttcacgatattgctccttaattgttatatccggtattgtttttcctccaaattcacccctatccataataccaagctgagtttttattactcttctcatatcttttgccggctcaagacaataggtttcaaattcgtcaatgttgactttgctgacatcggttgcattggggaataacagttttaaatacgcagtacaaatacgcttaattgcttccgtatcacgagtagcagaatttttaggcagttcgataagttgatcaactacagcacgatagcataactcatcgcgcaacatgtgaacaatctcaccaaaatattccgtgtttaatgcccaaccgttcgcttttaaactctctttcatcttaggaatatcccagcctttgataaatccatgaaatctatctaataatgctgactcgtgaaaaatctctggtaaatcagcaaacatattctgattttcatccatcaattcagaatctatgttcccaagcaatatcagccctgcatcacctacacctctatagtctcctacacggtattcaccactttcaagatacccctttaatgccccttgcatttccagtgaatcagtaaacttgatgctttgtatttcatcaaatgcgacataatcatagtgtgaaaccaatccttgcgaccgtttactaatatcataaaacatctttgctcgcgaaatgctcccgccactaacaagccagccatatttgctaatttgagcaaaaacatatgattttcctgtttcctttggtgccagttctattaaattcaaccttttttctataaaaggcaaaattcgactaagcatcgttaatttttgtttttttgttacataccctttgggattatagtcaatagccccaagcataatatctatccattcatcaatagtaaaataatcacgcgcctcaacataataatctatcatatattcgctacgcaaaatatcgtaaagaatagttgggctaaatcgatttttatctcttataaatttaacaatctcttcgtacataaaaattcctctaatcataaatatatggacattataccaaaagtctcggatgatgtaaagaaaatgatgtctgctaaataagacaccgatacaacaacaaatcctaaaaaatattttttaggatggtgctaaaatgtagggcaaacctcccttaaaaaatggctaaaatcagtatgttgtaagttcaaaccttgatttttcaaaaaaacgccaaaaatcagcaatgaaatcgacatggtcaactaacatatgttgaccttaaaattaccatcaaaaatgggcaaaaagcatacaaaaagagccaaaaacaagcgtttttgactcttttttgaccgaatcagtaatttcggtcaacgtagatggtgcggatgacaggacttgaacctgcatggtctcccacaggaacctgaaacctgcgcgtctgccagtttcgccacatccgcatataaacctttactttaagaagtaaaggtaaattttcaattcataaaacttcgtatttttctaaaactccgttttcgtttatgagtcgatatgcttttccgccgctcgaaagacttccgacaatcctttcatcttctatcaatagagccgcattgtcctcaatcccataagcacatttataattatagcatacaattttatcaaagtcaagcattctttgtccataatgcggagaaattattccttttatccaatttaatcctttgaacatagcataagccgttccgttttccgttttgagagaatcggtataaatatcggaaaaccaacaaattgctcctgcggacaagcccgccaaaggaattcctctctcgtaagcatcttgaatcaaagttaaaagccccgtttttttccaatgttccatcataaacaccgtatcgccgccgcccacataaatgacgtcggctttcaggaatttctctttgattttctccatatcgggttctttgtagacagttaagaccacgtccgtcttgatatcgaacattcccgtatagattttatgaaaagaattataatacggcataaaatcatgacttgccgtaggaataaaaagagcgtttgcccgtcgatccccggcatgttttttagccaactccgcaatatattcgtctattttcagtgttgttttttccctgatttccccaccgccgattgcaatgattcttttcatctgtttatccttttcgagcggcaataatgtcgtctacctgcccgataattttttgagttttttcgagagcctcccgaacataccgttcagtttcttccgcatcggcgaacgcatcgtccgaaagttccgacaaaagattcgcgatcgcgtcgagtccgcttgccacaccttcgaaaaccatgtcttttcgttcgtcgacgagccgcagcgcattccacattgcctcttcggccaaggaacggagttttgccacttttgcctgattaaaaagcccgttgcgacttttatccctttcgtcgaggacgacttccaatttctttttcaaagtcaaacagctctgcctgaccgccgaaggcgttaaattttttctggattttcttttaacaaaagccagtaataacaacccagcgacaatcagaagaatataccagccgtattgtattgccaaacgaaaggcgttttctccgatttctcctgcagaagttccttcggacaaggaatctgacgcagataaaagaacattgacaaattcatttctcatcatgcgccctccttcccgtttacgacatgtatatccaattgattatagggaatttcgattctgttctttcggaaactttccaaaattccttcgagcaaatcaaacttaacgctccaaaaatcgtcgggatttgtccaaacgcgcaaggtaaaattgagagcgctgtctccgtagtcggtcaagcgaaaaaagggtgcggggagcgctgaaattctcttatctgcctccacgacttccatgactgtccttttgacttccgagacgtccgaatcataagatacgggtaaaaggatttccaagcgacgaagaggcattctgctgtaattgatgatgaccgaaccgagaaccgtgctgttgggaataatgacggtaaggttgtcggtagtcacgactttgaccgagaacaattttatttccttgaccgttcccgacgtgccgccgatatccacataatctcccgcctggaagggctttgtaaaaatgagcagaataccgttcgtaaggctagaaagcgtatcctgcataccgagggcgatggcgagcatgacggaggaaaaggcagccacgattccagcggtagaaaaccccagagtttttacgagcaccaaggccaaagccacataggcgattaaagcaacgagagaagtaatgaaagtcgaagccgcattatctaacctccgacttttaacggagcgttttttcacgcttgaagtcacgatccgaatgatcagtaagcccaagacgaataaggccaacgctttaagaatattcaagccgtaaccgctgagaaaattccaaaaaaaatctttaaggttattccaaaatttttccatgaactctttaactctttcctttacgtcgtatgtaaaatccctcgtttgcgataagagtccctgccaaattcgcagggactcttatcgcggaaaagtaccgttttaccgccctctttactttgtaccgaataacctgtcgcccgcgtcaccgagtccgggaacgatataacaatgctcgttcaaaacaggatcgatagcggcgacatacagatctacgtcgggatggtcagccaagacttttcggattcccgtaggacaactgacgatgcaacaaagcttgatgttcttcgccccgtgtttcttgatcatagcgatcgcatcggaagcacttccgcccgtcgcgagcatgggatcgacgacgagaagcgttctttgttcgctgtctgcggggagcttgcagtaatattccacgggctcatgtgtttcgggatccctgtaaagcccgatatgtcccactttggcgttgggaatgagctccaatactccggagaccataccgagtcccgcgcgcagaataggcactaccccgaccgtgcggccggagaccatcttgcaatgcgcggtcgtaatcggagtttcgacgtccacatcttcgaggggaagatttttcgtcgcctcataggtttccagcatggcgatttcttccgccaactccatgaactgctttgtagtggtgttcttgtcgcgcaaaagcgcaagtttatgctcgatgagcgggtggtctaccagatgaaatctggggttgtcgaaaaactcgtatttttccataagtattgtatctcctaacttattcttttgcatgtcaagcccgctctgcggcgttttatttgaaatatttttcttcgatcgccttaatcttcgcgattctgcggtcatggcgttcgccgcccatgtattcgctcgtaagaaacgcggtgacgatttcttccatcatgcccgtgccgagacatttttccccgaaagcgagcatattcgcatcgttatgataccgagtatactttgcgcaataagtatcgtgacaatgcgcgcagcggacgcccagaaccttattggcgacgatcgaaacgcctattcccgtggaacaaatgacgatacctctgtcgcattccccgcgggcgacgctttccgcggcaggcagagcataatcgggataatcgcaggactccgtactgtccgtcccgaaatcgacgtattcatagccgttttttacgagatattctatcaacgcctttttgagattgagtccgccgtgatcgcaggcaatcgcaattttcataatttgttttctcctttttcgtctttcattataccatatccccccgttcctttcaagtatttaccgcaaaattttctcgatttgcgcatttattttttctttttgaccgcagacgttttcttcgcaggtgttttctttgccgccttcgcaacaactttgccgcccacgcccgatgctcccgcggtttttgaaactctttttctcggttttgcccgcggctttctcgctttcttttctccgtctttttccccgttcttttttctttccgttttttctgcgccgttcttcccgctcttgctttccgtttccttcttttcctcctcgacctttgtctcggtcgcgccttcccgcaattcggggaacaatttttctatgagcgcagacatgcccccgacgattttttgataagtcaggcgatagcaatcgagattctttccgaaaggatcgggaatttcatagcccgctatatccgaaaaggaaaagacgttgttttcaatatccgaaaatcccgcccttcttaaaatattccaccgcatatccatcagaatgtcccgttggctgtccgtcatgcagatgatcgcataggcctttcccagcatatccggatcgagctctcgggaagaaaaattatcgatggataacccgttctccgataataccgccgcggaattgggattgatgtttccgttttccgaagccttcaaccctgcggaaaaaaccgcggcgtcccggatattcaggcgcctgagctccgaacgcagtacggcctccgccatgggcgaacggcaggtatttcccgtgcatacgaatataatctttctttcttccattctcgttcccgccttttagtctatggcaatctccttttttcttttgtcaatgagggatatctacggaggcgcacgcctttttcagacgattcataactcccgccatcacgccgccttgtacggacggctccacggctattaagatatcggcgagcttttccgcccttctcaacaaatcgtaaagatttgcggccatatccctgtccgttccgccgagatttaagacctcagccccgcgcgctttccactccgtagcgagtttttcctcgcataaaaggacggctctgttcccgctttctttctcttttctccacgcttcaaaagcgtctgccgcccgttccgcagagaacaaaacggtcttgcatcggggcgaataatgcttgtacatcatgccgggactctttgcccgttctccaggtttgagttcgggcgcatacacatcgcacgctcccgccaccgaagcgatcatttctctggtaatcagaccgggccgcagaataacgggcctgtctcccgtgacgtcgcaaacggtgctctcgatgccgcccaaggatctgccgccgtccagaatcaaaggtattttcccgtcgaaatcgtccgatacatgcgcggccgaagtgggactgacgtgttttgaaagatttgcgctcggagcgacgatgggaatatccaccgttcttaaaaacgcctgcgcgcctttatgagacggaaccctcaccgccagagtatctaacccgcaggaaacaaaacggctcactttacccgtagagggataaacgagcgtcagaggaccgggcagaaaagccctcctcaattccgccgcatacggcgggtcgtcgtcgataatttttcggatgtcgtaatccttatgcacgtgcgcaatgagaggattgtcgtttggccgtcccttgattcggaaaatacgttttacagcctcgtcgtcgaaggcgttcgcgcccaatccgtacaccgtctcggtgggaatcgccacgacaccgcccgaaaagataatctctttcgcctccgcaagagcttgcggggtaattttttctgttttcgtaatcataatgaggccttttgttcttcctttcaaactcattcaaaaggcagttcgtcgtcggaagcgccgttcgtctctcctccccgcccgcttttgcgggacgagttatagtctccgttttgttcataaggctccccgaatgcttcttccgcaggttcgtcgtcaaatcctcgcggtccgcgggaatattcgggcggttcgtcgtcccgattctgttcgtccacatctacgaatttcgtgctctcgccgataaatttgagctgtacgcgcccctgcgaaccatttctgtgtttggcgatgatgagttccgccgctcccttgacgatttttcccgaagccatttcctcggcggttgccgtcgcttcgggacggttgatgaacatgacgatatcggcgtcctgctcgatagcgcccgactctctgaggtcggagagctgcggttctttggattggatacggcggagctgggacagcgcaatgacgggaacgttgagttccttagccataattttcagatcgcgggtaatggaggcgatctcctgctgtctgttttccgaccccgccatattcgaggaaccgcccgtcatgagctggatatagtcgatcataatcatatccacgccgcccgcgacggttttcagccgtcggcatttggagaggatttccgcaggcgtgacgcgggaggagtcgtcgatataaatttgactttttttgagtttatcgctggccagcatgagctttttccattcggaagcggaaagctgtccggaaagtcccttggccatactgacgttggcatacgagcaaaggagcctctgcacgatctgaatgcggggcatttccagagagaatacggcacagaccttatttttatgcagagcggcatgctcgacgaggttcatggcgagcgaagtctttcccataccgggacgggcggcgagaacgatgaggtcggagggttgaagtccgttcgtcatttgatccagccgtttgaatcccgtctctatgcccttgaaggcgttggcgtccgattgaatggcctcgaacttttgcagcacctgctgaacgatatccccttcgctcatgcccgcgagggaagagcgatccgcctgtttggaaatatcgtataccgccttttccgcaaaggaaatggcgtcgcgtccgtccgcgcccgtcatgcagttttcgatgattttgcgcgaagcgcggatgagctttcggttggtgctgtcccgactgacgatttcgtaataagacttgtaatttgccgcagagggagtaatctgcgccaattcggtgagataggcgattcctcccgccttttcgagattgccctccccgtcgagctcgtcggacaaagtgacgaggtcgatgggcttgcggtcgttgaaaaccacctgcatggcgtgaatgacaaatttatgcgattcctgataaaagtcgtcctcggtaagtttttccaccaattccgccgcgatatcgttgtcgatgaggagacatcccaacagcgccatttccgcatcgcggttataaggcatggtattgatttctgctgccatttctttattcctgtcagtccgtgagtttttcgaattcgttcaaggtatcctcgaattccttcattgccgtttcaaacggcgccttcgaggtgaggtccactcccgcctttttgagaatggagacggggtcggtgcaattgcctcccgaaaggaactcaaagtaatccttgacggctttatctccctccgacaaaatccgtttgacgatggaaatggcggaaataattcccgtggaatatttgtagacgtagaaggaacgatagaagtgcggaatccgcgcccattcgtaagcaatttcctcatcgtgaacgatccccgcgccgtaatactccttattgagcttgtaatagacttcgcagagattctccttcgtaagcggctcgcccgcctccgctttcgcgtgggcgatctgttcgaattccgcaaactgcgtctggcggaacagcgtcgtacggatcatatcgatatagtaattgaggagatacttcttcaaattcttgtcctcagtcgtcgaatacagatatttcatgagcagaacttcgttgaccgtgctggcgatttccgcgaggaatatcgtatattccgacttgggataaggctgccttgaagtagacttataggtgtgaatggaatgtcccatttcatgagcgatcgtgaaaatttcgttcgtcgtctcctgatagttgagaagcacgtacggatgcgtgtcgtaaacgcccgtggaataggctccgctgcgctttccttcggtctcgtagacgtctatccagcgttcgtcgcggccgcggcggaggagattctgataatcttcgccgaggggcgcgagtcccttgatgacgagctcatacgcttcctcaaaaggaactttgatgtccgcgtcggaaacgagcggcacgtaaatgtcatacatgtgctgttcgtcaaagccgagaatttttttgcgcagagaaatatacttgtgcatgacgggaagcgcggcgtgcaccgcttcgatcaggttgccgtatacgacgggactcacgtcctcgccgtccatcgccatatccatgcaagaggcataatttctcgccgtcttgtagaaaatatccttcttgacgtttccataataggtctgcgtaatcgcgtcgacgaggttgatataggctttataatacgtcttgaaccaggtttcccgttcctctctcgtgcccgaatgcaatacgagaccgtacatgccgtggctcatctgcacttctttgccgccgaacttttccttggggagattgaggtttgcgttatcgagcatggagaacaccgtatgaaatccgcccatgacgtcggatgcgagcgccagaagtttttcctctccttcgctcaaaacgtgcgccttggactttgcgatttttttcaaagaatagtcgtaatcggcaaaatcggggtcggagatatacgacttcaacttttcgtcgctgagcgcggtaagctcgggctcgacgaaggccatggcggccatgagtttggagatgagggaactcatcatcgccgtatacgaagtatatttggaaactctcagatcttcgtcgtggcgcatgctggcatagagatagagtttttccagtctgcggaacatcgtatcgcgcagcttgaaaaattccaacgctttggccttatcgcccatttttccctgaaaagcggaaaaatcgtaatcgccgtattccttttcggcggccttatattccgtttcccacgcctcgtccgaaggatagatcacttcgagattccacttatacttttctgcaatttcctttctttccataaacgttttgctccttttgcttttttgtgtttgatttcggcggaatatcgtcttcttcgacgcggcctttcccgccttgtgccttttgcgtctttccgtccgcggcttatcccgccgcgaaattattatatcacgtttttttccgttgtcaatccccgactgccagctttttccgccgtatcgtcagtttttgaaactgtgaatgggcgcgggaatatttcccccgcgcaaaacgaagcggctgctgtcggtggtatggacgggcagaatgggcgcccgccccaaaagtccgccgaaattcacctgttcgcccacgccctttccgggagcgggaataatgcgcacggccgtcgtcttttgattgatcatgccgattgccgcttcgtcggcaatcatcgccgcaatcgtcgtcgcgggagtatcgcccggaatagcgatcatatccaagcccacgctgcaaacgcaagtcatcgcttcgagcttgtcgatgttgatttcacccttttccgctgcctcgatcatgccgatgtcctcggagacgggaataaacgctcccgaaagtccgcccacgcgggacgaggccatgactccgccctttttcaccgcgtcgttgagaagcgcgagcgccgccgtcgtgccgtgaccgccgacctgctccaagcccaattcttcgagaatctgagccaccgaatcgcctctcgcgggcgtcggagccaaagacaagtcgacgatgccgaattccgcgtccaatctgcgcgccgcctcttttgcgatcaactgtcccgcacgggtgattttgaatgccgtccgcttgatcatttccgcggcctccgtaagatcggcgtcaggaatctgttccagcgcgtgcttgaccacgcccggccccgaaaccccgacattgacgacgacatccgcctctcccgcgccgtgaaaggctcccgccataaagggattgtcctccaccgcgttgcagaaggcgaccaacttcgccgcacccaatccgtctttatccgccgtgagagccgcggacctcttgaacgcctcgcccatcatcttcaccgcgtccatgttgattcccgaacgggtggagcctacgttgacggaagcgcagagccgtcccgtcgaggcgagcacctcgggaatggtgcggataaatttccgttcgtaatcggcggtagacttatggacgagcgcggaatatccgccgaggaaatcgatccccaaagcgtccgccgccctgtcgagcgcgcggccgatcaagggcgcttcttcgggaaacgccgccgaaatcaggctgacgggagtgacggacactcgcttgttgacgatgggtatcccgtattcgcgggagagatcctccgccgtctttacgattttttccgcgcggcggcatacgaggtcgtataccctttgcgccgtgtcctccgccgtatcccgaatgcagggaaagagggaaattcccatcgtgatcgtacgaatgtcgagatgttccttctcgaccatgtcgatggtttccaaaacgtcgaatttcgtaaacatctttccacctcagacgttatgcatcgcgttgaagatgtcttcgtgctgcatatataccgacatgccgattttctttccgagctccgaacactcctttgcgagcacggaaagctcctccgtcgcctccgaaagctccaccagcatgatcatggcgaaatattcgcccaaaatcgtctgagaaatatcttcgatgtttgcgttcttttccgaaagaaacgcgctgattttggaaataattccttttttgtcctttcccgtaaccgttacgactgcacgcattgcgttttttctcctttgtcaatctttaatttttttgttcttcgtctgtctccgcaaggtcgtccgccgaatccgcagcgtccgatcggggttgcacgatcttggactcagactcctcttcgttcacggcgccccgattttcttccccggcttccgtttcgcccgcggagtccgaaccttcgtcctcgaagtattcttcgtcctcgtcttcctcgtcctctgccaaagcgccgcgctcgacgatttcgtactggacgatgaaattgctctgcacgatgtatttcacgaggtcgcccctatgaaaatcgggcaggggcttttctttgtcgaaataggcttcgcgttccatccattcgctcttttttctgttccaggtcttgaatacgcaggaaatcacgtccacgtaatctttctgcaattccttttcctcaaagccgacgaaataattctcctccacgtttttgagtccctcggacagatagtacatcatcttgtaatagcggcggacgcggtgatatttgatgcccatgaacgggaatacgaatatcgcgtacagagccgaagcgacgtatacgcatattttggggagagtctgcatcggatcggcatagggcagggagatataataaatcagccaggcgatacaaaacgccgcatagcccgccgtcactccgaaaaaaacctgaaaagtccgctgcttctgcgcgcggattttattgaaatcgctgtcgctgtacaccgttgtcatgtttgctcctttattcggcgataaacaacacgcccaaagtatttcttccgcagtgccccgtgatgaccgagcccgcgaccgtctcgataatttcccggaaatcgaattccgaacgcacccgctctttcgcaagctccacgagttccgcgtccgcacaggaatgcgtgacgaaacagcgggtcttatcgtatttcggatatgccgccttcaaatcgtcgatataagcgcggatgcacaccgtcatctttccccgatatttctttttcacgccgagctgcccgtccttcatatcgatcatgggatgaattttgaggatattggcgccgtacatctccattctcgaacagcggccgcccttataaagatagtccagacgatcgggcacgaaagacgtattgactttcagacggagtgcgtttacccgacgctctatctcctccgcgctcaggccctcgtcgcggagatccgccgccttcatgacgagaagcccctgtcccgacgacagagcgaggctgtccaccacgcgcaccttgccgccgaattcctttgcagccgcaagcgcgcacgaatgagaagccgaggccttgctcgaaatattgaaatgcagcacttcgtcgccgtccttcgtctgcgcggcaaaaaattcccgaaagtcctctatgctcggcgcgctggtcttgggaagcattttcgtcctcgccacaaacgaaaaaatatcttccggcgaaatgtccacgccgtctaaataactgtccgcgtctaaaatcaccttcaagggcataatgccgatatgccgcttctcgacctccgcgccgagatcgcaggtactgtccgaagtaatctttaccatattttttcctccgtttcaccgtaatccttatttcccgtcaggaatagctgattcgcattccgggaatgtatttcagaatttctttatacttgattgcccattcgggcacgattccgtaaatatcgctctccttatacaggcagtcgagatgcgaaagcccctctttatagcggctgtccttactgtttaagcggttgtccccgagaaagaagatctcgtccgtgcccacttcgtacgggccgaaagaatatatttctccgtcgggaatatacggttcgtcgagcgggacgaattcttccgttcccgcatagcggatatatacctcgccgtcctcgcagtataccgtatcgccctcgacggcgatcagacgcttgatgagaaattgcgtattgccgaaatcgtattcgtcgccgtagcttctcacgtccaccacgatgacgtcgccgcgttcggcgtccccgccgtatttcatcaggagctcgtcacccgaatgcagtgtggggtacatggaatttccgtctacgtatacccctccgaacgtattcgtccaataaatgcggaatcccagagccgccgccacgatcagggcgagcacgcaataaaatatcgtcgtcgaacgtctgcttttatatcgatacctgtattcgtacagttctccgtcccgcaaatccttttctttcataattttctttccttttcccctgcgggaattttaacgcgctttttcaagtcgtcgcgcatgagattgattgtcttgccgcaggtcaggcatttcaatttgatgtcggcgcccgtccgcacgatttcccattctctcccgccgcaggggtggggcttcttcatcgtcagaatttcattcaattcgtacatggtatcctcaaagccaaagaatgttcgttatcgcgtattccgtatcctcgtcctcgcaatcgaaacagagcgcacggccgtccgaaaaacttttgagcggagcccccgtcgcctcggctttgaactccgcggcactcaggatcatgcgcttccacttgccgccgcccttgaccggaagcagacagctgaaccgctcgatgcggttttccgaagtcaaaatgtctacggaggctttcagttcgatatcgccgtacgcatagacatcaaattccagcatggcgttttcttcggggacatagcgcggagagctgattttatacgtttcgattccgcccaccgaatatgcgcccttaatgcttccatacccttcgatacgtttgggaattgcctcgcattccaaaaaaatatccgcgaccgaataatcctcgtaattggcgacgctgaatccgtccacctcctctcccgaataaatcacgcggctcttgacggcgccagaatcgggggaggagaatttcttggaggcaattttagaaaccaccctgaatccgttgatatattttgcataagcatatacaaatgcggcggaggctcccctataacgcgacaattcgcaggaaagttttccgtttttgatatttttcccctccgtgcgcacgacacactgccattctctgaaaacggagcgcgtattttcgcccgtttcggcataataaattcccgtttcttccaaaattccgccctcgtcgtattccacgtccgctcgcagtgttccgtcctcgaaagcgagggaaatattcagagctttcggaatataaatttcccgtcccttcaaatgcttttcgagaaataaatccaaatctttcaaggcgttcggaccgatacaggaaccgctgtcagccgaatatacgatggcgctgccgtctgtgcagccgattctcgaataggtatcgtaagcgcgatcataatcgaaagcggcgtcgcgaaacgcgcagagcatgagcacgggacatttcacgaacggagcatacgactgagactctatgcccgcgatatagcgatgacgctcgtcgctcatattgatttcgggattagacgcaaatttatcgatattccgataagcccgccagcccgccgcgttgatgggaaccccgcacttcaaatcgggcgaaagcatggccttccatgcaatttctccgcccgtacggattcccacgacgccgatttccgaaacgtcttccctctgtttcaggtactcgacggaatacagggcgacgtaaatccactcgaaccagcaggtctcctcgacggaaccttccacgcggtcgtagccgcccgccctcgcaaagtccgcataggaaagagagggaggatatatcgtacgcggcgcgctttcgtcgggaatctccgtctccccgctgtaatcgggcatgagcaccgcataccccttgtcgatgaaataatacaaaagctcgtcatccaagggtttccccgcatccggcaaaaggagaacggcggggtactttcccgtagccgacggctttccgaagcgcgcaaaaatccgcacgccgccgtcctccgtcttatgccccgaataggtgacgttccaaaaccgcatacccgcggctttatcctccttttcttcccattcgctgggattcaagggagtgctcgtatcaaattttttccataccgaaacggcacttaaaatcatagttctttcctctcgcgcaccgatcagtacgcctctatcctcagggaggaaccgcaacgatccgttgcgcccgaaacgagaattttattgtctattctatgtttgagttcttctacgtgagaaatcagcccgatggaaaaatgcttgcttctcagcttttccaatacgtccatgacggtatcgaccagtttttcgtccaacgtcccgaatccttcgtcgagaaagaaaaactctatcggtctgagcgatttcgcgcagatggcgccgctcagcgcgagcgccaaggacagagagaccaaaaaggtttcgcctcccgacaacgtccgaaccgcgcggagcattccgccgttcagattgtcccccgccttaaattcgtcctcgtatttgagaaaatacctaccgttcgtgagcgacaaaagcgttttgctcgcggaaacgcagatttcctgcaaatattccgaggcgataaattccatgaatttccctcgcgccgtcagcagtctgagtttgtcccaaagttcccgttctttttccttggctttcaattctttttcgaggcctttatacttctctttgagttctttcaagtgcctgacctcccgttctcccacggcgaccttgcccaaaaggctttccttttccgtttcgagcgttctcttttccgtgcggagcgcgaaaagcgcttcctcggaaaatccgtcgaatctcccgtcgggaatttcagagcgcctctttttcagaacggcatacgcctcgaaaaattcgtcgcactcctcttttacgcgtttcccgtctccgatttccgccgccaaggcccgcgcctcatccgcgctttcgaaaccgttttcggcaagcaggtctttaagcgccgcaagcgcctctctttcctgagccgcatagctttccgacagcgtctttcccgactctctttccgctttcaggccgctcagtttctcctccgccgcccgaatcttctcctcggcacgcttctttgccgctttcaaagtctcgatatgcttttttacctcttccgccgtacctaaacctttgacgcgctcggtcttttgtctcgcgagctcgaaccgttcccgataatgttttccgtcctcgatgatgttcgcttttttccgctcgttgtcctcatacgccttttttcgggactctatcgcttcccgttccgctttcaaacttttgcgggcgtcttcgatccgcttgaattccagctgcgccgccgcgaggtcaaacgcgcgcccgccgtccgccgcggcgtattttttcaaaagcgtttccacgtcctcccgcgtttcgggatatttttccgaaagcccgcgaaggtcgaggcgaaattccccatacgcttccgacacgagaacagacttgaaatggcgacggagaaattccgtaaacgattcgtccgcacccaaggccgcctgcgcgcgttcgttttccgaaatcagagacgcaaaatcttccttcggacatttatctttgatgttgcggtattccgcctgacactttgaaagtttctcctccgcttccctgcacagggcgaggtcctcttccgcgcccgtcaaagcgccgagattcttattcaattcctctatttctttttcgattccgctctcttccagctgtgtccgccgcgttttcagttcgctttccagcgcggccgcgtcaaagcccgctttttccgccttggccgcggcaagcgttctttgtcttttgcaattttccgcaaagtcattcttttcgagtacggctttcgccgcggtgaacttttccgcctttttccgcttttcctcaaaaaacggacgcttttcctccgcgcgggcgagtttgaggcagagcgcgtcgtattctttcttttcctccgcgcggcgttcctcctcgttcagacgcttctccgcccgcgaaaatgcctcggccgcacgcttcaaattctcctttgaaaggcggagcttttcttcttccgccgcgatgttctcgtccgtgccccccgcattctcctgcattttcgtttgcaggagcatcgcttcgttttccgccgcgtcatagcgggaacgaattttcgcggaaagtttatccccgtatttttcgaggtcgaacagccgcgaaaccaattgaagccgctccttgggcgccgctttcaccaagcccgcgaactcgccctgcggcagagcgatacatttcttgaaatcgtcgaagccgagcccgacaatctcccggattttcgcgttgacttcctccgttccttccgctatgccctgcggcttttccccgccgcagtcgtataaaaacgctttggccacgttgttctttctccgacgctcgcgccgcacttgataaacgtgacgttccccgtttacggtaatctcgaactcgaaaaccacatacgccttatcgcatttgtaattgatgctgtccgtgcccgaagaacgctctatttttccgtaaagggcaaaatgaatacaatcgagaatggtactctttccgcttcccgtgtctccgaaaattccgaagaggccggtgcctaaaagttttctgaaatcgatttccgctttctcggaaaaactgttgattccgcaaaattcgagatatacgggtttcatgcaggcacctccttgttcgtttttcgtgctcttaaaattccctcgcggtacttttcgctgtccgcccaaaataccgagtcttaaattaattttatatatttatatacttttaacgccctttcaataccttaacgcgaacgacgtttccgcgttattcctccaactcctggatcgccgacaaaaataacgccgtcagctcctctttcggctcttcccgatattgcgaacgataaaattcctcgaacagctttgaatcggaaaagccctttcgggattgaaattccaatgttccttcctcccggacttcggcgatcagcgacactaaattttcgtgcgcggagagcgacgcggattccgcggaagtgagaggagaggtcaaatgcagccgaacttccgcaagcgattcgggatagagggacaagagctcctccgcgcgggcgggggagtccgcttccagccgcacgagtttacgtcccgacatcagaaatacgtcgcgaagattttccacgcccttctccgtcagatcgaatatcttgacccccttttcgccgttcgcttcgtcgaaggaatactgcaagggagagccgctgtaataacaattccccttgcccatgtgctggcgcttatgtaaatgccccagcgcgatgtagtcgcacttcggcaatacctccaagggaacggcacgggccccgcccaagtcgatttcccgttcgctttccgacgtgacgccgcccgcgacgaaaatatgagacaaaaagacggaaggaagatgttccgtattgccctcctccccttcgtctatccacttcttcatgcgctcggaaaagggcaggtcggatttttcttccttgaatcgggcctcgttcggatagggcagagcattgatgaacactctttctccacgctcgttttcaaagacggcaaaacctttgcccgccctgacggggcggactttcctatgcgaagtcaaagggatttcacgcctcgaattcccgacgatatagatgccgagttcctccgacagcggagcggacgccgataaccgaacgccgtcgtcatggttcccgctgatgagcaccaccgcccgctcttttcccgcgatcgctttgattttggtaaaaaacagatcctcggcctccgcactgggaagataggtatcgaaaatatcgccggcaatcaaaaccaattccacttcttccctgtcgcagatttgcacgatttcatccagcacggcggactgctctttcaggcgttcccgccccatcagacgcttgccgatgtgccaatcagacgtatgcagaatcctcatgcgcgatgcctccgggcccgtcggcccccttcaaaaatttttggaaaaagcaaatcgaaatgtcttgcttttgccggcaaaaaaagctataatggacatacactgaaatttttcagtctgcctatactgttttattatacaccatttctttcgagaaagcaaggaaactgaaaaggaagaacgaaatttttcagataaacaaatcggagcgtctatcatgtcattttgttccttttcgagagagtttaacgagaacgcctacaccgcggtggaaaatcagttcattacaaaatatatgcccggcgccgacgatttcgccgtaaaggtctacctttacggcttatacctctgccaaaattccgactccgattttaacgtattctccatggccgaggtgctcaaaacgacgcgcgaaaaaatcgaggaggccttcgcgttctgggaggattacgacctcgtggaaatcctctcgcacgagcccttcgtcgtcaattatctccccgtgcgttccgccgtcggacgcccgaaaaaaatccgttacgaacaatacggggatttcaacaaggaattgcagcggaaaatgcagcaggtggggaaattcgtctcctacaacgattccattaaatacatgcatttcctcgacgagaacaacattcagcctcaggcgtttctgctcatcgccgagtattgcatcaacaaacagggagaaagcgtatccccttcctacatcttcaacaaggcgaaaaagtttatcagaaacggctggactacctacgaacaggtggaacgcgaattgagcaactacaacgcgcatgagggggatctcatcgcggttttcggcgcgctctccgttttcaaaaaacccgaggaagcggattactccctctatgaaaaatggacggaaactttcggattctccaaaggcgccgttctggaagccgccaaacacctcaaacgcggcaataccgacagtctcgatattctgctcacggaactttccgaaaagggaaaaacggcacaggaggacgtcaaaaattacctcgcggaacgggatatgctcgcttcgctcacgttcagaatcggacggaaactcggcgtgaaagtcagcaatcccgccccttatatcgacgaatataccgaaaaatggtacaactgcggttttgaagaatcctccctctccgatattgcactcttttgcctgcgtaccgaccgcaacgacttcaacagcatgaacgagctggtgagacagctcttctcttcgggaatcgtttcggccgagagcgtggaagaatatctcaaagcaaaaaatgcggagctcaaattgttcacgcggatccaaagtttctgcggaaatctcaaaaagagcgttgcaaatctctcgctgatcgaaacctggcattcgtggaatttctccgacgaaatgattctggaagcggcgaagcgttcggcgggaagcggcaatcccattccgtatatgaacaaaattctgtcagactggaaacactccggcatttcttcccccaaagacatccccgaaaaatctcccgcaagcaacataaaatccccgtacgtcaatcccgccgtcgaagcgatcaacgcaaaggccgaccgcgaaagatattatgcgagactccgcgaaaaagctcaatccgtcgccgataaatatatggcaaaagccaattccgatcctcgctttaaggaaatttccgccgagctttcccgcatggaaatcgcactcgcaaaagcggaagtgtttcagcccgaaacgctccccgccttaaaagaaaagaaagcggctttgacggaagaaagaaagcaacggctcaaagcactcgggattcccgaaagcaaactcgtgccgcaatataaatgcaaaaaatgctcggataccggctttcttccttcgggcgaagtctgcgactgctatgaaaaaaaggataccccggaagaagaattccgagctgtcggaggaagcgcttgaaaactcttataagttttccaaaaaaaattgaaaaaacaggctaaaaacacttgcgtttttttgtgaaatcatgtaatataaaaaggcttccgcaagggaagcccataaaatgcagagatgtctgagtggtttaaggagcacgattggaaatcgtgtgtaggcctgaaacctaccggaggttcaaatcctcttctctgcgccaaaaacacaggaaaaaggcgcaaaaacagtgatttagcattgttttttcgcttttttctttttacagaaatctttaataaaatacttttaccctcatcactacccctttttataagcttgctgggaattggataaattgctttcaggtattttgctttttctttttgaaatttttttgaaactcttgacaacttcaaaaaatggtgttataataaaaacacaacaagggtaaaacccctcagcggttagccttggaaatcgaaaaaacgaccgcgtccagctaccaaactattggcggtcgtttttcattgttacgtagatgtagttcttcgtgacgcgaaaagattttatgtacccgacgctgacaagcagcgcaagaagttcgataagatcatttctcatgaaacgcacctcctttgaaagaagtgctaaccgcctcagagggtatcacccttgttgcttgtccttattataccatattttggaaacattgtcaataaaaaatttcaacgacgccgttttcggcgtcgttttttacgtcctcgctctgatccagaccgccgggcgggggattcactatttatcagctttcccggcagcttcaccgtggcggcagctctcccccgctgacaagctccaacaccgagaaagccgcgagcggctttccgttttccttctaccatatccggaagcccgctcgccggggtttcccgtttctataattccgcttttccctctttttgcgcggtctgggcgcccgcctccggcgccctcgcgctatattatatattacaaacatatataataatgtatgtttgactggggcatttttcaaacttttttggggcagtttttttcgccggaagtttgctttttaaccgagttgccggacatgaaaaaagcgcccggctaaatcctgccgaacgctcgttttgttatacgactataagcgcggatttctccacgcttcttttttctatccgattcgcctactccttccgccttgccccgttgtcatgtcgtccctcctttgggataacagttacattgacaaccgtccggcttaaatcccgtatctgaacatttcaggcacttatatcgcggcaacagatccgcctccgtcatgttcagccctttcaatatctcccgcctttcttttattagtgcttgctttttgatgagtagcgacggcagcgttaccggctcgaagatctccgctttcgcctgcgctatctccattcgagaaagctcgcccgtgatttccttaaatctcggctccctattcgctttcaaaaggtacttatctacacgctgctgcgcttcttcccgcagctttgcataatagctttcccgttccgctttggcgttcgctgccgcaacctcggcggaaacaaatggcttttcccctcgcttcgctcgcggtttcttcaaatactttttgtattcgtaaacagcccgattgacttcataaccgcttaaattatacttgcttttccctttgttctctttcgctcggtaaatcaatcccgctttcatcagcgcacgaagtgccttttttaccgtcgttttacatattcccaaatcccgcgcgaactgtcccgccgagccacgacatatcccgccggttttcttattctcgcatgccgtcgtaatatgcgccagcaatctgatctccgaaggcgtcagcttccgccattctccgcatacacaaatttccgccgtatataaatactgcgggatattgtcataacgcttgcctttgagttcttctatgtatttataagccgtgccgtcctgatctcgctttacacgctcgatcttctttgctttgcataattgctctatcgcgcccgcgatcgtagctcttgaaaatccgaactcctcacggatttgctcgtaactcaaccgacaaaccgcctcgggatcgttcgtatgcgaaaaaccgtaaatctttccggcaacggacaccgcggaaggcgtcagcttcttttttccctttccaggggaatataaccgcgtggggacgcggttaaaaagcccgcgctttgtttccggcaatttaattttcaataccgtttccgccatttcttaaccttcctttgtcctaaacctcgttaccccagcaatcccagccttccgccgaacggcgggcaaacagctcaatagctgccccccccccgacgagtttccggattttttcccgcacttccgtaggcttttccgaatgtctcccgcgcggcgaaaatatcagttgactgattcccgcgctctcgcgcttcgggtgtcccttcgtcgccaataggcagcactccgtatttccccgcgtccaataccccaaccccaacgcacacgacttttcaaataattccgctgccgtcatgattcggtattcgttcatctgcgtcgaaggatttaactttatccattgaaaggcgatcgtcttatactcaaagccccacaggggaattaatcgcagggcgtcctctatcattggatatgtagcccacataaataacactgcgtctctttccgccaatgccggaacaggcagctccgcaagttctgaaaacgtcattgtcggataatgatttttcgccgctccgagccgatttccgcatttataatcccacggcggatccgcgtatatgattttataccgcttctccggattgtatatatctactttcactttgcttgtttctccggcttttcctgcgttcttggcttccgtgaccgcactcgaaacccgcccgccttctctgcgttttctaacgccgctttcagctccgtcctctggctcattacccgcgacggatcctccgccggctcccgcacaaattcgcttgccttacgcagcagctctttatatgccggatatttccccggctcctccggtgatggcgcatactccgaaagctgcgtcaacacattttttacccaccaccggaaaaactctatttcttcccgcaccactgcctggtagcaatatatctttataatccgcgcaagttcttcgtaacagtccttttctgtcagtgccttgcttttcggcttcaatatctctttcatcctcccgcctccgttctataatcccctacaacttccggcgaggaaggattaaccgacagtttcccgccttctttcttgataaagccgtaacggatcaaggctgatacggcatatttcacgccgttccagctcatgcccacttcgtccgctattttccgatagtccacgacttccgcgcggtcttggagtttatctttcaggcattgatacacccgcagcgtcgctaccgtcaaatgcgtcgtgcgattggtgcaaatcgtgatcgtttgttccatttctcgcctcctttggccgtattccggcctgatttttttgttaaaatctaaatttttttgccaaaatcggggccgtgaagaatcccgcgacaagcgcggaattcttcaagaaatacggcgcgccgcggcttaattttagcctccccgcccgcatgacgttgcccggcgccgttgccggccgcccgtcggctctgcggccgtct

SEQ ID NO: 591 - DNA, 30947 bp, Unknown
  16S sequences of unknown bacteria
gacggctatcgcctgctttgggacgggacgaacgcctcggatgctgtgatggaccgccctgggatgcgggcgctgcaggagctgcaggtccagtcaccgctgcggctgtgcggcctgacgaaggcgcagatccgcgccggggcgaaggcggcgggcctgccggtctgggacaagcctgcctatgcctgcctggctacccgagtccagcctggtatgaggatcacggcagagaatcttgcccggatcgagcgggcggagcaggcgctgtttaccctgggctttcgggattttcgcgtccgccagcggggagatacagcgctgctgcagttgccgcaggcgcagctgccccgggcgctggagcaacgcaaggtgctcctacaggcgctgcgggcagagttttcggcggcagtattggatctggaggcgagagatgaatgaacgagaaagcattggcagctctgcttaggcaggtgcagcagggcgagatctcgccgcaggacgcggcgctgcagctgaaaatggccccgtttgaggacctgggctttgcgaagatcgaccgacaccgggggctgcgccagggcgcggcggaggtcatctacggtgcgggaaagacgccggagcagattgcgcgcatcgccgccgccctccgggacggggggcaggagacggtgctcatcacgcggatgagccaggacgcggcggagtacgtggcggcgcagctgccgcttacctaccatgccgcgggccgggtcggtgtgatcggcccggtgccggcgccggacgggctggggacggtcgtcgtcgccaccggcggcaccagtgatatcccggtcgccgaggaggcggcgctgactgctgaggtcttgggcagccgcgtgctgcggctgtatgatgtcggcgtggccggggtccaccggctgctggcgcatttagaggatctgatgcaggccagtgttgttatcgccatcgctggaatggagggcgcgctggccagtgtgatcggcggtctggtggactgcccagtcatcgccgtgcccacaagcgtgggctatggtgcggccttcggcgggctggcggcgctgctgtcgatgctcaattcctgcgccagcggtgtcagcgtcgtgaatatcgacaatggttttggcgcgggctttttggcggaccggatcaatcatatgggggtgcggccatgaatgcgtattatgcccggcccggcacgccggagacagaaacaatctgcgagcttgcctgcaatcttgacgatatgacgccggaggagatcggctttgcatcggcgcagttgctggatgccggggcactggactgctataccatcgccatcggtatgaaaaagaaccgccccggcgtgatgctctgctgcctctgccgggagggagaggaggaccgctttgccgccctgctgtttgcccacacgacgaccctcggtgtgcgggtgcagccggtgcagcggcgggtgctgccccgcagagcggcgacggtacagacgccgctgggccctgtccgctgcaagtgggcaggcgggcgttgcaaggcggagtatgacgacctggtgcgcatcgcccagcagactgggcggagcctgcacgaggtccggcaggagatcgctgccagcctggcggctgccggagaagaggagacacgatgaggacggggaaaacactctattttgactgcgccatgggcgcagcaggggatatgctgctgggggcgctgtttgcgctggccccggcgcaggatgcgtttttgcaagcgtttgccgccctggagctgccgggggtcgcgctcacggtccagccggtcacgcagggagagacccgcggtgtacagatggagctgacagttggcggcgtgaccgagtcggcggcgcagctgcctggcactgcgccgcagcaccagcacggtcatcaccaccatcaccacgaccatcggagcctaccggatgtggaagcgatcctggcggggctgccggtctctgcttgggtggcggagcaggcccgggcggtctatggccgcattgcggcggcggaggccgcggcccatggggtgccggtgcggcaggtacattttcacgaggtcggcgcgctggacgccataggagacgtcgtcggctgctgtatgctgctggagcagctggccccggcgtatatctgtgcctcgcccgtcagcacgggccgggggacggtgcgctgcgcccatggcgagctgccggttccggcgccggccacggcatttctgctgcaggggatcccgacgcagcctggcccggcggcggtaaccggggagctgtgtacgccgaccggcgcggcgctgctggcccagtttgccgcgtccttcgggccccggcctgccttggcggaggctgcttgcggctgcggctttggcacgaagcgattccccctgcccaactgtgtacgggcctggctggggtacgcgccgcgttagaggaagaggacacaaagagaccgagcttgcgcagctatgaaccgcgtaggctcggtccctttgtgcatcagcggctggtagtgtcaggggggtctgcgatattcaagacagtaagcccagcccgttttgcacaggcgaccgtgtatgcggtgccgccggtgcgggaagtcagataacacaggcagcagctgctgtgggcgacgaggtggcggtttcgcttttgcatacagccgggctcataacactgggctgtgtagaccagcttatcggcttgccgcttgatccagagatagataaatttatcccggagcggccagcccctggcctggtcccggcagggcaggacgagaatcagacggattgccggataggacgctcgcagccggagaatgcactgcgccgctagcgtatcaaagccccgggcgccgccgatgccaaagtagcgatacccttgatcgatgcgctgtcgcagcgctgcatccagacggtctgcaatctgcgctgcctcgtctggcggcagcgtccggtgcccggtcaggcagcaggttttgcttcgtaattcctccaatcggatcactccttaaaatactataagcattaaaaaatctaaaactatacttatagtatatattctatctgaaataatatcaatagtctatttatttgattttctgatatttatagactgtattgggagacagataggaggagaaacccaatgagcgaaatcacaaaatgggtcgggcaaagaattcggaactatcgcgtgcgcagcaagctcagccaggagcaattggccgaacgctccggctgccatccgacttacatcggtcaggtggagcggggcgaaaagaacgcaacgctggatagcatcgctaagatcgccgcagccctggacgtacccctatcccagctgtttgaaaaactggatgtcgggctgcaacgtgagggagagaatatcccgttgacgtgttacgaaattcttgcctcaaaatctgaggtggagcaggcacagctgcttcaggtcctgttggcagttgaggaatacaaaagggtgtgaaaaagcgccggggcgtgccccagcgttttttctgtttttggcgtgttattcggcaaagcaggtctccgggttgagctgtgctttgccctgggagacttcaaagtgcaggtgcggctcgctggcaagctccagctttgccgtagtgccgatggtgccgatttggctgcccgccgtcacctggtcgccgacggctacgggaatctccgcggccagattgcaatagcgggtggtgtagccaccgtcgagcccaggaagtcatcctccgccacggcgctgacagtcccatctgccgcagcgcggacggcgtcgccgacgctggcggtcaggtcaacgcccggatggacccgccagtctttcgtcgtggcgttataggccagacggtccgtggcaaagctctgggcgacggcgccgtccaccggctttttcagcttaggcggtgcggcatcctgcgacaaagacgcggtgtctttgcctgtttcctcctgcgccggggcgttcggcgtttgcagggcggcggtgggcgcggcgtcggcgtccggcgcagcgctttggttgaaatacagatagcccgagatcccgactgctgcgatgcagaggacaaggactatgtagtagcccttatcccgcatccagcctttgaagccggtgtgcttgttgttgttttgcatatcttatgcacctccgcccatagtatgggcggattttttgggacctaaacggcaggacaggaatttttttacaggaaaaagcggcggccttgacaatgcaagggccgccgctttggcgtgttatagtgtgttacagcgccaggtcttcggagacgccgtcgtccgcctggtccaggatcggctgcagctggtcctgctggctgcagcggccggtaaacgcggcggggtccagtgttgcggtgatctcttcctgagagagggcgaaggccgggtccgccgccaggcgggcgatgaggtcacagtcctcccctgccttcatccgggtcgtggcggccatggagtgctgacggataatctcgtgcatcttctgacggtcgccgccccggcgaacggcctccatcatcaggttttccgtggccataaagggcagccaggtctccagatcccgggcgatgatcgcctcgttgactcgcatcccggcggtgacattgtccaaaatgcgcagcacaccgtccgtcgccaggaagctctccggcagacagatgcggcggttggccgaatcgtccagcgtgcgctccatccactgcagggaggcagtcagcggcgcgttttgggctgtgaccatcacgtagcggcttagagagcagatgcgttcgcagcgcatggggttgcgcttataggccatggcagaggagccgacctgcttttcggcaaagggctcttccatctgccggtcatgctgcaaaatgcgcaggtccccggcaaagcggtaggcgctctggcagatggaggagagaacgttcaggatccggctgtccagcttccgggggtaggtctgcccacagacggggtagagccggtcaaaatcaaaggcggcggcaatgcggcggttcatctcatcaattttagcggtatcaccgtcgaagaggtccaggaagctggcctcggtgccggtggtgccccggcagcccaaaaaacggatcgcctccgttacctcgtccagctcctccaggtctagccacaggtcctgcagccagaggcaggcccgcttgccgacggtcaccggctgggctggctggagatgggtgtagcctagagtgggcaggtccttatagcgcagggcaaactgggccaggttgcggatgacccgcagcagccccttgcggagataacacagcgcctgccggtagaggatgaggtcggcgttgtctgtcacatagcagcttgtcgcccccaggtggatgatcccggcggcgctggggcagtccagcccgtaggcccggatgtgggccataacgtcgtgccgggtctcccgctccaggcgggcggcagcggcaaagtcgatggtatcggtgtgctgcgccagctcgtccacctgggcctgtgtgatgggcaggcccagctccatctcggccttggccagctgtacccagagcttacgccaggtgcaggcccgggtcttggcggagaacagctccagcatggcgtccgacgcgtagcgggacgccagcgggctttcgtagcggtccgtcatgccttctccctccggatgatggcgtcacgttccgcgccgacggagacataggtgatggggcagcccagctcccgctccagatattcaacatagttccgggcttccttgggcagcttgtcatactcccgcacgccggaaatatcgcacttccagccgggcatataggtgatgacaggcgtcgcatctgccagctccgacgggaaggggaattcgtccgtctgcgcaccgttgagcatatagtgggcgcagatggggatctggtccatataagagagaatatccatttttgttagtgccagctccgtcgcgccctggacggcgacgccgtagcgggtcgcgacgagatccaccgggccaacgcggcgggggcgccctgtcgctgcgccgtattcgccgccgaccttgcgcagctgctctgcttcgtcgccgaaccactcgcaggtgaaggggccttccccgacgcaggtggagtaggccttgacgatgccgacggcccggtccacatggcagcccggggccccggcgccgatgggggcataggcggccaggcaggtggaagaggaggtgtaggggtagatgccgtagtccaggtcccgcagagcgcccaactgggcctcaaacaagatgtgcttgccgtcgcgctgggcctggcgcaggaatgcgccggtgtcgcagatatagggcagcagcttctcaccccaggtgcgcagccactgcatcatatcggcaagcttgtagccctctgcgccgtagaccttttcgatggtcaggtttttccattccaggatcccggtcagacgcttttccagcttgtccatatggcgcagctcgcccatcatgaccgtcttcttctggtatttatcggagtagaccggcgcgatgccgcggcgggtggagccatacttggcgtcccgcaggcgctcttcctccaggcagtcctgcgccttatggaaggggaagacaatggtcgcccggtcggagatgcggaagttttccggcgtgacggtgatcccggcgtccatcagggtttgcatttcgccccagaggtcctccaggtggatgacgacaccgttgcccagaatattcacaacgccctcggagaaaatgccggagggaatcagatgcagagcaaacttgccgtgctcattgacgacggtgtgcccagcgttgttgccgccctggtagcggcagacaatatcatagtctttggcgatgagatcgaccatgcggccctttccttcgtcaccccagttgatacctacgattgcgcagttggacataataattcctccttcaaatatatcacggaaatccaaaaatgatcggatgcgcggttcatacagtagttaggatactccaaatcttggtataagtaaaacagaaaaaagttatactcatgattatttttcctaatatgtccgcgccgcgggagatcttgcaggatacgtctctattttacgccccggggcagcggcttgtcaacttgtaaagcgaaaaagccatacttttccgctttacaaacttgacggtacttggtataatccagatatccgaaacaggcgagaataccgaaaagctgcggctttttccgcagccggcggcaaaatttgaaccggaggaaacaaatatgagaaaaagaattctggcactggtgctggtcctggcactgtgcgcgggcttacttgtcatgccagttggtgcggcagagccagaggcggtggcctatctgaccatcagcgttgcaggcaagctgcagctcacgcgctacccggtcacgctgaccgacgaaaatgaaaacggcaagttggacattgacgatgtcctgcaggttggccatgccatctatggcgatgatacttacagctatgcatcggtccggggcgactacggtctgagcatcacaaagctctggggcgataccagtggtgcgtttggctactgtgtgaatactaccgttccgatgagcctggaagaggaagtcaaggcgggcgacgatgtctacgcctatgtctaccaggataagacgggctataccgacgcattttcttattttaatgaacggcatatctcggttacggctggcgataccgttacgctgacactctccaagctcggctacggtgaaaactgggagacgatcagcacgcccatcgccaatgcagcgatcaccatcgatggcgaagagaccgactatgtgaccgatgaaaacggcaaggtcacgatgaaactcaacgcgcctggtctgtatgtgatctccgccaacgtgacggggacggtcctggtgccgccggtcaccacagcccgggtcaaggcgacctggacgaaggattggcgcaacagcgcgatgacagcgcttcagggcacggcagccattagcctggccaagcaggacgagaatatcagcgcttgggatatcattggtctgtacggcgcgggcgttccggtgccggaggcatatcttgcggattatctggaagggctctacgatgctctggtcagcggcaatggccagctctcggccagccagtacacagcctactcccgcagcattctggccctggcggccgtcggcgaggatccggccagctttgcaggctatgatctgcttaagtggctggaggattatgataagacgacgaagcaaggcgtgaccggcgcggcgtatgcgctgctggccttggactgcgctggcgataccttccagagcagccagcggaaagcctatgtgcagtacattctggatgcccagcgtaaggacggcggctgggacctgcggggcgagagcgccgcagcggctgacgccgatgtgacggccatctgtctgcaggccctggcggcctacgccggggatccggcggtccgtccggcagtgaacaagggccttgactgcctgtccgccctgcagcagagcgatggcggatttaagagctacggcacggccaactgcgaaagcagcgccatggtgctgctggccatgtgccagctgggcatcggcctggatgacgcccgctttgtcaagggcgaaagctcggtgctggacgcgatgctgcgcttccgcaacgcggacggcagcttcagccacgaggccggaaagggcgccaacaccctggcgaccatgcaggcccagatggcgctggcctccctactgcgctgcgccgacgggatgagcggcatttacgatatgaccaacggctacggcgaattccccttcacggacgtggctttcaacacctggtattttgaggcggttcgttatacgaaccaggcgggtctgctggtcggcacaacggagacgacctttggccccaatgtcccgctaacccgcggcatgctcgtgacgatcctgtggagaatgatgggccgtccggcggcacagcagaatgtcacggcgtattattcggatgtcaacgccaagatgtactacgctgagcccatcgcctgggcgacggagctggaggttgcagccggtatgggtggcggcaaattctgcccggaggaaaaagtcacccgggagcagttggcgtgctatctttaccgctatcagaagctggcgctgggcggggatgtctccgcgtcggagaatctgcagggctggagcgattacagccagatatcttcctggagtaaagaagctttggcctgggccacggcagaaggtctgctggtcggcagcggcggtaagctggaccccaagggcagcgcgacccgcgcccaagtggccagtgtgctgatgcgctttgaccggagcattggcggtgcctgggagaatgagcttctcggcacctatttcaaataaacaaatagagcgataaaggatgatgagacagatgaagcattacaaatggacggcactttgcctggtgctgctgcttactctgagttgctttctgactgcttgcagtgatactgtaggaagtccggcaacggagccggagagcacgcaggcccagcagaaacaggaagcggagaatgatgacggcgccgacaaggacggggaagcaggtacggtgacaggcggcgcgtcagatgcggatgatgctgccggcagtgaagacacggcccagcagcccgacgcccaggagccgcaggcgcagacctgcaccatcagcattgattgctcgacgattctggataatatggataagctgaaacggggcaaggaagggctgatcccgtcggatggtatcctgcttgccaagacggaagtgcaatacgaagagggcgacaccgtcttcaccatgctcaagcgggaactgaagagccgtaaaatgcactatgattttgagggcagcggctccgcggcgtacctgacagggctttgcaatatctatgaattcgactgcggaaagctctccggctgggaatttgctgtcaacggttcgttccccagcgttggcatgggcgtttataagctctcgcccggcgattccgtcgcactaatttatacctgcgatttgggtgacgatatcggcaaccactacgacggctgaccggtgcgcacctgacgtgaaccccttgcatgaaacacgaaaaaacctccgtacgggcatcccgtgcggaggttttgtgcttgccagaaaagcttcagcgctcttcgagaattttattcagctcctgcataaagctgttgatgtccttaaactgccggtaaacggaggcgaagcggacataggcgacctcgtcgaggggcttcagccgctccatgaccagctcaccgatctcagaggagctgatctcccgctccagggaattctgcatgacctgctcaatgtccgtgacagcggcttccatttccgccatggagaccgggcgcttttcgcaggcacggaccatgccgttgaggatctttgtccggtcaaaggattgccggctgccgtcttttttgacaacgatgatcggcaggctctctaccgtctcataggtcgtgaagcgtttctgacaggccaggcattcacgccttctgcggatgctggcgccgtcctcggaatgacgggagtcgatgaccttgctgtcctggtcgccgcaatacggacatttcatgtgggaagccctccttggccggaaatatagataagcttattatagcaggctggagggcggcttgtccagcgttcctgaaaaattttgcgccagttttcagattgcttttcccgcccggctctggtatcataagaagtcggaaaggcgggattttgagagatgaaacgcaaacagaccatgaccggcgtcacgctgacgctgctgggcgggtgcttttgggggctgtgcggcgcgtgcgcccagtatttgttccggacggagcatgtgacttcgaatttcctggtgccttggcggatgacgctggccggggcgcttctgctgggctggcatttggtccgcagcccgaagcagctgctgggcccgtggaagtcggggcgggacgcgctgcagctgctgctttatgcgatcttcggcatggctatgtgccaatacgcttattttgcgacgatcgagctctccaatgccgggacggcgacggtactgcaatacgccgcaccggcaatgctgctgctggtggtctgctgcctggagcggcgctggccgggccggatagaggtgctggcggtggtctgcgcttcgaccggggtatttcttttggcgacccatgggaattttggcaccctggccatctccggcaagacgctggccatggggatggtcgcggccctggcggtcgtagcctataatctgctgccccggcggttgttgcagcgcttttccgcgccgctgctgctgggttggggcatgttcctgggcggcctgctgctctgcgtgacgctgcggccgtggcggtatcatgtcgcgctgacgccgcgcctggtcctgtgtatggcggtgatcgtactggtcgggaccatcgggtcctttacgctgtatatgatgggcatgaagcgcatcgggccgacgaaggcggcgctgtatgcctgcatcgagccggtggcggccgcggtactctccgccgtctggctgaaggtcccattcacggggatggatcttttgggctttgccctgatcctctccacgacggtgatcctggcggtgccggatctgaaaaatagcgcagtggcatagcgggatcggagaaagccccggcggcgggacgtacccgccgccgggtgcggctcagctgcccatcagccggtctgccgcgtcgctgacggtctgctccacagagtccgccgctttttgcatggcctgccggatggcgcactgccggggcagcatcagcgcgacggtcgcacctgctgccatgccgagcccaacggcggtgaaaaaggcacctgtcttcatatgctcaccttcccttccccgctgttagtatgaccggcggggcgggaaatatggctggaatcatacggcagtgaaaaaggtatttggcattgggaaattttgtgttataatagccgcaaagaggtgtaaggcgggacgcaaagcgttccgccgcgctagcggcgcgatgcgttttaaagcgattctgcgggtgtggaagggagtttttacgatgtcaatcgatgcattgcaggcgaagatccgaaaactgaagaatccctcgatgatcgggctggacccgacggtggagctgctgccgccgcatctgctggaggaggcgtatcggacccatggccagagcctggaggcattggccgcggcgtatgagacattctgcggcaaaattttgcaggcgctgcagggccttgtcccggcagtgaaggtgcagagctattgctttgatgctctgggcagttgcggcatcgcggcgatgcagcgcctgctgcgccaggcgcagcacctgggcttttatgtgatgatggatgccaactacagcagcgttgggcatatctctcagctctatgccgccgctgtcttcggcggcctgcgaacgccggacggcgcttgcctgcagccttatgcctgcgacgggctgagcatcaacccgtatcttggcagtgacagcgtcaaggcatttttgccctattgcaagcagcaggggaagaatctgttcctttgtgtcaagacctcgaacaaatcctcccgggaggtgcaggaccttatctccggtagccgaatggtctacagtgcggtggcagatcttgctatgcgctggagcatcgacctgttcggcaaaaacggctacagcgagctgatcgccgtggtcggtgcgccgtatccgcaggtgctgcgggcgctgcggcagcagtatgaccggctgtttttcctggtgccgggctacggtgcccagggcgggacggcgaagcatgtcagtgaggcgttcacggcggcgggccggggcgcgatcgtcagcgcgtcgcgcagcgtgatcggtgcctggcagaagactggcagcgacggccgcgattgggcccggtgcgcgaaagacgcggcgtgcaaaatgcgggatgatttggcaaaatatgtgacggtgatttaatgatgacgacgatctacttcatccgccatgcagaggcggagggaaacttataccggcggctgcacggccagcacgacacgctgctcacgcccaccggagtgcggcaggcggaggcgcttcgccgccgcttcgccggggtgcggctgcatgcctgctacgccagcgatctgaaccgggcagtgcagacggcgctgccggtctgtaaggaccatcggctgcggctgcgccgggagccggcattccgggaggtatgcttcggcacgtgggaggaccagagctttggcacgctggagcatctctaccccgagcagatgcgcgtgttccgccagaatatgtgggcctggcaggcgcctggaagcgagacgctggagcaggccaccgggcgctttatcgaggcgcttcgggcggtcgcggagcgccatgcgggtcagacggtggcgatttttacccacggcgcgatcctgcgggcggtgcaggcggagctgttttttacgcggcagacgatgaaccgggcgggccggtgtgataacaccggcgtgagccgggtgcagtatgagggcggccggtttacgctggattatctcaatgacaacgcccatctggacctggccctttcgacgcagaatcggctggacagcctgtgccagcgcagcgcttctctgggggaggactataacctctggtttgagttagcccaggacgacggcgcgctgtatatggacctgcgccgccagaactgggtacagcgctgcggcacgctgacctggacggacgaagcagcggtcgaggcacagatgcgcgccatcctggtgcgggcgccgaatacgctgtactatgccagacaggggcaggcgttggtcggcgcgctgctgctggagccagagcaggagcaggaccacggcgtgatccgttatcttggcgtgctgccggaacggaagtaccgcggttttgctgtgcagctgctgggccaggctgtcagccattgccgcagccagggcaagagtaagatccgctgtacgatccccgacggcgattatacgacggtccacttctttgaaaagtacggctttcggccccgcaaacaggcggggggcgagcggtgctatgagctgtccattgctctgccgcggcagccggggtgagaaaacggcggcgctcccatgctgcccggcaaaaaacggaaaatgaaaacgggaaaacaaaaaaacgtaaaaggcatccggctttctgccatagcaggggctggatgccttttgtgtttacgcggcctgcgggccgggggcggtgcggcttgcgccgcggtccgtcgccggcgtatcgccggtgaccatgtcggcggtgccggtgcctcggacgagctggcccgggcggccactggccgtgtctgcccggccgtctgccgggagattccgggcgccgctgcctgcgtcggtctgactgtcattctggccgcctgtcgggccattggctgcggcgttgtcctcgctgccgtcgccgggcgcctgggaatcgggcgcggtgtcgctgtccgggtcggtcatggcgccgtcgtcggtgttggggcggtctgtcggcgcgttgtccggcatatcggagccgatgctgccggaatcggagccggagacgttgccgtcggtcgtggcgcagccggtgaacaggcacagtaccacggccaggaccgcaatcaaaatgctcaattttttcatggttgtccctcctgtcatttgcttcaagcatgggcttagtatttgccgcgccgcgggttttagccttgccaaaatataccaggcgcaaaaaacgccgctgcgcgagggactatattttttgaaaaaatttggcgtttcaaaagaggccctgccgcacggcagggcctcttttgaaaacggggaaagcgtcacggttttacatttttgcaaaactgcatcaggatcgtcgcaacctgttctcgggtcgcactgccctggggatccaggtaggcctggccgccgcgcagcgtgccggagatcaggccgagggagacggtgtccgccagagcgttgtgcgcccaggcagaaacgcggctcgcgtccggataacggctcaagtccgcgggtgtccaggtgcgcgagacgcccaggaccttttgcgcgtagcccatcaggattaccgcgatctgctcccgtgttaccggagcattgggtgcaaaggtcgtcgcgctcatcccggagacgacaccggtctggtacgcccagcgcacggcatttttgtaccagtcctgcgttagatctgtaaacggcgctgcgccgctgacgcttggcgagccgctcaggctgtagagaatttggacgatctgcgcccgggttgtggcggtctgcggggcgaaccggctgccgccgacgccgtacatcaggccgttggagacgcagtagtcgatcccggcatgggcccagttgttagcgcccgggacatcggtgaatccggcgcttgggcaatatacgccgccttcgcaagccggcagcttggcaagctcttccgttctcgtctcgccgcagttttcgcaggtgtaggtcatgacgcccgtctcccagatcgtcggctgggtcgtcacttcgccgtcgttccaggcgtggcccgtgggctgggtgaaggcgttcacgtagctgtagtcgcagtgctggcagcggtattctgtatagccaaagctcaggcaggtgggcttcgtgacggtagccgtcatctcgtggtccgccttcgggatagcctgggtgtaggtcttgccacagccttcgtgctggcaggtgaaggtcagaacgccttctgccgtacaggtagcttccttcgtaacctcggacttgtagtcgtggtccgtcgctgcggtgtagctgtcgacatagctgctgccgcaggtggcacaggtgtgtgtcgtgtaaccgggcgattcgcaggtcggcgcggtgatggcagcttcataggcatgggccagctttgcgatggcctcgtccttttcgcccttgcagcccgcgcgctggcaggtgaagtgcatcatgcctgcttccgtgcaggtcggggccttcgtttgcttacccgcgtcccagttgtggccgagcggattggtgtagttgctgcggtaggagtcgccgcaggtgcaggtgtatgtcgtatacccctgttctgtgcaggtcggcggggtgacggtgcttgtgtactggtggatatgctctgcggtgaccgtgaagtagaccttgctggtctccgtcgagtagtccttaaatttcgtattctttgccagcactgtgacatagtaccggcccggctttgagattgcgcaggtgtcacgcctggcggtcgactcgaaattggcaacgagggagtcgtcctccgagcgaatccgcatccgataccatctctcatccatcacgccctggagggggctttcggtccactgtacggtaaagcgcgtcttggcacttaccacagacggaatggtgatctgcactgcggcgggccttgcgggtttgacataattgatggtgtacaggctgaacagctgggccttgctgttgtcactggtgtgcgcccagttgccgtacagctgcatctgcgtcccggcggcagaggagccgtctttgcaatcgagcacgagccagttgccagccgtgaccgagtccttggcgatcagtttgaaaataccgttgtagcttttgatgtaccattggaagcgcgtcgcccgctggccagcaaagggggcggtcgtcaccttcgcctgcgaggcgcaattgccttcgtaggtgaggtattcctcgttgaacatattctggacataatagctgccgtcagcttggcggataaaacgccagatctgagctgggtcattggcattgttggtgcgggagatcgtcacgttccagctattggagtcgtaataattcgtgccgatatgcttccagctatctgaccgaatgagcaggcggtagacgtctgcgccgatgttgtcaaaggtcggtgccggggtcacgctggaaaagtccgggcggatcacgccccagtaggtattgtcaaagttgttatatctcacatttgtgacattgacgacatattgccggtcggcataattttgatgccaggtgctgtaatccgattcgtagattgcgacatggccggcttcatttttggcgctcggattgtagactaggatatcgcccttctggggctggacgccctggagccgctgccagccggacgggagtgcattcgtgcggtactccttggcgtaaccgccaggggaggtctggccgaggcagcgatagtaatagcagatcaggtcgacacattgggcgccatatgcgccgtcgtaatccaggggctaccctgctttgcttcggacccagttgatcgcgtcatcggcggtcttgccgcctgtagaggccgaggctgccgtcggcagcagggagagggccatcagcacagccagtgccaggctaagtacacgttttttcatacgccatcttctttcttcagggattttgcagggattgcagcgtccgggcgtatcacatgccaggctgctaaattctacagatgagaatacacacaaaccgcatctttgtcaagctgggggaaataattctgtgtactgccgttgtaaaaaatagtttttcttgaaaaaatcccttgcaatttccgattggctgtgctattatatctaagcaccttgtgaggtgtgtatgcgccggtagctcagttggatagagtgactggctacgaaccagtaggtcgggggttcgagtcccttccggcgtaccaaaggcccatgagtttttctcatgggtcttttgctttgctcaggcgcggcctgcggtcacagatcgtcggcgtcctgcactgggacctcatcgcggtggacggggcagccggtccagctgccttgcgggtcggtttggttggactggaagtttgtcatcggcccggaaaagggcgtctcctgccgggacggcgtagtgcgctgctgctttttttgcttcatggtgttcctcccgaatgataaaaaatacaggcgctgcggcataaataccgcggcgcctgtttatactctccggagaaggaagctttcatgcggaaaaacggaggaaatctatggattttttaacttctgagacatgtcaaaatctggcccgcagctttgccggagaatcgcaggcccgcacgcgctaccagctggccgccgccgttgctaggcgggaggacctggaggtcgtcgcccggatctttgagacggcggcggccaatgagctggctcatgcccaggaatttttggagctgctttgcaaatggaaccggggcggcctggaaaatctcaccatctcggcaggctacccctatgtgctgggcacagtggcggagaatctaaaagcagcgcaggcgggcgagtgggaggagcacagcgatgtctacccggcctttgctgcggcagcggagcgggagggctttgccgacgccgcccggctgtggcggggcatcgctgtggcagagggtgtgcattacgaggtcttccggcagtgcggcgcgcagctggaggctgggcagctcttttccaaggcgtcgcctatcgtctggcgctgcgccaactgcggctatacctacacggcaaagaccgcggcgctgacgtgccccgtctgcggcaagccggtgggctggatgctgggagatgtcgagtcgcagccgcctgccctggcgtctgatcacaaaaacagcagataattgcccagcacgtagccgacgagcccgtcgtagcggatgacgtaccagccgtcggactcacccaggacctccacggaggcatggtccgggaccttttgcagcaccggcgcggtggccgaggggccgccgcgcagattcaggttgctgccgtccgtcgagacgacggcgttacggatctcgcccggagagagaagcggcaggccgaaatattcgcacacaccggtggccagggcccgggcgatggtctggagattgttctcaatccactgggcgtcctgggggttatcgtggtagcccagctctgccaggacggccggggcgcgggtagcccgtacctccaccagtgaggtggtggccagggtccggactttttccggctgggggtaaatggggcggaggttatctgccaggatattggccatccgcagagccggggcgctggagggatagtaatagaggtcgatcccggtctgctgcccgctggtcgccgggggcgaggcattggagtgcagtgccaggtggaaatcgtagttgcctgcattgctcatccggatggaattgccgacagtcccggcggggtcgtttcgggagacattgatgccggaggtctccaggtacggggtcatggcgtcggccaggcggttcatccagtactcctcgttcccggtggtgacgtaagggttatactcctgggtcgaggggcttaaaaataaaaatggcatagtacgctcaccgtccttttcccttcagtctatgcgatgggagcaggcgctgtgcgcgtgggtccgtccggctgccgggcgggcttttttcttgcgccgggcggggttttgtggtaaactggaggcaagaaagcgtagggggtaagctatgagggttcttttgaccggcggcgccgggtatatcggcgcgcacaccgcagcgctgctgctgcaggccggggtggaggtggtcatcgcggatgatttttcggccagcgcgccggcggtcatcggcaggatcacggcggtggcccggcaggccccttcggtttaccaggtggatgtggccgatacggcggggctgcagacggtctttgaccgggagcagccggatgcggtgctccattttgccgggcgaaaatccgtggcggagtccgtggcatcgccccttgcttattatgcgaacaatctgggggcgatcttgtccctgctgcagtgtatgcggcgcgccggggtgaagcggctcatcgtctcttcctccgcggcggtctacggcacgcaggatgtctcgccgctgacagagcgggccgcggtcggcggctgcgccagcccttacggctggtctaaatttatgcttgagcagatcgtgcgggatgaagcggcggcgcggggcgatttttccgcagtgctgctgcgctattttaatcccgccggggcgcaccccagcggtcttttgggtgaggacggcgcatccggcagcctgatgacggcgctggtgcagacagcggcgggccagcgcccggcgctgcagatctgcggcggggattatcccacggcggacggcaccggcgtgcgggattatctccatgtgatggacttggcccgggggcatctggccgcgctgcactacagcatcgcccattctggcgtcgaggcggtcaatttgggcgccgggcgaggctgcagcgtgctggagctggtggagaccttccgccgggtcaaccatgtgaccgtcccagtgcagatggccgcgcggcggcctggggatgtttccgtctgctatgcggatgtggcccgggcccgggcgctgctgggctgggagccccgctgcagcctggcagagatctgccgggatgcctggaactggcaggtgaaaaatcctgcaggctatgagacgcaatggaaggagcaaagcaatgggggcgcagtggacgatccaggagatcgcgcatattgagagcgacttttctgaaaaatttggaatcccccggcagagcggcctggtggaggagctccgggcgcgaatcgtattcgacccggcgttccgggatgaaaacacggtgcgggggctggcggagttttcccatatctggctgatctggggcttttccgccaatgccgggcgctggtcggcgacggtcaagccaccccggctggggggcaatacgcgcatcggcgtctttgcgacccgttcgccgttccggcccaattccctgggcctttcctgcgtccgcctgctgcgtgtcgagccgcagacgccgcaggggccggtgctgcatgtagcaggggccgatctgctggacggtacgcccatctgggatatcaagccctatctgccctatgccgactgcgtgccggctgcggcagcgggctttgcaggccggaaccaggaggagccgctggcggtcgagctgccgccggagctggcgcggcagctgccggagaagcaggcggcggccctgtgcggcgtgctggcgcaggacccgcggccccggtaccaggacgacccggcgcgggtctatggctttggcttcggcggctgggaggtgcgcttccgggtggccgggcgctgcctgacggtcgtcagcctggaaaagaaaacataacggtacgccccggtctgcgattttttgcaaggccggggatttgttttgccaagcggtagcgccggggcaaaaaacgtggtaaaataatttaataaggcgctgcccaagcggcgtgcatatggaagaaatcggggtacgccccagaggatgatagagatcaaaagagtttacccggggaggatatgggatgaagcaacccgtcagcagcctccggcagtggatgctggagcagtatgcgccgcaatttcatttggagaagaaaacgctgctgaagcagctggatcaggtgggcttttacgcagagcgctgcctgccaccggtgggccagcgggtcaactgccagctggtgctcaatacctgcaggctgtatttgcagacgctgtgcccagagccgccggaggggtggttggcgtttttatatgaggagatttgccagaaaatgttcccggagacgggtcatagcccgatgacgccggggcagcggcaagcggcagtattttatctgggtctgctgcgctatgccatcagccgggagaactgcccctttgatcccttgacggacattgacgccgtgacagaggcggagctggagcaaagccgcatcgccaaggaatacgctcgcttctggaaggcggtggaggacgattattttaccgagctcatgcgcatcgggcgggagatcatgcccttcgacccggcatcgcataccatcggtgtgcaccatgtggcggtgcatatggctcggcaggcgctgcaggcggggatcccggtggatatcgccctgtgcagcgccgcagcgttgagccacgatatcggaaaattcggctgccgtggacgggatgctcggcgaatcccctatctgcactattacttcacctggcagtggctggaggggcacggtgtgccgacgattgccaacatcgcggccaatcactcaacctgggacctggaatttgagaacctgcccggcgaatcgctgctcttgatctatgcggacttccgggtccggggcaaccgggatgccgagggccgggagcgggtgcagatcttttccttggaggcagcctatcaggaaatcttccgcaagctggcggatatgacgccggaaaagcagctgcgctaccggacggtctatgccaagctgcatgattttgagcagtacctgctgagccacggagtggacccggatccggtgcagcgcggcgcctgtacggcgtgcacgccgaaagcggctctgctgcctcggcgggagattccgcggcagatctgcaatttgaccttccacaataatatccgcctgatgcgccagatcacccacgacgcatcattcgagcagctgttggagcaggcgcgcaatgagaaaaacctgcagagcgtgcggacgtatttgcatctttattcagaatatcacacgtacctgacccgggcgcagaagcaaaagctgctggcgtttttatatgagctgctgatgcaccatgacggcgatgtccggcggcgggcggcccggatgatgggccaggtgctgacaaacagtgggccgaaataccgcaaggagctgccggccggtgtgccgccccaggcggcggcgccgaatctgctctcctttttaaatgagtcggtccagatctgggccagctatgccgagcagtgcctgcatccggatcaaaagattgcgccgaagcatgcgctgcggatctccaactctctgaagatcgtggccgagagtatttttcgtcatctgagccgcgaaaagtggccagagtatttagaagtgctgctggcccaggtgcgcagggacctgccccaggaccggtttgtgctgctggacacgctgaaccacgtgccggatgccgcgtttacgctgcagcagggacaggtgctgctggcgcagttcgcctcgcatttatccggcgctgccgaacgggagcagattgccgcgctgcgcttttttcgcaagctgctgacgattggcgacgaggcgctgcaggcggaggttcgccgtgttgcccagggattggagccgggggagtcttacgccgtgggctacgagcggtcggtcctgctgcggggcgcgggagagacagcctccttgcgcaacgcagagcggcagcatctttacctgagcaatatgaaaatggccgtccactggagcgtgaaaatatcgcacattgatatgctgtgcgaaaatgtcacggcgcatccggagatggcgttccacacggcgatgcatttgagcaatctgctgtgcgtcagcgagcatctgccggtgcgggattacgcgggggagcatcttgtcgcgctctgcgccaagctcccggcggaccagcagaatgagctgatgatcgacctaatccgcgagctggagacggggcgggaggaggtctcccgttatatcccgaaattcctgggccggatgctgtgccagctgccggactctgcctttgacgagtgcctgcagtccctggcagagctggtccattcggacaataccctggcggctatggcggcgctgacgacgctggcggtagtgctggcgaatcaggccggaagcgaagcagtgacggagcaggtctttggcctgctgctgacgggtgtagcgcactttgacgatatgatccaccaacgggctctctcactgatctgccgtcaggtctttgacaatccgtcgctgacgctttctgtccggcagcggtattttatccgcatctgcaaaaaattcctgacgctgctggaggagccgcacccggggcagctgaatttctttacctgcgcggcggcgctgaaccatttgtatcgcttcctggtgcagtgccaggtgcatttgccagagccggtgctgccgccggagcggcccatcgccttcttccccgggacgtttgaccccttctcctccggccacaagcgcatcgtgcaggaaatctgcgccaagcagtttgacgtctatctggcggtggatgaattctcctggagcaagcagacgctggccaagctgctgcggcggcagattgccagcatttccgtggcggaccagctggatgtctatctctttccggatgatatccccatcaacatcgccatggcgggggacctgacccggctgcggcagctgctgccgaaccaggcagtctatctggccgtgggcagcgatgtgatccgcaacgcctcggcttaccgcctcggtgcgaccggcggcgcggcggactttgaccatatcgtcttctcccgggaggagacggaccagctaccgccgctggagacggtgatccgcggcaagctggaggtgctgcagctgccgcccttctttgacagcgtctcctctagccgcatccgggaatatgtggataagaacctggatatctccatgctggtggacccaatcgtgcagaatttcatctaccggcggggcctgtatttgcggacgctgcaatataaaatggtattgcagccccataagctgtattttgaaaatgcccaggagatcttgccggagatcccgcagaagctggcggaaaagctggccggatggccgggcgtggccagctgcgtgctgcgctcccgggccaccggaggcctctggggctgggcctgcgggcggacagtccagagctatcagctgctggatgtgctgcaggatgcccaagcggcgtcttgcgttcgggagcgggtctcggggaatattctgctcatcgacggcgtcggcgctgttgccccggggcagagcgtggagcggcaggccctcaatgagctgctggcccgggcccaggagcggagcatcacctatgccatctgtcgctgcccggctgccggaccgctggagcaggcgctgcgggagttgggctttgccccgacgccggagcagccgtcggtctgggtggtggatatgcgccgcccggtagtgctgatcttggatacactgcagaagctgaaatccccccaccgggagaacccgaaggtcatccgggcggtggagaaggcgcggcgggcgctgcggctctcctttgcccagatgttcccgggagatctgatcttgagctttgatgttgaactcctgaaccaggcgctgcgcagccgggtccagtgctgcaacggcgtggcagatgtgccgcccggggagcgccgcctgggcagaaaaatgtgcgtgcccttcggcaagatcctggccaatgacctggtgccgaacacggtgacaaagcggctggaggtggaaaaggtattcctgcccaatatccgggggctggagattaaggaataccccgggtattcgacactggtcaaccaggtccggacgatcaagtccttccggcggcccatgatcctggtggacgatcttatgcacaacggctaccggatggagtacctgacgccgctgctgcggcaggagcaggtggaaatcgaccggctgatcgtcgggatcatgtccggccggggcaaggaccggatgcggctgcagaatattgagaccgagtgcgaatatttcatccccgccatgcgttattggcagacggagagcctgctctaccccttcatcggcggtgacagcgtcctgacaagccgcaaaacggagatgctgccgacgatcaatctgatcttgccgtataagtatccgcatttcttcagcggcgtccccaagcgggcaatctacgccctttcggaaacggtgctggccagcacgcaggagattctgcgggtgctggaaaaggagcatctttcttattttggcaaatcgctgaccctcaagcggctgggcgaggccgtgttccggccccggatgccggaccggggtgggcatttgtcctatgatctaaatatcccggcgtcggtgtatgtgcaggatgatatcaatgcgctgcaccggatgcagggctgggaggagacgccttgatggaaaaactataccagtttgagggcctttgcctgtgggatcggggcggcggggtgccggcgggcgctgcgccgtgcagcgcgccgtttgcgcccctggtcatcaccgtccggcgggatccggcgaaaagccgggggctgtatcgcatcgacgatctgcgccgcctggatgcgcaggatgtgcaggcggcgctgcagccgctgccgccgcagcaggcggcggacgatctggcggccctggtgcaggcggagggcgcgtgcgtcttgaatacggtgtttgcccgctgctgggatgtgctgcgggcgacccggcggcgccgggatggcttccgggtccatctggtgggcctgggagacgtcggcgggacggtcctgcagggcttggtcctgctgggacgggacctgacgggcatcggcatctatgaccccaacgaggcccagtgccgccggtactgcctggagatgaaccaggtactgccggagcatgcgggcggctgggtgccgccggtggagacggtgccgctggcgcggctgtttgactgcgatgcgctgctgtttaccgcgtcgctgggggtgccgccggtgggcgcgcaggtcggcgatgtgcggatgatccaatacaagcgcaaccgggatatgctgcagggctatgcacgcatggcccgggagacgggctttaccgggctctttgcgcagatctccgacccagtggactatctctgccagtcggtgttcctggcgtcaaaccgggatgaggacgggcgttttgacgcggcggggctgctgccggagcagatccagggctatggcctgggtgtcatgcgggcccgggcgcagtattacgctgcgcagcggggcgttgacttttcccaagggcaggtttttgggccccacggccagcagctggtggtggccaatgccgccgggcagggctatgacgacgcgcgctcccggcagctgacgcaggataccgtcacggccaacttgcaggtgcgggcgctgggctataagccctatatcgcccccggcctgtcctctgcggccatcagcgtcctgcggacgctgcgcggggagaatcacgacgggacgctggccctgggcggcgcgtattttggctgcagcctgcggtcgacccggttgggcgtggagcctgtatatcaggcgttgcatccagcgctgcaggcgcgccttgcgccagtgctgcaggcgctgcgggagtttgattatgacgaatgaactattggtggtgaccgccgggcggcacgcgcggctggaggctgttttaaagacggcgctccagggcgtcccgttccggcgctatgatatggcgggcggcgcgctgccggacctacggcagcggcgggtactttttgccattgctgtggaccaggcaggcattgacccggaagtctgccgcctgctgatgttgctgcgccagtcgccggatgcgatgcaaggcgcctgcggcgcgctgctgattgacggtgcaggcgagctctacaccaagcagactgcccaggcgctgctgttggcggcaaatcttgccggctgttggctgatgggaaagccgctgctggaggcgacgggctcgctgcagaatttggacatccgcgctaaaaaactgggtctatctcaccgggcggcctatgacgccctggcggtccagctggtgcggcggctgctggaatttgcagtgccggggcggccggaggcgaagcttctgatgctgcacgcatcgaaccagaagacatcgaacacgctggctctgggacggcgggtttgccaactgctttccgggcaggtgcagacccgggagctctccttgcgcaacgggacgattcatgactgcaacggttgctcctaccgggtctgcgcccattttgccgagcgaggcggctgcttttacggcggcgcgatggtggaggacgtctatccggcggtgctggagagcgacgcgctgctggtgttgtgcccaaactacaacgacgccctcagcgccaatatcatggcattcatcaaccgcctgacgagcctgacggtcaataatcttctgcagggcaagcagctgtttagcatcgtcgtctccggctattccggcggggacctggtagctcagcagcttttgggggcgctgtgcctgaacaaggcttttacgctcccgccccactgctgcatgctggagacagccaacgacccggatacggccatgcacctgcctgggatcggcgaccgcttgcagcgctttgccggcggcatcgcgtccgcgctgcgccagggcatgccgacggcccgctgagcggttatttttgcagaacctgcccatactaagggcggagggatgcaatatgatgaacagtaggcaatataaccgatacgtggcgcggctctcgccaaaatcgaaggtctggaagaacacgtgctttgcgtttctgatcggcggcgcgatctgcaccctggggcagctgttgctggtagccttcagcgcagtggggctggacaaggatgccgccgggacggcgacctcctgtgccctggtgtttctcagcgcgctgacgacgggcttgagctggtatgacgacctggcaaagctcggcggcgcggggacgctggtacccatcaccggctttgccaacgccgtggcctcccctgctattgaatttaaaacagacgttcgctgtataattaggatagtcagagaaacccgtaacaggcgagtatcaggactgaatccgacatatttttattgggaaggaggtacttgaagcggtcattatctcgcatgatttcagactgccacagagccggatggatgtagctgatccatctggctcatcttttctccgaaatattatatacacaggaggtagcaccatcaacactatacattcggcaaatcagacgcatggctggatctctggtgtcacacggtttggcagaaaccctgcaatgcgtttcctcatctgattctgtcctgcttttcacctccggtatgaccggaaaacagatcgtgattcagagaataattcttaaaaacaaacggaataaattccagagcaaattgcaaatttaatacatcgtgataattcgaaaattgaatatggcacaatttttcaatctgctcaatacggtaacggacggtattggcatgcacaaatagctgttccccggttttgctgtagttttgcttattgtgaaagaaaaccaatagcgtttctatcaaattgacgttggaggtaacttcatagtcgatcaacggtttaatataagtatagcacatcgaaacgatatccgcattgatgtcatcaatgccatgcagcttaaaaattcccaggtcatcatagaagtttaaacgctgttccggagccgcccatgcacaaacagccagcgccaacttggcttgcaggtagctgcgctgggttttattaaattgcaccagaccgccaatggcaatttgtaatgtattttgtcgcaactttttttgcaaaactttatagatattctggatgaattcacgataattcgaaatcgcttccggcaacaaaagcaccagctgctgctgatatggactaatgataatattgtttccaacagcagcaaaatatcgttccaacaacggttttattttctgacacagggtcggttcatctgcgctttccaaaatcgctacccgcaaggcctgaggcacgaaccaagagagtcgttgggccatggaaacagcttcgctcgtcgtgttgatttttccagagatcaggccatcaataaaccgttcttttaactgcagcgaatcctgctcaaaagcagcgatctgcaaaacacctgtttcacatgccgtcttagccgctgacagcaagtcaatatcattggtgctgtaaggcgcttcaggttcttccagccagatcatggcatcctgatttttcttataatggaacagaatcccaagcccctgggccgtacttgtctggcagcagaataattgatctgcctgcgctggcagcatggagaaattatttttcacatcgtatgtggtcaacgcggtaaacaacgccgccggcttctctttgggataataaaaaatattattttgcagcgtaataaaaacggatttccccgtccaagtaaataactgttttgcaaagccgtctaagccatcccgataaatggctctgaccaaaaatgatgtgacttgctcacgcagcaaataagagccagtacgatagcagtgaatatggctatagaaaaaatcgaataattcgtaaaactttatttccggggccaataaaataattggaaaattcaggtgattcgccgcatgtaaaacatattctggaagctgataatcaaagtatctcccttttagcgtgatcccgacaatgccttgttgcgataaattttggataaaaggaacgatctttgccggttccagagagaggaaatagccgctggagattgccagtgtatcggttttcagataagcatagccagtaaagccatcaagcatgctaagctgtttaattatgctatctcttccaccgcatccagcaataatacgg

SEQ ID NO: 592 - DNA, 18800 bp, Unknown
  16S sequences of unknown bacteria
tccgtaatctcggaaaagagaatatggacaccattgtggaaatcattttggatacggaccattccgggcacgactgtaccctggaacggctttgacagaacacaaaaggaggaattgttatgggacttgacatctacgccggaacattgacccggtactattctcacaattggaagacagttgtgcagcagtgggcagaacaaaacggctataccttcaaccggatcacaccgaatggagaacctgttgacaacgaggaggaactgtccccatcagaagttcaggcagaggtagagaactggcgggatcaggtgctggctgccatttcccagccggaccagcccccctacactccttggccggaggacaatgagaagccatattacaccgacaagccagattgggatgctttcggcgctatgcttctggtggccgcctgccatacatacaatgagccggtgcccctcacggtggaaaaggactgggatttcggggagcatcccctgatcacccgccttggatcggatgaggagcgggtgtggtcgctgtttcatggagcgacgtggtggattcccctgtcagatcccatcatgttccatggaccggtacccaatggaaatacagcggtattcagtacagtaggtgccctgcgcaaagagctggaacggctcaacgaactggcgtggcaggccgatgaggataccattctgagctggagtgaaacggaaggctatccgacagacggcattattcccgcgcatgggaaaatcagcagggcagatattcaggagcatacccagtttgatacccaatctctggccaagtttgccttctccatgttctggcaggctatgcggtttgcagaggaacagcaggtgcccatcctgctggattactaaggaggttttttatgggatacgatgtaagttttcacccgatttcaccagaggaaatgcgggaatggtattttactcccttaacctggatacagcagggacaggaggaaaaggtgctggcactcgccgcacagtatggaatagaggatttctatgcagaaaaatatctggataccctgcgggttggggctggaacagaatccgacgagctgtttgacaaaagccatggcttctatattgcagtgatccagggttttttccgggattactattacaccagaggcagtgccttttctttcctggtggaagaaaagccggaatatgagcggtacttcacctcgtgggatcaagtgactcctgtttccttaccaaaccccatgcagaaccgaatcatcgaaaactattgctccggtgtatatctgtctccagatcaagttatgcagcttctcaaagacatggagcaggaccccaaagtgtgtgaagatctggagaggatttggagcaatggacagattgctgtgctgaaaaaagcactttctgccgctgcagaactgggcgccggcctgctggaagccactgaagtggtagagccaaaccccatcagtccgaatgagagtacaagctattccaacctgtatcactgcgacagggacggggtgtatctctacatagatactgtcagtgctcaattggcggatgtgattggaaaaagtgaggaacaagcataagtggttgggagggttttatggaacaaaaacgcctggcagaaaatatctccatggttacctgtttatgatcagtttactgtcatggcagggagggatcgtttcgcacgggtatgcatggtgaaaatgtgataggacataaataggcaaggccagacaggagatctaaagtgttccccctgccaccagactgagtctggacgcaattcgcgttccaggctcattttctttgccagaattttgcacacgcggcagagagatctgaagcatttatgtgttttagattaaattataggcttggctttggtattgcgtttcgctcagcatagtaacaagatgccctttgcctctccattttgtgctataatataaatagcatcgcaagctatcgttcctgtgatgaaagggacagcgagattgtcccagtaggggtgtcctgtataaaatccggattggaggtatgagaatgaaacagcttcttttgatactgctcctgatttttacacttcagaggagatacattgcttctgcagtgccttccgcagaacaggatcaagccttggagcaatgggtggcagatcttgagcctgtctgtgaattcgaagtaactgaagaatatcctggcgttattttggaactattcgatcagctgacaaagcaaagaaatcagctgtctgatagtcagcaaattctgaataccaacctgcagtctgtaaccgtttacggaacgcagcaggaattttgcgccatctatactttcagcggcgaacaggagtatctcacagaatccggaagtaccagacaggagccattcggtgaaatgaccatgcgggtccggatgcgccagaagaacaaaacaacctatgaattagtagcgcagggaggcggccccattgcctatggcttagagaaaaccgacctgacgttagagagcattcagcagaatcctactcgttaatggaaagccccggtaccagaacagctcgtaccggggcttttttgtcattatcggatcgttctgacacaggaagctgcagataggtcaaatccgatacgatcgatgatctgattcccaataaagccgggaatctcttggcccgtgtgaccagacgcagggcgaaaggaatgctgcatattctgcagccgctgaaatccctgccaatttctgtacccgggaatattcacaataaaaagcatccgtctgttgcttcgaagctaacaggcggatgcttttttgtgtggatgaaaacagctccgttggaagagcatcattcattctccggtgaggagtcgttgtcattgcattgtgggtttgtcataatgaaccggtcgtcaatgttttttctccccattcgcacatgagttccagaatgtgctccagcgaccgtcctttttcagtgatggaatattctactctgggcagtacttccgcatatacggtgcgctggatcagtccatcaacctccagttcccgcagctgattggtcagtgtcctttgggatacctgtgtgatggcacgcatcagttcacaaaaacgctgggtgccattgcggatcaggctttccaggatcaaaggcttgtatttgccgccgatcattttcaaagttacttccatttccgatgtcactataatcttttccatcgctttcgtcctccaatagtgaacattttttcacattatgcaaataatgtgcgtacttgtggccttaattttgaaactatataataccagtatagtctatttttgcaataatgcaactccatgttgtgatgggagaggtatttcatggaaaaggtcattgaacctatgaccagtggttcgatcggtaaacggatgatgttctttgctcttccgcttttactgggcaatctgtttcagcagctctacaatacagtcgattccctgattgtaggaaatttcctgggcagcagcgccctggcagctgtcagctcttcgggcatccttatttttatgctgattggattcctgagcggcatctccgcgggagccggtgtggttatttcccagtatttcagggcggaagatgtccccaacatccagcgtgctgtacataccactgttgcctttggcatagcggcaggacttctgatgaccatcgtgggaattctgctttcgccgcagatcctggcctggatgggaactcctgaaagtgtaatgcctgaatccatttcctatctgcagatttacttctccgggtctttgggatttgttctgtacaatgtatttgtgggcattctgcaggcagtcggcgacagccggcatccgctgtattacctgatggtttcatcggtcatcaatctggtgctggatattctgttcattggatttttccataccggggtcggcggtgcggcactggctacggtgatctcacaggtgttcagcgccatcctctgttttgtgcagctgctcagaaccaaagagagctatcagctgcgcctttccagcatccgctttgacctgccgatgctggggagaattatccggatcggacttccctcgggtgttcagaattcgattattgcgtttgccaatgtggtggtacagtcctatatcaacgcctttggcgaaatggctatggcaggatatggcgcctataccaagatcgaaggctttgcgttcctgcccatcaacagctttaccatggcgatgacaacattcgtgggacagaatctcggcgccggacagaccgagcgcacccggaaaggagccaggtttggcattctggtaaccgttgtcatggcggaactgatcggagtgatcgtgatgctgtttgcaccccagctgatcgctgcatttgattccactccggctgttgtacagttcggcgtggaaaaggcacggaccgcagcgctgttttactgcctcctggcgtattcccattcggttgcctctgtgatccggggagccggcaaagctgtggtttccatgctgattatgatgaccttctggtgtgtggtccgggttgctttccttgcagtcagcatcccgttcactcatagtgttctgatggtgtatgcggtctatccgctgacatgggcactcagctcagtggcattcttcttctattacagacgggccaactggctaaatcaataacaaactgacagaaaggaagaactgaaaatgaaaattctgattctgaacggaagtcccagacttcatggaaacaccagcaaggtggtccggacaatggattccatgctggctcaggagcatacagtggagcttctggatatctgctctatgcagctgagcggatgtgtggcatgcgatgcctgtgaggaaaatggcggacattgtgtgcgtccggatgagtcggatgctgtgatccgcaagatcgcggaagcggatgcggtgatcttcggcacacctgtttactggtggggcatgtcggcccagctgaaaattgtggtggataagttctattcccaggactcccagttcaaaaccatgaagaaaaagatcggcgtggtcgttacaggggcaaacggcctggacaatccccagtatcgtctgattgatgagcagttccggtgtattgccgagtatctgcactgggatatggctttctcgctggcatttgcggcatacgagcacggcgaagtgatgcagcaggaaggaattctggctcagctccaggacgcctgtgagaagattgcgcgataagagaggagagatttgcagtgaaaaaactggtagttataacaggtgccagttcgggaatcggaatggaacttgccagacgattttcggcggagggacatccggttctgatgctggcccggagaagggaagtgatggaggagctgaaccttcccaacagtctctgccgcagtgtggatgttaccgatctggaagccatgcagtctgcggtcagagaggccgaggaactctatggaaagaccgatctgctgattaactgcgccggtctgatgctgctgggataccccgcagaacaggactttgacgagtggagccggatgatcgatgtcaatgtcaagggtgtgctgaccggcaccaaggcagtgctgtcggatatgattgcgcgcaatgagggcaccatcatcaatatcagctccattgcgggcagaaagacatttgataaccactcggtatactgcggaaccaaatatgccgtgcatgccatgaccgaaagtatgcgccgggaggtttccggcagcaatgtgcggatgatcgtcattgctccgggtgttgtagaaaccccgctcctttcgcatacctccaaccaggagatcaaggataactacaacctctggaagcaggagatcgatggaggtctggagccttcccagattgcggactgtgcctggtttgcctaccagatgccgcaggaggtctgtgtgcgtgagatcgtcattgccaagacaaagcaggcagactgattggaaagcaaggctttccccggcccctccgccggcagagagtattcatacagcatagcaaaaaagaccggatgcgcctgagagcgtgtccggcctttttgcaatttgaggtccgatgaaattttggctttgcggctttcaggtatctggcagttcggaaaatgatccggggtttctgccagaccggcatgcggcgctctttccctgccggcgctgtctgctgttcagggtgcggtcggagagagaagatgtattacagacccaggagtgccagacagattccgccgaacagggccaaggcagcgcatacagcaaacaggatcgctatgggaactccgatcagaatcagcagacgcagttccagaggatggtccagcagctgtgcggtggggactggggcagagtcgggggactggctgttttcaggcagacggtcgggatcaccccaggtcgggtccacatatacatcaggcttggctgcaaagcggaatatgcgtttcatcatcaaacatcctttccgattgatctgccatcagtatagccctttttccaaaaagagggtgttagggcttttctccggaaattaagacctgataaatgacggataaatcttaatgcgatcttaataccgggaagagcattttaatatcccggcaagtaaaaatttgttataatggagtcagtgtggaatgagaggggtgactgatatgtacgatgcacaagcacagcagaaaggcaggcagggccggctgaagatcttctttggatatgcggcgggagtcggtaagacatatgccatgctggaagctgcccatctggcacagaagcagggcgtggatgtggtggtgggatacatcgagcggcatacccgtccggatacgctggcactgctggatggactggaacagctgcccacccgcaccgtggagtaccggggcattgagctgcgggagttcgatattgatgcggcactggagcgccgtccccagttgattctggtggatgagctggcgcacagcaatgccgccggcagccggcatctcaaacggtatcaggatgtgaaagagctgctccatgcaggcatcgatgtctataccacagtcaatgtgcagcatctggagtcactgcatgatctggttgcttcgattacgcagatttcggtaaacgagcggattcccgattcggtatttgactcagcagatcaggtggagctggtggatattgaaccggatgacctgattgcccggcttcagtccggcaaggtctatcagaagcatcaggcttcccgggcgctggatcacttctttgtccgggataatctggcggcactgcgggagatcgcgctgcgccggacagcagaccggctgagcaggaatgcccagaagcggggcagtgaaacagctgccaaggcaggggaacatatcctggtgtgcctgtccagttcgccttccaatcccaaggtgctgcgcacagctgcccggatggcagaggcgttccacagcggttttacagccctgtttgtggaaacgcccgaaacccgggagctcaccggcgaaaatctccggcggctgcgggataatctgcggctggcagaacagctgggtgcgcagattgccactgtctatggcgatgacccggctgtacagattgcggaatatgcccgggtcagcggcatcaccaagattgtgatcggacgcaccaatcacaaggcatccccgctgctcaaaagccgtaccctggtggatcagctcacccgtctggcaggggatattgatgtctatattatcccggataatcagcccatttaccacagaaagtggatgcacaagccccgtcaaacccagccggtccatctgctggacatcctcaaggtgctgctgattaccagtgcggcatcactgatcaatctggggttttacaatctcggactccgggaagccaatattatcaccgtctatctgcttggtgtgctgatcgccgctgtctggacacccggtcacttctatggggcgctggcctcactgctcagtgtgatcgaattcaacttcctcttcacagtgccgcggttcaccctggcagccgatgaccctgattacccggttactttctttattatgctgcttgccagcatgctttcgagcagtctggcgacccgtgtgaaaaaacaggccaggcagtcggcacagaaggcttattatatggagctgctcatgaactgcaaccagaagctgcagcagggacgggacgaatgggagatcatccgggttgccgcagagcagatccagtcgctgctggaccgcccggtgctgtatgcgctggcagttccggatcaggagccggaattccgtgtgaccccggcggaggaagagggaatgctcgcctccctgactctggaagaaaagggcgtggcgaactgggttatcaggaacaacaagcgggctggtgccggcaccgatacactccggcaggcccagaacctctatctgtcggtgcgcggaaatctgggcgtcatggggattgtggcgatcccggtccggaactggcctccgctggaagtctttgagaagaatgtcctcatcgccattctgaatgaatgcggtctgatcttggagcggcacaagctccagaaggaaaagcaggccattgaactggagacccgtcaggaacggctgcgttcgaatctgctccgggctatctcccatgatctgcgcaccccgctcaccagcatcagcggcaatgcaggcgtgctgatggaaaagagcatccagctcagcgaggagaagaaacagcagatctacgcctcaatctatgacgatgccatgtggctgatcaatctcaccgaaaatctgctttcgatcacccggatcgagaacgggacggtccatctgcagatggaggcggaactgctcgacgatgtattccatgaggcgctggcccatattgatcgccagtcgagtgagcaccagatccatatggaactggaagatgatctcctgatggcccggatggatgcccgtctgattgtgcaggtgattatcaatctcatcaacaatgctgtaaaatatacacagaagggttccaatatcaccctgtccgggcggcgggaggagaatatggcagtgatctcggttgcagatgacggcccgggtatttcagacgaggccaaggagcatctgtttgatctgttctatactgccgaacatggcaaggccgacagccgccggggtctgggactgggactcaatctctgccgttccatagtcaatgcccatggaggaagcatcacggtttcggataaccgtccccagggatcgatattcacctttacattgccgttggaggaagtgaagattcaacatgtataaaccgaaaattctggtggtggaagatgaccctgccatcaccaatctgatgcgcactaccctggatacacaggaatatcagtaccatacagcccgaaccgggtccggcgccctgctggatgccgtttcctacaatccggatgtcattatactggacctggggcttccggatatggacggcgtggatattatccgcaagatccgcggatggagcgagatgccgatcatcgtcgtcagcgcccggagtgaggatcaggacaaggtggaggcactggatgccggtgccgatgattatctgaccaagccgttcagcattgatgagctgctggcccgcctgcgtgctgcccttagacggagccgtgcggattatggcacagcccagcagaatacggcagtctatcacaacggcagcctgaccattgactatgcagccggctgtgtgtatctggatggggaggaaatccacctgacccccatcgagtataaactgctctgtgtgctggcccggaataccggcaaagtgctcacccacaactatattctcaaggaagtctggggcagtgccctggcttccgataccccttcgctgcgggtctttatggctacgctgcgcaagaaaattgaaaaggacccctctgctccccgctatatccagacccatataggagtggggtatcgcatgatccgtcagtagaatcagaatcctgtttcattcagccgtcctgtatttgcagggcggcttttttctatggattttcctttatacggttttaacatcctgcctgaaacgctaagaccggcttcacggcaaacctgctacaatggttgcatggaaataaaggaggagatcgctatgatggatctgttaatggctggattgctggctggctgtgccggactggtactggttctgctgaactggtgtcaccgtcaggtcagccggaccgaatagggaggaacatggaatgatcgtacttggaataattgtactgctcctgggtggatacctgttttatgcactggtacacccggagaatttctgaatccggaagggggaagcctttgtgcttcagattgttctgacactgattctttatcttttgctgctgattccggtgggaaactatgtctaccggatcgcggcaggcaagcatacctttgccgatccggttatggaccgggtggatcacgcgatctataagctctgcggtgtaaaccccgagcgctccatggactggaaacgctatgccggtactctggtgggcaccaaccttgtgatgatcctgctgggatacctgatcctgcgcctccagagcctgccgtttctcaatcccaatgggatcgggagcatggacccatcgctctcattcaatacaatcatcagctttatgaccaatacaaacctgcagcattatgccggtgaaacggggctttcctatctctcgcagatgctggtcatcatctttatgatgtttgtatcggcagccagcggctatgcggcctgcatcgcctttatccggggcctggctggcaggacctccgatcaggtgggcaacttttacagcgatctggtgcgtattatcacccgggtgctgctgcccttctccatcctcacagggctgctgctggtatggcagggcgttccccagaatttctctgggaatatcgtggtggatacagtggagggcacgcgacagattattgccaccggtccggtagcggcgctggagagcatcaagcacctcggcaccaatggcggcggcttcctgggagccaactcttctacccccatcgaaaatcccaccattctcaccaatctcatcgagctctggtcgatgatgcttctgcccggcgcctgcgttgtcaccttcggcagaatggtgcatgaccgccgcacagagcccggcaccggcagcacagttccccagccggtgcgccacagcctgactgcccggttcttcggaaaagagggccgcagcatctttgccgccatggggattctgttcctcatcggcctggcggtctgcttcagggcggaaagccagggcaaccctctgctgtccgagctgggactgagccagtccatgggcagtatggagggcaaggaggtgcggttcggcaccgcgcagtcttcgctgttcacagctgtgacagcttcctttaccacaggtaccgtcaacaatatgcatgataccctcaccccgctgggcggcatggttccgctgctgcacatgatgctcaatgtggtattcggcggcaagggcgtcggtctgatgaacatgatcatgtatgccattctggctgtgttcatctgcggcctgatgatcggacgaaccccggaatacctcggcaaaaaggtcgaggggcgtgagatgaagctggtagctctgtgcatcatcattcatccgctgctgatcctgtcctttactgcactggcagtaactgtcccggctggcctggcagggatcaccaatcccggataccatggcctgacccaggtgctgtatgagtatgcttcttcggcagccaacaacggttccggctttgagggcctggctgataacagcttcttctggaatatcacaacaggcgctgtcatgttcctggggcggtacctgcccatggtgctccagctggcagtagcgggctccctgatgaagaagcggtttgtcaatgaaacaaccggcacactgcatactgatggaatcggatttgctgtgatcctggtatttgtggtttatatctttgcggcgctgacctttttcccggtgttggcgctggggcccatcgcagagcagcttactctgtgggcctgaggaggagtagttatcatgagcagaaaaaatcagaaacagatgactcccgagatgatccggcaggcagtcatcggttcctttataaaactcaatccgctgtatatgatgaaaaacccggtcatgtttgtagtcgagatcggcttcttcatcacactgatcctctcggtgttcccggggctgtttggagataccggagccaacctgcgtacatataacgcaatcgtttcggcggttctgtttgtcaccgtgctgtttgccaattttgccgagtcgattgccgaaggacggggcaaggcacaggcagccagtctgaaaaagacccagaaggataccaaagcccgccgcctggcagaggacggcagtgaaaccgtgattctctccagtgagctgaagaaggacgatattgtcctggtttctgccggtgagattatccccggtgacggcgaggttattgagggcatcgcttcggtggatgagtccgccatcacaggtgaatccgctccggttgtccgggagtcaggcggtgatttctgctcggtcaccggcggcaccactgttgtatccgactggctcaagatccgcatcacctccgaccccggcaacagcttccttgaccgcatgatcgccctggtggaaggcgcctccagaaaaaagtcccccaatgagatcgctctgaacaccctgctgctctcgctcaccatcattttcctgattgtgatcgtcacactgtatcccattgccgcctatgcgggcgtgcagctgcgcatctccaccctgattgcgctgacagtctgcctgatccctaccaccatcggcggtctgctgtccgctatcggcattgcgggtatggaccgtgttacacgcttcaatgtcattgccacgtccggcaaggcagtggaagcctgcggtgatgtggacactatgatcctggataagaccggaaccatcaccttcggcaaccgtctggcagcggatttcatgccggtatccggggccagccgttctgaactgatccgctgtgccgcactgaccagcctgcatgacgaaacccccgagggcaaatccaccctggaactggcacgccggctcggcgatcagaccaccgctccggatcaggtccagttccatgagtttacagcgcagacccgtatgagcggtctggatctgccagatggaacccgggtgcgcaagggtgcttcggatgccattgagcggtatgtcgcggcccagggaggcaaaatcccctctgacctgcatgagctggtcaatcaggttgccggtatgggcggtacaccgctggttgtctctgaaaacaatcagattctgggtgtcatctacctgaaggataccgtcaagccgggaatgcaggagcgctttgagcggctgcgtgccatcggcatcaagacgatcatgtgcaccggtgataaccctcttaccgccgcgaccattgcccgggaagccggtgtggatggctttgtggcggaatgcaagcctgaggataagatcgctgtcatcaagaaggaacaggccgagggcaagatcgttgccatgaccggcgacggcaccaacgacgctccggcactggctcaggccaatgtgggcctggcaatgaacagcggcaccaccgcagccaaggaagctgccaatatggtggatctggattccgaccccaccaagatcctggaagtggtggagatcggcaaacagctgctcatcacacgcggcagcctgaccaccttctccattgccaatgatattgccaagtactttgccattatcccggcgatcttcatggcggcaatcccccagctgggagtgctgaatatcatgggactgtcctctccggacagcgcagtgctttcggctctggtgttcaatgccattatcattccctgcctgatcccgctggcaatgaagggcgtcaaataccgccccatgtcctcgggacggctgctggcccggaatatgctcatctatggtctgggcggcgtgatcactccctttgtgggaatcaaactcatcgataccctgcttcacccggtgcttcttgccctgggcctggggctgtaagaaaggtgcggatttttcatgcgtgatacagtaagagattttctcagaacggcccggcagtcggtatcagttgctctggtactgatgctgatctgtggttttgcttatccctgcctgcttacagggctgtcgggagtgctgttcccctggcaggcaaatggcagtttgctcacagtcaacggtcagaccctcggctctgaacatgtggggcaggagtttgtcagcgactgctatctctggagccgtccctcggcttatcactacaatgtctatacagaagatgagaatggcagccggttctatctggacggcagtgaatttgccggtcttgcttccggctccgagaactatgcgcctaccaatccggctctgaccgagcgggtggagcaggatctcgccgatttcctggagaagaatccgactgtgaaggcagaggatattcccaccgatctgctgaccgcttccggttccggactggacccgcacatctccccggctgccgctgaggtacaggtgccccggattgcagcggcttccggcctgagtgaggaaaaggtgcgggagatcatcggaaacaacaccgaaggcaagctcctggggatctttggcaaggagacggtcaatgtgcttcgggtcaatctggagctggcacaggaaatgggcgtttgctgaaccgctgaaaggagagaagtgcgatgaaagagctgcatgtctatcagcctgcaaactgcatccaactggatagtctggcggtgaatcccacggtgcgcatgctgctgaccgtgctgtatgagctgcagcactggctgaaggcagctcccatcgtcagccgggatacggagaatggaagcacagtctgtctgcttttccgggactgtgcctgcacaggggaggacctctgccagatgttcggcagcgccctggcagatctctcgccgcgctggaaggcggatctgtatggaacagagccctgttcccaggaaactgtctggtaccggtttgcccgggaagaggcacagtgctgggtaagggaatcaaccctgtccggacggcaggcggagacgatccagtcgctttgcctatgcctgacctgcggcagttcccatgaagcggaggcagtgcagcagctgctacgggccatggactggaaacggggactggcggcagtggaatggaaatgcggggacagtctgggcggggagagcggcagggaattgccggagccgggactgtactgctatgagagtattttcgaatgtcctgaagccgaagcatgtctggcggcactgagcctggaatagaaggtgcgtctgtggatggcgtttttggcagaggaccgggagtgcgtggaattccaatggctgtatgatgccattgcccgccggattctggaaaaccggatcgaatgggagctgtccctgtacgaagcgatgaagcggctgggatactccattcaggcggatcagcggaggttcatgctctgcgatggtcagggacgccggcgctattttggtgcggacagtgtcaggaattcggaacgggccctgatgaaaatcctgttcccgctgaatttgcaggacctctaaagttgggcaaatcagatcgttttcctaaaaattagacaaaatactattaaaaatacagatatattttgtaatttttgcgtacagaatcggaaaatcctggtataatataggggaagggaacctccggatgcagttcacagaaaaccgggactgcatctggaaaacatctttcaaggaggaacggacagatgattgaatttcggaatgtttcccagagctacaaggaccataaagtcctcaccgacatcaatatgaccatccagtccggcgagtttgtcgtgctgatcggctcctccggctgcggcaagacaaccctgctcaaaaccatcaataagctcaccaccctggccggcggtgagatcctcattgacggggtctccacccgggatattccggacatcaccctgcgccgccggatcggttatgtgatccaggacggtggccttttcccgcacctgactgtggaggaaaatatcagtctgctgctggaaacagtgggtatgccgtctgaaaaaattccggcccgggtggatgaagtgctggagatggtaaacctggacccggatactttccgcaacagttttccggcacagctctccggcggacagaaacagcgtgtgggagtcgcccgtgccttttctgccaatccggatattatcctcatggacgagcctttttccgccctggacccggtgacccggggagagctacagaatgaagttgtcaagctgcagaagcgttttcataagaccatcgtatttgtcacccatgatatggacgaagccatcaagatggcagaccgcatctgtattatccagaatggacagatcgcccagtttgaccgtccggaagagatcctcaagcgtccggccaatgcgtatgtggaggagtttgtgggcaagaaccggctgtggggcaatccggcctatatccatgcagaggacatcatgaaaaaggctgtgatccatatttccaagaaccgcactgttctgcaggcactgcagatcatgcggcacaatacggtggattcgctgctggtgaccagcggacgggaacaccgtctggagggcattgtctggctgaagaacctgcaggaggtaaaggactattctgcatcgctggaggaatatgtcacacaggattatatctcggtctatgcggacacctccctgcaggagatcatcgatacagtggattatgatgccagtggcattatcccggtagtcaaccatgaaaatgaactgctgggcggtctgaccaagagcggtctgctggctactctgagcaagcggtaccgccgtgacagcaccgaaggtacggaggagtaaagctatgagtgaattccttacccaattcatggaacgccggggagaactgctggaactgaccatcgaacacatggaaatgacctcgctggcagttctggtctccctgattgtcggcggtctcatcggtatcgccattacaaagaatgacaaggctgctgccattgtcatcggcattgccaacctcatgcagtccattcccagcatcggtctgctggcctttatggtaccctttgtgggcatcggtcagaagcctgccatcatcatggtagtgatctatgccctgctgcccatcatcaagaacacctataccggcatcaccggcatcgaccccaaactgctggaggctgccagcggcatcggcctttccaaaacccagcagctgctgcggatccagcttcccctggccctgcccttcatcatggcgggcatccgtatttcggcggtcaccgctgtgggcaccgtcaccatcgctgcctttgccggcgcgggcggcctgggctggatgatcaatatgggtctcaacgccaacgatgccaatctggtgctgctgggtgcgatcccggcctgtctgctggcgctggctgtggattttgtgctgggcaaggtggaaaaagccatcacccccgaaggactcaagcccgcggataagatcgtctatatgccccggcgcaagcgtctggtccgtcaggctgtggcattggccctgtgtgctgtgctgctgatcgttccatcggtcagctcgctggtccgcagcttttccaaggacgagaaccggctgctggtcggcgctcagaactttaccgagggcatgatcctgggcgatatctatgtggagctcatcgagaccaggaccgatatcccggtggagcgggtatacaacctcaacggcctgatgatcaccatgccggcgctggaaaatggctccattgatatggtgaccgactataccggcatgctggcgccgcaggtgctgcatctgcccatggataccaatccggaacgggtctatgagaatgtccggaccggtatgaaggagcagttcggctttgaggtatcggagccgctgggattcagcaacacctatgtgctggctgtcaccgaggagacagcccggacctatggcctcaccaccctgtcccagctggcgcagcaggcgccatcgctgcggctgggcgccacaacttccttcctgatccgggaggatctgctgcccaagctcaaggcagagcatggcgttcagttcaaggaggagcggggtctggacggcaatgtgcggtatcaggcaatcctttcgggcgaagtggaagtgaccgatgcctatgaaaccgatgcgctgctgatgaaatccgggctgcactgcctggaggacgacatggaattcttcccgccgtatcagtgcgtcaatgtgatccggggcgatgtctatgagcggtatccggaactgcgggaggttctgccgctgctggacaatgccatctccaccgaggagatgcgggaaatgaactacaaggtggatgtggagggcatgaccacacaggaagtggcacatgaattcctggtggaaaagggtctggtctgagaacttgcgg

SEQ ID NO: 593 - DNA, 5061 bp, Unknown
  16S sequences of unknown bacteria
cgtactgaccctgcgggaggagtcgatcgacgatacggcgccttatgagattttcgatcccgaccatatctggaaacgcaagacggtcgaaaacttccgggcggtgccgctgcaaaagcagcttttccggcagggagcctgtgtctacgaccttccggggatcgaggaaatccggcgttactgcgcggaacaggtggacacgatgtgggacgaggtgctccgcttcgagaaccctcataattattacgtggatctctcccagcccctgtgggacgaaaagcagcgcctcctcgcggagtacagccgctgagccgccggcttccccgtccataatttgttaatggtctggtcgattcttattcacacaaataacacacataaattgtagaataaagacaatttgtgggagtggaggaatcgaggatgccgaagttggtctatgtgtacggggacgacaataaaatgctggacactctggtgaccagcctgcgcaataacggatattcacttgaatataccaatatcaccgacgagctcagttccggcagcatcacagccgatatcgcactgatttgcaagccggtcgccccgaccagccgcgtcaccctcggcggggtgtcggtggatctcgacaatatggccgcttacaatgcccagggggaggaaatccatttcacccccaccgagttcgccatgctcacttatctgatgaaaaatgcgtcccgggccgtgcctcggagcgaattgcttcccgcggtgtggggatttgaaaacgattcgagcacccgggtggcggacgacacagtcaaacgtctgcgcaaaaagctccataacaccgggctgtccatcgaaacagtctggggttacggctttaaggtgcgggaatcacgctgaccgacaggaggaccggggttccttgatcgcaaaaggggagctggatgatttccgggtacccgcctgcctcccggacgagggacaagctactccgcccgccgcccatatgggaaagaggggactctctgcccggacattccctgtgaaagccatgaaaaatcgacccgctgtgcggctgcgcagcgggtttttcacgatgaaaggacgccgtgttatgaggaatatcatctgtacgtcctgtccccgccagtgtaaagcggcgagatcggcgcgggaaggaaaaggatattgccggatgccatatgggcccgtggtggcgcgggcggccctgcataaaggcgaggaaccctgtatcagcggggatccggacgggccgggcggttctggaaccgttttcttctccggctgctccctgtcctgtgtcttctgccagaacgccccgatcagccacgataggttcgggaaatccatcacacccgcccgtctcgcggagattttccgggagctggtggaacagggcgcatacaacatcaacctggtcaaccccacccattttgtcccggccattctggatgcgctcgccctctaccggccgccggtgcccatcgtctataacacgagcggatacgaacgggtggagatcctccgccagctcgaaggggcggtggacatctaccttcccgacctgaagtacgccgacgcaggcttgtcggaggcgctgtccggcgcggccgattatcccgcaatcgccaccgatgccatcctggaaatggcccggcagaccgggcccatgcgtttggaccgcacaggttttgctgtccgtgggaccatggtgcggcatctggtcctgcccggacacacccgggattccatgcgggtcttggactggatgtcggagaatctgcccgccggcgttttcgtcagcctgatgttccaatacacccccatagctgccgtcccgggccatccggagctctctcgccgtctgacgccgcgggaatgccgcaaggtctggaattatctgctggaaaagggcctgaccgacggctatgtacagcagagggagagcgccggcggcgccttcattccggcgttcgacctgaccggtgtctgaccggcccgacaagaaaggggctgcggcacctgggatggggctgctgtattttttcagtcccgcgcccaaccgatccccgggagcctcgggcccccttgttatatgaacgttctttcaggagatgccgtatccgccgattttcataaagagaaaatcggccaattttctgggggtctggggggcaaaacccccagtggtgtttttgcatccttttgtcgctacgagctgatgctcggacaaaaggatgtggccgcgcatccgatctccttttcagccggattccgcgcgttatgcgcggacaaaccaccatacccgtctttttcaggtttggcctgtcccctaatttccgcctatcccggccggtaaccgaccgcgctttcatttgccggcataaacggcagagcgcttttccgagaggaacacgtagtacccatccacctcccggatctgtaccccgccgaaaatggcaatcaattttcgcttgtaccagtccctccgcttggtcaccatcaccattttcccaccgatagccagacgattaaagcccttctcgatgaagtgcttggccacacggaaatcggtgtgatacggaggattcgacaggatgagggtgtagccggtatccgggatatcccgaaagccgtcgctccggaagacccgcacctccggaaccccgttttgcaccgcgttctccctggccgcagccaccgcccgctcatcgatatccgccatcgtgacccgctccccaccgatgagcttcgcggcgtatatccccaccacgccgtagccgcagccgaggtcgaggaccttgtccccgggcgaaatcatagtgcaggcaagcatggcccgggtaccggcgtccatcgcactcggcgaaaacagcgttttttcggtatggagccgcatcgatattccgttatattcgaccgtgatcatacgctcccccctatccgatgcggattataccacaccgcacgcctgataacaagccgcacgtggcacaaactgcattaaaaaaggaggcatacccgatggataaaccagcggttttgcagcagtgggtggaggacagccactccatcgtcttctttggcggagcaggcgtctccaccgaaagcggtattcccgatttccgcagtacggacgggctctattcccaatcgtacgcctatccgcccgagaccatcctcagccggtcatttttccagcggaatccggcggaatttttccggttctaccgcgacaaaatgctggctccggatgcgcagcccaacgccgcccatcggaaactggccgaactggaacaggcgggccgcctgtccgccgtcatcacccaaaacatcgacggcctgcatcaaaaggccggcagccggacggtatacgaactgcacggatccgtccaccgcaacacctgccgccgctgtggacgccgcttctccctcgatgagatcctgcacaccaccgggatcccgacctgcccctgcggcgggatcatcaaacccgatgtcgtgctgtacgaggagccgctggacgaatccaccgtcgcgagggcggttcgggcgatcgagcaggccgatctgctcatcgtgggcgggacctcgctgtcggtttatcctgccgccggcctgctccgttactatcgcggaggacgcttggttctcatcaaccgcgaccccaccccgttcgatgaagaggccggcctgctcatacaggaaccgatcggccgggtgctgggcgccttgtgcgttccctcagggggatgaatccctggacggcagccgatatttcctatgtcatcggaaagggcggacatccactcggtgcccgccctttccgattgcgcattattcagattcccggctccggaattccctgaccgaaacaccggtatgtcggcggaaaagacggctcaggtaattctcatccagcagccccacgaacgcaccggcctgtttcagggacagcccgcgcacccgcatcagctcacagacccgttccattttcagccggttgaaataggcgatcaggctttgtcccgtatgccgtttgaagaccgtactcaaatatcccgtactgacgtttagggacgccgcgatttcttccgcccggatgggccggtccaagtgttccgccagataatggagcgcggcgtcggccagcgcggcgccggaatccaaccgtccggtacccgaccggcttccacagggctctttcaaatccagcagggagaacaattcaaagacgagggagacgcatttcgccgagcccggtccggatacggcatactccgcaatgatgcgggaaatcgtctgcccggccagcgcggccgctgtaccgggacacaacaccaagggcagcacgagcgcgtcttccgccgatgcccgtctgaaggacatctggagcccgacggtacggtgaaggcaataccctccctcgccgtaataccgcaccggacaggaatagtcgttcacgactaccgatcccctcggtatccgcacagtacggccgccctgctcccggctaacatccccttcgatcaaatggcagatttccaaacggtctgccatgaccgggaaggggatgtcgtactccctgctcccatactcatgcgcaaaccaaatccgtggtatcgattgcggcaaaagtgtcacggtgtccattttcatccctccccgggcaggatatttacagtatacagcagccgaagagatccggcaagaaaatcgttgttttgtgctactcatgcgttggtttatgcatacctttttcaacagacgccgctataatggatatagaaaaatatccatgtcgaggtgaggcggcatgtcccatttggaacggctgaaggctcaggtttccgtccctcttccggagggatggaaacgaatgaaccacgtttatcaatatcagggataccggcagcactatggcgatccggtccccattgccagggcatacgcgcaggaggccctctgccgcctgcatccgatccacttgtatgaagacgatatggtgctggggtccctccgttcgatcggctcggccgatcccgc

SEQ ID NO: 594 - DNA, 6182 bp, Unknown
  16S sequences of unknown bacteria
gggctggcactgctagggatttccggcatccggcgcgtcctcgcccggctccctactcttcgtcgcgctctacgctctcgacgagctcgccgtaccccttcagcgcggcaaagggcatgaacagcctgcccctgtcggccgcggcgacggcaacgcgcggcccatccgcctcgacacgccgacgtatatcggcaaggaccgcctcacggtgctcccgttcgagctcgggaaggtccggccacctctcgatgccggggatatgcggatccgcttgctcgtctctacgcacgatgcccaccgacctgcagattgcgctcgcgagcgttggcttcgcttctcaagctcgtgccatgcagcagcgcgttcttgccaaaccgctcgcgcacggcagaagccgcctgcgccaccctgcgctcggccccgtcgtcctcgtcttctgcgccgaacagcgcaagctgcgcctccccttccggcacgagccccgtgagcgcgatgttgacgcggcggatcttctcgcccacgccaatccgctcgtcgaagagcgcgagcagctcgcgcacaagtgcctgacgagacgaggtcggctggggcagcctgtggcttgccgccgcccctccttcgcccgaaaagcccacatagagccccaccccgctgcagcacaggcgcttttcgagcagctcgagggcgctttcggacaccatctcgcgcagcagcgtacgcgcctccgcaggcgtgtagtcgcgcatgagcacctgcccgttggagagcgagtgcccccgcggcacgtaggccttgatatcggcgattgtgcacggctcgagcccccatgcatggtcgatcaagtgctcggcattcttgccgaactcgcggcgcaacatgctgggcggaagcgcacatacccccgcaaggtcccgcgcgcccatgcgctcgaggcgcgcggcgatgccgtggccgataccccacacgtcggtgatggggcggtggaaccacatttcccgacggaaagaatcttcgtccagaaaaccgatgccgtccggtgcgtgcttggcgagtacgtcgagcgcgagcttggccagaaacaggttggtccccacccctgccgtggccgtgatgccgatctcttcgcggacggccgccatcatcttcgacgccagcgtgcgcgcgtcggtgtggtagagcgcgaggtagggtgtcgcctcgatgaagcattcgtcgatactgtagacgtgcaggtccgccggggcgacgaaacgcaggtagatcgagaccacctgcgcggagacctccatgtagcggcgcatgcgcggcatagcaacaaggtgctcgattcccgcggggatatcgcggatgcggcagcggtttttcacgccgagtgccttcatggcaggcgtgatggccaggcatatcgtgttggcgctgcgcgtgggatcggccaccaccaaattggtcgagaacgggtcgagcccgcggtcggcgcattccacactcgcatagaacgacttcaggtcgatgcacatgcacatgcgcggcgtttccgattcccctgtcacagcccctccttataatcgaacatatgttcgattatagtagaccgaatgagcacggcaaagacggcagagggcagtttttccacaagacgaggggagactcgcaaagacatggttgagtaccggaccagagacggcgagccgaggcgcgtgcatcgcgagtacgtggacgttgtcgcgcgcttttcccgcggtgggcaggtcgaacccgtggccgtgcagtggcgtgacggcaggagcttcttcgtcgacgagattctggggcgcgagccctttggcggaacggagcgaggcaaaagttccgagcgctaccgcgtgcgcttcggaggtcacgagaccgatctgtacttggagcgcaccgccgccgtccccgccctgggagcccccgaagcgctgcgctggtgggtatatgcgtacgactgcgcgcagagcaaggaggggtgattggattcgcgccactgagggttggcagtgccaggaattcttggcatttgcggccccctcgccactcaagattggcactgccagggatttccggcgtttgcggtctctgcgccacccaggattggcggtgccagggattgctggctcgctggcgcgtttttctggcactgccagggattgctggcgcggggcgggttttcgccacccggtcctggcactgccagggattgctggccttcgccccctccgctccccgcgggctccgcgcccccgggcccgtaaccaaatcgtcgtttgaccctaatgcatctagttagatatattctctaccatcacaaacgcaggacaagaaaggaggcagccggcgcatgagagaagactcgtacctgataatcgcgctccaccggctcgtgaaggacctcgaccgcgagaccgccgccatcagctcggcccacggactcaccctcccccaattcgcggtgctcgaagcgctgctgagcaagggaaacctcacggtcggcgagatcaaggaagccgttctcagcagcaacgggacaatccccgtcgtcatcggcaaccttcagaagatgggcctcgtcgagcgcgcgcaggacccggccgaccaccgcaggcgcgctcatcgagcggatcgcccccgaaaacgagcggatgttcagagaaaagttcggcgtttggacaaaagacgagaaaaaagaactcgtgcgattgctggccgcgtaccgaaagcagacgcgcggcgcgcacgaagaatagaaaggcacgcacatgctcagaaaagtgaacagccaggtccagggataccgtgcggtcgacggcgcaggagtcagcctcgtgcgcgtgctcggcaacgagacgatcgacgtctacgaccccttcctcatgctcgacgcgttcgactcgaccgaccccgccgattacgttgcgggcttccccatgcacccgcaccgtggaatcgagacggtcaccttcctgtccaagggcacgatcgtccacgaagaccacctgggcactaaggcggccatccacgacggcgaggcccagtggctcaccgccggttcgggcgctttccattccgagatgccccagccggccgagcgcatgctaggcgtgcagctgtggctcaacatccccgcacgccacaagatgaccgcggacccgttctaccacggcatcctcaacgacgagattcaggagttctcgctcgatgcgggaaagctgcgtcttgtcgcaggctcgtaccagggccattcgggcatccagggcaagtactcgccgctcgatttctacgacatccacctggagccgcacggaaaggtggaactggacgtgccgggcgacaacaaatccgtcatggtcttcacgctggaaggcgacgcggtggtgagcggtacgccggttgccgcaaagaccgccgccaagctgggcgaaggcgacacggtgaccatcgaggccggtgacacctcaatcgagcctatcgcctggtacggcccgatcgtcatgaacacgcatcaagagctgctcgacgcgctcgacgagatcgacctgggcacgttcatcaagaaggcggcgacgtacgagaacaagtagtaccgcgctgtagagacgctcgcatcacacgccgcgcgccatacggggtgcgggcttaggcgacctgcctgccctgcgccttgcgctgctttgccaacccctctttgagggcgggctcggtcttttgcaggtagttgtcgaagtcgtagtgatcgcgccccttgagcggcagctctgccacctggtagagcaccttgagcgccgactcgtactttctgttgtcctgcaagatcacgatgaccttctcggcaaagtgcatgcgcgtgtagttgctgtgctcgccttcccaccactcgtggtagtcgctcatcagatgcttgatgttgcgcttctcgttgtagcgctcgaggatgggcatgcacgtctcgtgctcgtctttggcgtcggccttgttcttgggattgctcctgaccgtgtggatggtgaccagaatcccgataatcaagacgggaaacaggaagaggagaatctggtccggctggaagagcttgatcagcaacacgcagacgacaatcgccacgatgagcacgcccgtcgagagcccgatctcgagcggggaacgtttgcgccgcttggcgtatgcctctgaaaacgcaccggctatgcttgccatttgcactcctctcacttcccgcggtgcgccgccgtgcaggcggccgcacaacacatcacacagtaccatgcgatagcggaaaaatggtgcacagccctccggacgagggccgtgcacctaggtcaaggactattcggagtccttctcgttctgcttgcgctcggcgatctcgttttcgcacttgagcaagacttcgttgttgatcctgtacccgaacaggaggatcagcatcgagatgacgcacaggatcgcgggaagcacgaaccagccgttgacgatgccttcctgcagggcaggcgtggactggtcggcggtcatgccggcgacgaagccggccgcacccaggatggcggggatgacgacgccacgggcgaagaagccgatcttgaggggcaggacctgcaggccggagatccaacctgcggagttcttgccggtcttccactcggagtacacgacgcagtcgccgtacatcgcgggaatgaccgcgtagatgaggccgtagccagcctgcgcgatggacatgcagaccacgacgaccatcatctgggcaaacatgaagcgcgcgatgagcagcatcgcgatcatgacgatgaaggcggtgatgaccgcgttcttagaacccttcagcgccttggcaacaggaccgccgaggtaggcgccgacgacgcaggcgatgttgctcgcgaagatgtaggtggcgagcatgccggggttgaacgcgacgaaggtgaagtagtacacggccgtgccgccgacgacgaagttgaagatccacttggcgacatcgccgagcatcaggaagataacgttggggttctgggcgatggaacggccaaggtcgccagcgttgttgttgctcttatcggttttcttgctggacttccagttggcgagctcttccttcgagtactccttctcgtagcccttcgtcatggcgaagtggacgttgtagagagcagcgaatacgcagccgaagacgaatgccgcaaacgcgtagttagcaggtgcagctgcagggtcggagttctggttgccgagcagcatcgcgccgagcatggcgacgggcgggaagatgtaggcaaacaggatcttcgacgcgttggaccacatgccgcgcgtggacgcgaggtgcgcgcggtcttccggcgtctggccgacgactgcgatgagcgagacgtttgccacgtacgggaagtcccagcagcagtgcgacgcgacgtagaagatcgtgatcagcactgcggtgataaccgggttgtccgagaacctgaagtaatcgagtccgaacaagatcgggacgatccacggcatgatgaacagccaggaacggtagcggccccagcgcatgggcttgatcgtgttgatgatggcgccccacagccagccgacgatcgcgtcgatgatggagcccacggttgagacgatgccggccagcaccgggtcgagcatcgcgcagttggtgaggaagaacacgaagtagtagttctccaccgaattcatgatgttgaagccgaagtcgccaacgccgtagaagaccttcaacggcttggagaggggcttgtagtctgccggcagcgtcggctcggatgccccgttgcccgcggcgacgtcttgcccttttggcacctccgccgcagtgaccttgttctcgtcactcatgcttatcccctttcttcttccatccttgcccgcctttctctgcgccgacgcgacccccagcgccgcgtcggcgcagcttgcggatgcacggaatgcgcgtgcccctcagctgcccttgcagccgcggagtcaccacagtccctactttgaacaaggattcccgaagacgtgaggaccttcaatttgcaaacgagacagggtttttctcgggattgtatgcaagctgcataagcgcaaatggcacgaggggccgtgggtatcgtgccaaagtgagacgatacccacggggatgtgcggacaatttccga

SEQ ID NO: 595 - DNA, 30599 bp, Unknown
  16S sequences of unknown bacteria
tgcgcctgcgggcgcaccaaagggctttcctcggggcaaacaatcggcgcggttcgcactgccgtgcgctccgcttgttgtttgcctgaacgaccggtcgctaaccgccttcggcggttgtatccactggatacccgcttcccttcgttcccctttggaaaccttcggccccgaaggttggcaaagttttcccatggagctgcaagccccgccacccgcgccgcagtcagcgcgtcaagccctcggcgggaactttttacagcaaaactggctttttgccaccgcttgcccaaatgaaacgaatgccgccggtaataaaaccggcacgattttttaccacccccaatcccttcccttttgaaaggagaccccctatgcctaccccttgcgattccgttatccgcgtcaccctcgatgggaaaaccgacgcgttccctgtgaataccaccgtccagaccgtgatcagccgcctgctggacgcgcctgcggctgccgcggtcctcggcgtaatgcagggcggcgtgtgcagggagctgaacgaatccctgactaaagactgcgaactcaccagcctgacctaccgggacgaagaagggcggcgtatttatgaacgctctctgcgcttcctgatgctggcggcgacattgcgcctgcatcccggcagaagggtgcgggtgctgaactccgtgggctacgggctgtacgtccggctggagagcgagctgacccacgcccaggttcgggagatcgaggcggaaatgcgccgcatggccgaagctgatcttccctttgaaaaggaacattggacccgggaacaggccgtgcagtattttgaaaagatgggctggacggataaggcggagctgatgcgctaccgcccccgccgggagatcatgatgtaccgcatgggcggtctgtgtgaatatttctacggcgcgatgctgccttccaccggctgggtgaaaaccttcagcctgaagccccatttccccggcatggtgctgatgatgccctcgcccgccgacccgagccagtcggccaaataccaccctcataccaagtttttgcgggtcttcggccagtcgcaggaatggtgccatattttgggggccaataacgccgccgacgtgaaccggatgattcaggagggcaagctccgggagttcattcgggtcaacgaagccctgcacgataagtccctgtcctatatcgccgacgagatcaccagtcgcggagccaaggtggtcatgatcttcggcccgtcctccagcggcaagaccaccttcgccaaccggctggccgtccacctgcgggtgctgggccgtcagccccggctgatctcgctggacgacttctatctggatcggtccatcctgccgctggagaaagacggaaagcccgatctggaatccatcgacgcgctggacgtgccccttttgaccgaaagcctcgaagcactgcttagcggcgaaaaggtggaaatgccccagttcgatttccagatttctgcccgcagccccgagactcatcccctgcagatggggccggacgatatcctgctggtggagggcatccacggcatgaacgaccgcatcacctcggaaattcccgagcagctgatgtacggcatttacgtcagcgccctgagctgcatcaatctggacgatcataaccgcatccgcaccacggacgtgcgccttctgcgacgcatcgtgcgggatgtgaagatgcgcaatacctcccccgaaaagaccatcgacatgtggcccaaggtgcgggccggggaggaacggtggatcttcccctatcaggagcgggcggacgtgatgttcaacacctccctgcattacgagctgccggtgctcaagaccatcgcctatgaaatgctgctggccattccccaaagcgcgccggaatatctggcggcccaccggctgctgaaaaacctcaattatttcctgcccgtggatggaaaggtcatggacgaaatcccgccgttgagcatcctccgggagtttgtgggcgaatgttcgttttacgacattcattgacagaaagcagacaatatagtataaataagcggttatcttcaccctcccaggcaacgaaaggatgttatccaagtggaagtactgtcccagatcctggaaatactcaacgctattttgagcggctggttgatgctgatgctggtgtatcagctggtgattacgtttttcggctacaagcgcaatacgaaggattatcaggaccacgcgccgctgatgcggtttctggtgctggtgcccgcccataacgaggaggccgtcatcggcgacatcgttcagaacctgaacgagatggagtatccccgggaaatgtacgatttctacattctggcggataactgcaccgaccgcacggcggagatcgcccgggggctgggggccaacgtgctggaaagctggaaggacagcccggacgcgcctaccggcaagcccatcgtgctgcaaaaggccctccagacgctgggggactatcagaaccggtacgatctggtcatgtttttcgacgcggataatctgatcgacaaaaacatgtttgccgaggtcaacagccagtatctggacgccaacggtcaggcggatattatccagtgctatttgggctgcaaaaacaaaaaaggcatcgtggccatgttctattacatgacctatacgatcaccaaccgttttttccagtacgccaagagccgtctggggctgaacagcgtgatcggcggcacgggctttgccgtgtccgcggagtacctgcaccgccggggcggatggacggccatgagcctgaccgaggacttcgaactgcagatcgagtccacctgtgagggcaagcgcatcctgtggaaccacaacgtgcgtatttatgacgaaaagcccaccgccttccgggccagcttccgtcagcgcacccgctgggcccagggccactggttcgtggcgttcaagaacacgggcaagctgttccgggcgctgttccagaagaagatccgcttctccgagttcttctccaccttcctgtacatgtacagcctgacgccctacgttattctgatgttccagctggcgatgggcgcgctgatgcagatttttgtgtggctgggctggcttcccgctacgccgaagaccgcctcgcccaacagctggctgaccatgaactggcccagcattgtgctgttcttctattcctttgtttttctgttctatctggcggactggatggacaaccgctgccgtatcgagtggaagaaattcgtgcccatgctgatcagcgtatttctgaataccgtgctggccggatgggcgcaggtggtgggtctgttcaagcaccgcaaacagaaccagtgggtcaagacggagcataagattcacgataaggacgatatgaccgtgaacttcgacgtggccgcgcctgagccggaagcggaagccgccgccgaagaagaaacggtttcctgcgaagaaaacgccgcagcacgttgacattcccttcttccgctggtaaaatagctgcaattaaaggaagaaagggtggttttatgctggaagagaatctccgcaccgggctcacgttcgacgacgtgctgctcattcctcgtgaaagccacgtgctgccgcgcgacgtggacacctccacgatgctgactcccaccatcaagctgaacgtgccgcttctgtccgccgccatggatacggtgacggacgcccgtctggccatcgccatggcccgggaaggcggtctgggcatcattcataaaaacatgacgatcgaggagcaggccgcgcaggttgataaggtcaagcgcagcgagcacggcgtgatcaccgatcctttttatctctctcccgaacatctgatccgggatgcggaggcgctgatgtcccgctaccgcatcagcggcgtgcccatcacccgtggaaagaagctggtgggcatcctgaccaaccgcgacctgcggttcgagacggacgattcccgccccatcggcgaggtcatgaccagcaagaacctgatcaccgctcccgtgggcaccacgctggagaaggccaaggagctgctggcggcccaccgcattgaaaagctgcccatcgtgaacgaagagggcgagctgtgcggcctgatcaccatcaaggacattgaaaagagcaccaagtaccccaactccgccaaggatcacaacggccgtctgctgtgcggcgcggccgtgggcgtgaccaaggacgtgatgcagcgggtcgaagcgctggtggccgccaaggtggacattatctccatcgatacggctcacggccataacagcggcgtggctgaggtactgcgcatgatccgcgcggcctaccccgacctgcctatcatcgcgggcaatgtggctaccgccgccgccacccgtgccctgatcgaagcgggcgcgaatgtggtcaaggtcggtatcggcccgggcagcatctgcaccacccggatcgtggccggcatcggcgtgccgcagctgacggctgtggcggactgcgccaaggctgccgagggcaccggcgtgaccatcatcgccgacggcggcatcaaatattccggcgatattcccaaggccatcgccgcaggcgcgcacgccgtcatgatcggcagcctgtttgccggtgtggacgagagccccggagatatggaaatttatcagggccgcagcttcaaggtgtaccgcggcatgggcagcctgggcgccatggcgcaggcccacggctccagcgaccgctacttccaggaggcggacaagaagctggtgcccgaaggcgtggaaggccgcgtgccctacaagggaccgttggcggacaccgtgtatcagatgatgggcggtctgcgctccagcatgggctactgcggcacccccaccattgaggatctccgccgggacggtgagttcatccgcatcaccggtgcgggcctgaaggaaagccatcctcacgatatccagatcaccaaggaaagccccaattattcccggatgtaatgcaaatggatcagcggcgggccacaagacccgccgctttagattgccgaaaaatccctgacccccagcactttgcggcccgccccaaccctatgggttgtcgcgggcttcggactgcgctgccgctgtgcggcgtgctcgtcctcgacgcttcgcgcccttgatgcggcccccacccctgcgggttgtcgcgggcatcggactgcgctgccgccttgcggcgtgctcgtcctcggcgctttgcgcccttaagctggttcacagaaagagggcggtcgcgcaagacttagggacgctgttccgcaaccatcctctgtggcccttccgtgctaaattttcgttttggttgacggctgtcagccgcccgattggatacaaaaaagcccccggagaaaggcaagccccatggcttcttcctccgggggattcgtttgtgggtcagtttttttcttccgaagcccgaagtgcttcttcaacggccttgcgccagtcgttgtcctgctccatgggttccatttcttcttccacaggcagctccgccggaatttctggatcctccgcaggagtgggggtgggctcgtccagattgctggaaatggccggacggttcgccttgccgcgcttgccccgggtctcctgattcttgggcttgttttccgggctctgctggggtttctgccacttgatctcctccaccgggaaggtcttgagttccgtggtgtcgcccttggtcagacggacggtgacggtttccttcagaatgttcaggtcggtcacggtgccaacgccttcgggcgtttccgcttccttgcccagcttgggcatcttcttgcgggtggcctcgtaatggtcttcctcaaacttgaggcagcacatgagccgtccgcacacgccgctgatcttggtggggttcagggaaagattctgttccttggccatcttgatgctgacgggctggaaatcccccagaaagctgccgcagcagatgggccgtccgcaggggcccaacccgcccagcatcttggcctcgtcccgcacgccgatctgccgcagctcgatgcgggtgtgaaaaacagaagccaagtcctttaccagcgaacggaagtccacccggccgttggcagtgaagtaaaagaggatcttggtgttgtcgaaggtctcttccacgcccaccagcttcatatccagcttgtgctcttcgatcttccgctggcagattttgaacgcgtccttttcgaaggcctcgttgtccgccgcgtggcgcgcgtcctgaggggtggccacccgcaccacctgcttgaggggggaggcgatcaggtcgtcgtccacctgacgcaccccggtaatgacctgaccatattccagaccccgggccgtttccacgatcacgaagtccccggccacgggccagagccggccgggatcaaaatagtacagctttccggcatttttgaaccggacgcctacgattgccgccatgttttttgttcctccaatattgtcatcatcagctgatccacggtggactgccagttcacctgaccggcccggcgcttccgcgccagaaagaccgcgtccagcattcggttcaggcccgcttcgtccgcctgaggaagacaggctcgccacgcggcgggatactgggccagcgccccttcgggcagaagccccgccttggcgagcatcgcctgatgcagggcgttttccagcaagatcaggtattgatcggcagtttcccgctgatcctttaaccgggtggacaccttcaatacgtctgcgtcgctctggagggacagcgcgtccgttaaaaattcccggtctttttcctccagcccgtcgccgttcagcacttccagcgccatgcctatgttgccgcccgccagccccaccgccgtggggatccgggcggggtcacagcccatccgggtcagcgtttccgtcatcagctcgtccggccagggacgcatcttgatccgggcgcagcgggaagcgatggtgcccagcgtggccgtcagctcgtgggtcatcagcagaaagaccacccgcgctaccggctcctccagcgatttcagcaggcagttctgggcctgcggggtcattttttccaccggctcgatcagcaccacccggtagccggtgccgaaggaatgctgccccaccgcgcggatcacgtcgcgcacccggtctacgccgatctgcttgccgtcgtccgcaaacagggagatcacgtctggctcgttgtcgtcccagaccctccggcagccctcgcagacgccgcagggcttctcgccagtttcggacgtacaaaacagggcgctggccagcagcctggcaaaagttcgtttgccaagcccccgagcgcccgtcaggagatatgcgtgaaccatttccccggtttgaaactggtgaagcgccgttttacagctggcgctcaggcggccgtaatccgtaaagaccggccgccccgcctcccgtggtatctgtgccaagctctttccgtctccttacagcttcacaaactgatccaccgtgagcacgaaaatagtcgcgccgcctaccaccacttcgatgggatagggggtgtaggaccccggcatacccaccatggacgcgggcgagggcgcgatctgcttgcggctcttgcaaaccttttcgatcagatccatggcctcctgaaaacggtcgtcctctacgcctaccagcagggtggtgttgcccgcccgcagaaagccgccggtggtggccagcttggtgacgccgaagccgtcgttcatcagttgtccgatcaaacgggaagaatcttcatcctgtacgatagcgatgatcagtttcatcctcgttcctcctcatttttggttgcccgattttccctttcagtatacagcaattttggctttttcgcaactggggacttcagggggcgcgaagccgtctttcctgcggttgacgggcgcggcccgccatgctacaatgatgctggtgttttgggcttttcagaggggaaatcccttgcaccggcccgagttatcctgtacaataacagggttcgagaaagaaattcgacttttgcaaagaaggagcgtgaccgccgtgcgggtctccaaaaaggccattctggcccagctggaaaagacctatccggacgcgaggccggaactgaacttccgcaatccttatgaaacgctggtggcggtgatgctctccgcccagtgcaccgacaagcaggtgaacaaggtcacgccggcgctgttcgagcgctaccccgacgtggaaagcatggccgccgccagcgtggaggacgtgtaccccatggtcaagagctgcggttttaagagcaaggcgaccaatatcgtggaaagctgccggctgatctgccagaagtacggcggacaggtaccgggggatatggacgcgctgcagacccttcccggtgtggggcggaagaccgccaacgtggtgctggccaacgcgttcggcgtacccaccatcgcggtggacacccatgtgttccgggtcagcaaccggctggggctggcggacgcaagcacggtggaaaagacggaggagcagctgatgaaggccattcccaaacaggattgggtggccgcccatcactggctgatctttcatggccgcagggtatgccacgcccggaacccggagtgtgagcgctgcaccctgcgggaatactgcaaggcgtattacgcgggcgatacgaccggcccgaagcagaagcaggcggcccggaaaagcctgaacgcctgacgaaaccctgacggaggaaagaacatggcatcatttgtagatcgcgtgaccattaccgcgaaggcgggcaacggcggcaacggctgcgtgtcgttccaccgggaaaaattcgtgatgaacggcggcccggatggcggcgacggcggcaacggcggcaatatcgtcctgtatgccgaccccaatatgcataccctgctggacttccgcttccacagcaaatacacggcggaaaacggcggcgacggcagcgccaaccgctgccacggcaagcggggcgaagacctgctgatcaaagtgcccgtgggcaccgttttcctgcgggaggacgacactgtagccgcggatatgaacgagccggagcagaaaaaggtgctgctgcggggcggtatcggcgggtacggcaaccagcacttcgccacgcccacccggcaggccccaaactttgccaagccgggcatcaagacggagatccacaccttccgtctggaactgaagaccattgcggacgtggggctggtgggcttccccaacgtgggcaagagcaccattctggccacgctgaccgcggcaaagcccaagatcgccaactatcacttcactaccctgacccccaatctgggcattgccaaatggcgcgagaccgacttcgtgctggcggacattcccggtctggtggagggagccagcgagggcgtagggctgggctaccatttcctgcgccacgtggaacgcacgcggttgctcctgcacgtggtggacgcggcgggcagcgaggggcgcgaccctgtggaggatttccacatcatccagaatgagctggaacagtacggcgagccggtgggccgtccccagctggtggtgctgaataagtgcgacctgatgcccgaaaaggaaaagcagcaggagctggtggccaagttcaaggagctgggctatgaggccttccccgtcagcgccgccacccggcaaggctttgacaagctgctggatcgggtggtgcagctgctgccggagcttcccccgccccgggtgtttatggaggaggaagaagaggaagagccttccatcaccgatatgagcttcaccgtcacccagcagaagggcggcgtgttcgtggtggaaggcccggccatccagcggctcatcgacagcgtgaatttcgaggacgaagaaagcatgaactggttccaccgtcagctgcgggaccggggcattatcgacgagctgcgcaagaaaggcgcgaaagagggcagccccgtgcagctgggcgatatggagttcgactttattgagtaatccagaagcccggcagtccctgaatgaaaactgtccctgccggaggactcgctgcccgcgctgcgggcgctgcgacgaatgccgcacccatcatcagggacagaaatggccgccagtctgcgaaagacctcccaaaatacagccagacccggaaagaaaccaaaaggaaggaatacgatgcttaccagcaaacagcgcgcctatttgcgcagtatggccaataccatggatcccattttgtttatcggcaaggaaggcgtgaccgaggccaccgccaaggaagcctacgacgctctggaggcccgggagctgatcaagggcaccgtgcagcagaactgcgacctttccgccaaagaggcgctggaggccctgtgcgaaatggttcacgccgagcccgtgcagtgcatcggccgccgcttcgtgctctaccgccggagccgtcagcccaagatcgaactgccgtgacggaaaaaaacacacaaacgcagggagaccgaacagacccggagcggatcatcgccgctctgcgggagctgcggtctccctttgcgctttatgagcaggacatccatcaggccgtgacccggcggctgacggaggcgggtctgcccttcacccacgaaaagaacctcgcgcccggctgccgcatcgatttctggtgcggcggcgtaggcatcgagatcaagaagggcaagccaaagccctccgcattgctggaacagctgcgacggtacgcagtctcggaggaaattggcacgctggtggtgctgacccagcgcagcgtccgtctgccaacagccgtctgcggaaagccgctggttcagatcaccctgaaccagctgtggggcgtcgccctgccctgaagcaggaccgagggaggttctcatttatggaagaaaatcaggacttcaatctgctgccgccctatctggtggattcggacggcgcgcaaagcccggaaagccagacccagcgcacctacggcaccctgagctacaacgcccggcggaaatgctggacggtaaagggcgaccccatggtgacggagctgtgcaagcggctgtttcccggcagcgccacggcccgccggggcgaagcgcggttcacggcccaccggcgggtggtgggcgacctgaactggctgatgctgcgctatcccctgctggtgaagcccgccgatcagcagcgctgggaaaaggcactggaggaggcccgggactatgccgtccacagggagctggcccggcggatgccggaaaaggtgcagcccgaccccgccgtattcaaggggcggctgaccgactttcagcaggaggggctggcgttcctgctgcgcggcgagcgctgcctgctggcggacgaaatgggcctgggcaaaacggtgcaggcgctggcgtggctgtgccagaccggggcatatcccgccatcgtggtggccccgccccatctgatgcgcaactgggaaaacgagatcgcccgcttcgtacagaagccggacggctcgcccctgcgggtgcatgtgatccacggcctgaagccctacgccctgcccccggcggatatttatctgatgcattatttgctgctgcggggctggaaggaagccttgccggacatgggcctgccaacggtcgtttttgatgagattcaggagctgcgccattcgggcacggagaaatattctgccgccagcctgctggccgaagcggcgcagcgggtggtgggcctgagcggcacgcccatctacaatcagggcgcggagatctggaacgtggtgaacattctggattttcacgtgctgggggattatgaaagctttacccgggaatggtgctacggctacggcaaccgcatcgtgcagaagccagagctgctgggcgagcatctgcgggccgagggcctgatgctgcgccgcaccaagcaggaggttctgaaagagctgccgcccaagcgccgtctggtgatgaccgtggacagcgacgagggcgtttaccgccgcctgatggagccggtgaaccagacccttcgccggatgcgggagaccgccgacgccaacgcctctcagcgcgccctgtgggaaatggagatcgagcggggcgagcggcaggccaccggcattgccaaggcccccgccgtcgcccagttcgtccgcgccctgctggagggcggcgaaaaggtgcttctcttcgcccatcatcatgaggtgatggacatttacaagcgggagctgaagagcttctcgcccgcttttatcaccggcagagaaacgcccgccatgaaggagcgcagcgtagagcgcttcatgacgggccataccgatctgtgctgcatttccctgcgggccgccagcggcctgaacctgcagcgggccacctgtgtggtattcggcgagctggactggtctccggccgtacacagtcaggcggaagaccgggcgcaccgaatggggcagaccgactccattctgtgctactatctggtcagtcagggcggcagcgatcaggagatgcaggacgcgctgggcctgaaggtgagccagttcgtaggcctgatgggcgatacgccccagtcggaggccgacgcgctgctgggggcgcaggaggcccgccagcacgtggaacggctggtacagcgccttttgaaccagaccgcctgagttcagctgccgctgcggggcagcactaccaccgtcccggcctcaaaatcctgcggggccagacagggattggagcgcagcagccgggctaccggcaggccgaacttcaccgccagactttccagcgtttctcccgtgcccatggtgtaggtctccggcacgtcgcagggcacgttctctgtgggcacgcacagagtctgcccggtgcgcagccgatccagattcacgccggggttggcgctttccagcgtatggcggctcaacaggtttttcaactgaatatccgctaccgtctgcccctgctccacctgcacccgctgatccacggggcaggaaggcgcaggggtttcggtttccgcaccgtccgtggagtctgtgctgccggaattggttgttccgccggtagagccggtgctgccggtggaaccagtcgtgccgccggcagagccggtgctgtcggaatccgtggtgccgctggtagagcctgtattgccggaacccgtggcaccgcccgtggagccggttgaactgccgctggagcctgcgttgcccgttcccgtcccagcggagggggtatcgtcctcttcccggggaatgcacagcacatcgcccaccatcagccgggccgggtggatatcccgattggcggccagcagatcccgcaggggaacgcccagcttatgggcgatcagatagaagctgtcgccccgtttgacggtgtattcctccgcacagattttttctgtatgattctgggtcatggaaaaattctcctttcggtggattctccctataccctatgcggtgcaagcatcccggcatgacagcgaaaatcgaaaagagaaggcttacgggtttccttccccattcagtagggcttcccgcagcagctcgacggcgtgcttttccacgcgggagacatacgacctcgatatccccagcattttggcgatctcgtgctggggatgcaccgcaccgtccttcaaaccgtagcgcaggcttaggaccagccgttcccggggcggaagggtgggcagggcccgcttcacgccagacagggtgatgcgacggcggacttcctcttccaccagatcgggcgaggtgcccagcaagtcggcaaaggataccgcgttgccgtcccggtcggtgcccagcggctcgtcaagactcacgtctccctgttgttttctgctctggcgcagagacatgaggatttcattttcaatacacctcgccgcgtaggtagacagcgacgtgcccgtatccatgtcgtagctgcgtacggccttgatcagcccgatggagccgatggagatcaggtcgtcgaaggtgcagccggggatcttgtatttccgggctacgtggacgatgagccgcatgttgtgttcgatcagcttttgccgggcgtcctcgtcgccctcccgcatccgcagaagggcctcccgctcttcttctgcgttcagcggctttgggaagttctgccgccccgaaatgtaccccagtaaaaataaacagtcccgaatgatccatagcataaacgccgtcagcatgacgcatccctcctccccaaagggtatgcagcgggaaaaggggtatgaaaaagaaaagcgcctgttccttggagaacagacgcggaaaatggccgttaccgcggccagcgatcccgggcgcagggcaggatcgggaatgctccgtggggttcagtctggtaccagtagctgacggaacacacgtcgtcctgacgctcgaataaccccagctcgcagacgccgatctgctgcagctccacccgcagatctttttcgaaaagcacgggatccatcatgtgccagcgatagaagccccgcatgggcgggcagtcccggttgaagtaatcgttgtggaaattgtcgtcccgggaatagaaggggtagcccatgaagggcgtgcagtaggtcttttccagcatatggccctgctcgtccgtctggccgccgaaggaccacgcgccgccgaagtaatcctccgtgccggtggagcactggctgggaaactccccgtcgccgtcgatgtagaacttcatttcaccctcgccccaccagtagcgttccagtgcggagatgcccagataggtgccgatatagtgccccctgccgcggacgttgtccagaagcacgtaatcccgtttcagctgggtgatcttttcccgccgccactgcgcatggaaacgggccgcgttttccgggatgctgtcggtcagtaccgcgtccacctgataaaagaagccgggaatatcccccgcgtgctggttttccagcgtgattttggcatggctggcaaagggcatgggcaggaagcagttcatgccccgattgggattgacggccacgggcagggaattgacggagcagccccgggcaaagccgttcaggaagaaatcgcccagcggacactccaccgatggcgtttcctcaccgtcccagtacatacgcagtaccagatcccgcaggacaaagcggcctttgggcgtggcgtccgttacggtgcaccagatgtgctggatcgcaccgctgccggtcagctccgccagcgtgaccgtctcgcccgcggcgatgctgggaatgcagggcgaacccttgcggcttttgcccagagcactgctggcctgacaggccgcgcccttggccccggtacggttttcccagttgacggatacggaacggtccgatttcagcaggggcagactgcccatcaaagaagtccacatcgtttgtgcgcctcgtttctgaaagaataaaaccgtcggcagggtcgcctgcggcggcgttctagtcattctatctgcacagcctaaactcctgccgatccaaaacccggctatacaaacttgctttttctgcttataataaagaaggccttgatcctgcttttttttggaaaaagaacgaaaggaaccactgctttgagtgaagaaactgttttctccgaccggcgcaagccgctgagccgcaagacattgtctcccggacgggcgctttgtctgggatttttggcgctgattttggcaggcgggctgctattgacgctgcccgccgccagcactgacggaacgtccctgggccttttgaagggaatgtttaccgccacgtccgccgtgtgcgtcaccggcctttccctgatcgaggccgggcgtgacctgagccttttcggacagatcgtgctgctgtgcctgattcaggtgggcgggctgggcttcatggccttcgccacgttgggcatggtgctgatcggcaggcgcatttcgctgcacagccgcattttgttaagcgagtccatgaatcagaacggcctgtccggcatggtgaggttgagcctgtggtttttcgccatggcgctggcaatcgagctgacgggcgcggcgctgctggcctcgcggctgattccccgctacggaacggcccggggcctgtggctgagtctgttcacggcggtaagcgccttctgcaacgcgggcttcgacctgttcggcaatggcagcagcctgctggccttccggcaggagccgctggtgctgtggacgctgatcggcctgattcagctgggcggcatgggctttgctgtgattctggagctgctgcgccatcgcaaaagcctgagccggatgtccctgcacaccaagctggtgctggccgtcaacggggcgctgctggtgggcggctcgctggccgtattcctgctggagggacggaatccggccacgctgggccgggagggcatgaccctgtgggacaaagtgactggcagcgtttttcaggccgtcacctgccgcacggcgggttttgccgccgttcgtcaggacgcgctgaacgactccaccaagctactcagctgcctgctgatgttcatcggcgcgtcccccgcgtccaccggcggcggtatcaagaccaccacgctggcggcgctgctgctgctggtgcacagcgtggtgcggggccgggatcggatcaccgtcttccgaaaggaaatttcgcaggacaccggccaccgggccgtggcgctgaccttcattgccacctccttcgtgctggccgttacctgcgccctgtcgattctggagcgccgacacggtgtcagcctgacgaatctggtttttgagacggtctccgccgtttccaccacgggcctgagcgcggcgggcacgggagtgctgcgccgcagctcacaaattttgctgatgctcctgatgtatctgggccgggtaggcccgctgacgctggctacggcgctgatccgccgggaaaaggacggcgcgcggaaccgggtgcgcttcccagaggaaaagatcatgatcgggtaaggcggcgggctttgagcgcaaaacgaaaaaacgcaatcacttatatagggagaaaggactttcatcatgaagaacaagcaatatctggtgttcggtctgggacgcttcggttccagtatggcccgggctctgtgcgcccagggacaggaagtgttggccgtggacagcgatcaggagctggtcaaccagatcgcgccccatgtgacgcaggccctgcagctggacgcgacggacgaggaggccctgcgctcgctgggcgtgaagaatttcgacgcggcggtggtggccattgggcagaacacccgggacagcatcctggtcagcgtgctgctgaaagaaatgggcattccctacctgatcgccaaggccaacgacgacctgcacgccaaggtgcttcggaagatcggcgtggataaggtggtcttcccggagcgggacatgggcgttcggttggctcgctccatcgtcaccccctcggtgctggatctgatggaattgagcggcgattaccagctggcggagatcctgcttccgtccgggtgggagggggaaagtctgcgcagcaccgatgcgcgccacaaattcggcgtgaatatcctctccgtccaccgggaggggcattatctggtggcccctgccccggatatgccctttcaaagcggggacaccctgctggtgatgggccgccgggaagatgtggaaaagctgcggaagtaaacgaaaatcggaattttttccaaaaacgggaacaaaatggagtccctccaacgtcatacatataggaggtctgtcggtcataggctgataacgcccggacaagcaggcccgaaaggatgaaaatcagatgaaacctacgcctgaaggatattttgaccgccccgtgtgccagcccgtcgatgttcaaggagacggcaacggcattctgttgatgcacggctttaccggcagccccgcccatatgcggatgctggcggacgatctggcggagcggggctacaccgtgcgctccatctgcctgccgggccatgcctccaccgaggaggaaatggcgaaggaaagctggcagagctggctgcaggcggccaagaccgccgttctggaaatgaagaagacctgcaagaccgtgacggtctgcggcctgagcatgggcggcgtgctggctctgctgctggcagagcagatgcaggtggacgcgtgtattcccatctccgcgcctatggccacgaagaatcgcttcctgtgcctgtcgggggtgatgggcaaggtgatcccgcgcatttcgtggggcgatcacccggaacggagcgtggcgctgaacgcggactacgatttcggctacaccggcttccccacggccaagggcgcggacctttaccacctgatccggctggcccggaagaatctttttaatattacctgcccggtgctggcggtgcagtcggaagacgatgaaacgatctgggaaggcagcgcggactgcatcctgaacggcgtcggcagcgaaaaaaagtggaagctgtggctccacggcgtaccccatgtctgcaccatttcgcaggaagaacccgccatccgtgatggaatcgtgaaagtactggaacaaattcgtcaataaatgttccaaaaattatcacgaaaatattacaacctatttacaaattgcaatgaatctggtatcatttgcaatggattatcgcagtatacaaggcgggcctgtcggtttgaccgccgcgatacgctgtttatggagggatacggactatgaagaagatcgtcgtcacattgctgctggctgcgattctgctgaccatgacgcccatgagcgccacgttggcagaggccagctatgcgaccgtgcagagcggcaaccagtacggggtgcgtctgcgccttggccccagcaccagctatgccagccagaccacgctgccttccggcacggtcgttaccgtgttggagaagggaactgtctggacgcgcattcaggcgggcacgctcaccggctacatgatgagcaagttcctggtttccagcagcggcagcagcacgtccagcactccttcgctgggcaccgctaccgtgtatgcgggcaacggcaagcgcacgtggctgcgcaccgcgcctaacggccgccgtctgggcctgtacagcgatggcacgcctttgaccattctgggctacaagggccaatggacccgggtcatgatcggctccagtgtgggctatatgatgaccaagtatatcgccctgcccgcgcctacgcccgaacccacgcccattccctacagcgccctgaccaaggtggagctcaattatgagtatccgctggtgggcgataccctgctggcgaccattacgccttctcaggccacggtgacctatcagtggtaccgggacaaggtgggcggcaccaagctgagcactgctgcggcttacaccgccaccaccgccgacgtgggccacaagatctgcgtggaagtgaccggcaccggccagtgggcggggcagaaggtcagcgtcctgtcccagcctgtgaccaaggaacgcaaggttgctggcgtgatgattgtcaacaccatcgccgaccattccgcgcctttggcgggtgacattctgaaggccgtcgttgcgccttcctccgcgaccgtcacctatagctggcgcgttgccggtgtggaaaagggcaaggaagccacctatgtggtgcaggcctccgattccggcaagcagatccaggtctacgccaccggcaccggcgatttttccggccaggccgccagcgatatgacctccaaggtcgccgacgcgctggaactgaaagaagtcaaactgagtacgtccttccctgtggtgggtcaggcgatcaccgctaccgtgacccccggcagcgccaccgccagctatgtctggtatgtggacggcatcaagatgggctccggcgcttcctatacgcctaccgcctttgatatgggcaaggtcatcaccgtgaaggccaccggcacggacaagtgcgccggtacggtggaaagcgctgccagccagcctgtgaagatggtcaacctgaccaaggtgtcgctggacagcaatgctcccgtggtgggcatgaccctgaccgccactgccgaaccggcagaggcccggactgccaactccgtgctgtactactggtatgtttccggcgaggacaagcctgtccagagcgactggagcaacaagctcaccgtgaaggaagcgtatgccggcaaggcgatctacgtgcgcgcctatggtcagggcatctacggcggcgtggtggccagcgccatcaccagcccggtgaacagcaagtacaccctgaacggcgtgtccctcaccgtgacggagcctgtggtgggcgacgtgatcaccgctgtgtccgacccgcagaatctgtccaaggcggactgcctgtatctgtggcagatcggcaccgtgaccaagagcagcacggataatacctacaccgtcacctccgacgatgtgaacaaacagatccgcgtcacgctgaagtataacggcgcgaccgccaccagcgccgctaccaataaggtgctggatagcaaaaatatcaccggtgcctatctttacaacgaaagcaccaagcaaaacatcggcagccagcctcatgtgggccagacgatctctgtgaaggtcaacccgtctgaagcggcggcctccggctgcgtgaagtatacgtggactcggacggaagctgacaacaagaccacgacgaatgtcggcagtggcgccagctatgtggtgaccgccgccgatgcgggcagaccgctgacggtcaaggtagaagctcagggcaactatgctatcaataacaaggataaatctttcacggcgagcaccaccgttgcgggcggccagccgatcaatgtgaccctgcctgctgctatcacccccaaggtgggtcagagccctgtgctgaagctgaacaacaataccttgaaggatgcctctggcaaggacgttgtttacagcgccaccatcacctggtctcccagcctgtcggacaacggcaccttccgcaccggcgagagctacaaggccgtggtgaacttcaccagcctgaccggcggctaccgtctgggctccgtcagcgccaccgatgtggacggcaagacctccgtgtccggttctctggtgggcaacactgtgaccatcaactttggcaaactgaccgccacgcaggaggtggacaacttctgcatctatggcgtgaccgcccccgaaaagggcaagaccccggtgaccgcgatcaccaagaacgcacagttcgacggcaaagtggaatggaaggaaggcaacactcctgttgccaccgtcttcgaagcgaacaaggtctacacggccgtcatcagcctgacctccgctgcggagtacaccttccccgacagcggtaagagcctgttcaccgttcccggcgcggtcagcgcggaatacaacaagactggcgaccataccgccaccgtgaccgcgacctttaaccccatcaccaccgcgaccaaggcggaagtttacgccgaccgcagcagcgtgaccgtgggcaccagcaagaagtacgtggtctgcaccgccctgctgtccggcttcaccggcgatcaggacagcctgacgtggagctggacgctggccaacggcaccgccgatgagaccaagatcgaccagaacggcatcgtgacggtcgacgcggacgaaaaggccggtctggagctgctggtgacggcctccaccaccgtggaaggcaaggcttacagcgcttccactaccattaagaccgcgacggacgactccaccggcgatctggcccctgtcgtgaccatcgtcaagtccgtcagcgagctgcaggcgggcaaggagaccaccttcatcgccaccgtgcagaacagcaacaacgagaccgtgcgttggagcgtggaaggcgtggacgggaccaagagctccggcaccaccatcggctcctccactggtatcctgaagatcagcaagtttgagactgtcaagcagctgaaagtcaccgccactgcggtgcccaccggcgagaccgccgtgtgctacgtcaccgtggtgtacgcggaggcccccatcagcatcaccttcgtggaaggccagaagagcgtcagcatcggccagtccgctaccttcaaggtcgcgatttccgccagcgaagccaatcccaaggccgagttcgctgtggctgccaacaatggcaaggccgacgtgaccgccacccctgtcgacaatacgacctgcaccgtgaaggtacccgctgagccttctctggtgggcaaggaaatcttcgtgaccgcccgctatgcctgcaaggacgaggacggcaaggagcatgaggtcagcgccaagtggagcttcatcatcaccgaaaccgccccggaggccaaggccgccaccatgacgctggaagtcgcggcgctcctgcccgacgatgacttcgccgtggcggacgacgagcccgccgcccagccggaggaagccgcgacggctcccgccaagggcatcgacacgaagagcgacagcatttcgctggtcatctccggcggcgaggaagagtctgccgccaagggcgaagaaagcaaggaagcgcccgagacggaagaaaagcccgccgaggagcccaaggcggaggaaaagcctgccgagcccgccgtcagaaagacggagatcaataccaagaatgagaacatcaagctggtgatctccggcggcgaggaagaaaccgcccagcccgaagagatccagccggctgaacagcctgaggaaactcagaaggacgaacagtctgccgaacccgcagccgaggaaaagaagacggagatcgataccaagaatgagaacatcaagctggtgatctccggcggcgacgaggaacccgtccagaccgagaaaaccaaggacgaagcgcccgccgaagccgagacggagaaagaaaccgtcgtggtgaacgaaaaggaaaagaaggacgccaaggagcagaagcccgttaagaaggaagaagcgcccgccgagatcggcgtgaccgtctacggccccgacgtggccaaggtcgtgcccggcaaggtgtacaccttcagcgcggaagtctcctgcgcggtggaaggctacgacatcgtgtggagcgtctattgctcggacgagaccgtcaaggccagcatcgtggacggcgagctgtacgtcaccgagaaccccaccggcgaggatcaggtgctgcgcatccgggcccgctacaaggacgcggacggcaacctgtacagcgaaggcagctatgccagcttccatgtgaccgtggctcccggtatcgccaagccccgtgtcatcaaggaaagcaagcccgccgagaaggaaagcgagaacggcaaggccgcggaggccgagggcaacaaggaacctgccaaggttgaggagtccaaggaaaccgtgaagcccgaaaccaccgagcctaagaagatctacgaagacgaccgtgacgatcctgattacgtgcccttcgactgatcctgaaaccaacccaaaagccgcggcaattttgccgcggcttttgtctgtccccctgcggttgacagttttccgccgctcgggtacaattttggatgatttatgtgtgtttgatcatcccaaggaggtctgcccatggaaccgttggtgagcatttgcaccactacctatcagcacagccgctacatccggcagacgctggacagctttctgaaccagaaaacggattttccttttgaaattctggtgcatgacgactgctccggcgacggcaccgtggaaattctggaggaatacgcccggcgttacccggacgtcgtctgccctgtgttcgagaaggaaaaccagtattccaagggcgtgcccatcaacgagaccttcaattttccccgggcgaggggaaagtatatcgccctgtgcgaaggcgatgatttctggtgcgacgacggcaagctgcaggcacaggccgattatatggaaagccaccccgactgcaccttctgttttaccaacggatatatcgtggaggaaagccagtccttcggcccggactggcgggaacacgcccgggagttcgtgccctattatgagtcggagcggcccgcctattacggggcggatcaccgctacgatctgggggaaatggcggcgctgagctttgtgcccaccgcggggtttttcttcccccgggccctgtgggagcaggtcagcgaggcgtatcaccaccggatgtgcgagcacggcgatctgaaaatgcggctatattttaccgcgctgggcagcggagagtatctgcaccgctacgcctgcgtgtaccgggaaaacgtgcccggcagcgcctttcaggtgtggaaaaaggaaaacgccgtccgtaccgcccgccgggcggccagcgtggtagacatgctggatgaggtggacgaaatgaccggcggacgctatcgggccgggcttgcacccctgcgggaccgctatctgtttgtggaattgtggaatacggatgaaaagcatcccgcccatcaggccgacctgcgccgggtgcggcggcagctgcccctgaagcagaaatgtgtatacgccgccaagcaccttcttccccgccgctggatcgacgcgctaaaacgccggggagccaaggaaagcaagcattgaatcagaaaaggaagtgcccgccatggattttgcccccacgccgatccaatttctttgggaggacgagcagggaaaccgcgtctatgtaaagcgtgaagacctgctgccctactccttcggcggcaacaaggcccgcatcgggctggaatatctggcggatatggagcggcaggggaaagaccacctgatcgcctacggcaacgcccgctccaacctctgccgggtgctgagcaacctctgctgcgcccggaacattccctgcaccatcctgtccccggcggacgacgacggccagcgccgtcccagctttaaccagcgcttctgcgaaggcttcggagcgcagatcgtcccctgcctgaaaaccggcgtgaaggagacggtcgaacaggcgctgaacgacagcctgcgtcaggggcggaagccttattatatttacggcgactccaccgggcagggcaatctggccacgccggtgcgcgcttatcgaaaggtatggccggaaattctgcgccagcagcaggagctgggctgttcctttgaccggctgtttctggcggcgggcacgggcatgacccaagccggactgctgtgcggccgtttgctggatgggggcgatacggagattcacggtatctctatcgcccggagtgaggaaaacggcaaggcgcatctgcgccggtatgtggaggcttttctgggggaggaatcccacggcccggagcttcagttcaccgaccgctacgcgctgcaatatggcgtatccaccccggaaatggcggaatgcgcccggcaggtcttccgccgctacggaatgcccatggatctgacctacgtgggtaagggctattacggcatggtgcaggaaattcgccggctggggctgcgaaacgagcggattttgttcctgcacacaggcggaacgcccctgtttttcgacagccagatggaaaccacccgctaagggaaaagacacatttgaaacttgccgccccggaacattgcttttcagacaaaaatccgctacaatagcattggatttatacgccatcatatcatttcatggaatcatctgatacaaggaggaactatgaattcatacgcattcttcacggattcggactccgatctgccgtttcggtttgtagacgagctggagctgaacatggtctacatgccctatatggtggacggcaaggaatactttgacgatctgggccgcaacggcagggaaaaggagttcttcgacgccatgcgcaagggcgccgcgccggtcacgtccctgctgcctaccgccgcctacgaggaatacttcgagcccgtgttcgctgcgggccgggatatcctgttcgtggcgttttccagccagctgtccggcaccattcagaatatctacgccgcccgggaggagcttctgcagcgttatcccgagcgccgcatgattgtggtggacacgctgagcatttcgctgccacagagcattctggtgctgaaggcacatgaactgtaccggcagggcaagaccatggacgaagtggccgcgtggctggaagaaaacaagagccgttcgcaggccttctttacggtggacgatttgacctacctgcgccgtggcggacgcatcagcgccgtggccgctaccgtaggcactatgctggatctgaagcccatcatcaccgaggggaagaacggcaagctgctttccacggataaggtgcggggccgcaagcaggcgctgcgcacgctggcggagcttgccgctcagaacatcgacgatcccgccgaggcggaaatgtatgtgctgcatgccgatgcgcccgaggatgccgaccggctggtacagctgctccgggagaagatccccggtctgggcaatatttccacccgctatgtgggccccgtgatcggcgcgcactgcggcccgggcacggtagccgtgtgcttcttcggaaaggaacgcccctattaacaaacgcaaaaaacctccgctcatcccccacaaagcgaaaaatgaaacggaggtttttttctaaaagcaatggtacaaaatgccacgaaatatgtcgaaaaatggaatatttttccgaacgaagtttttgaacgaaaggagcgtcaaatatggactatttcgcgttgggaaaaagaatccgcaagcgccgggtggagcagggcatgactcaggagcagctggcccggcaggtgggcgtgactacttccttcatcggccatctggagcgcggctcccgcaaggccagtctggaaacactggtagcgctggccaacgccctgcacgtgggcgtggattaccttctgtgcgacagcctgaataccgtgcgtaacgacagcggccccgacggtctaagccgcggccagcgctatgtaatgcatgagattctgtccaccctgcagagccatctggacgactggaacggcccgtccgccgagggttaacgaagcatttcttcgatcaggtcctgcatgtcgtactttccggcagacttgtccatcaggaacgcggcggcccgcagcgcaccccgggcaaagagagaacgtttttccgcacgatgggtcaggatcagttcttcgccgtcgccatagaagcagacttcgtgttctccggtgatggttccgccgcgcacagcgtggatgcccacttcgccgggctggcgctgggcggtgcgcccatagcggccgaataccggctggcgcagggattccgtggcttccttcaccgagtcgtaaagcatcagcgcggtgccgctggggctgtccgccttcatgcggtggtggcgctccacgatctccacgtcgaagtcctcacccagcgcgcgggcggcctcctgcaccagatggcgcaggacgttcacgccaaggctcatgttggcgctgcggaaaacggggatttcccggctggcttcctcgatcatctgcaattccgcttcgttataaccggtcgcgcacagcacggtcggcattttttctttccgcgccagctgcaaaagctccggcagcgccgagggacgggagaagtcgatcagcacgtcggccttctgcgtcgcctgatcgaaagcggtcacgatggggtaatccgacggctgacccgtataggccacgtccacgccgcagacgatctctacctgcgcctctgcggctgcggcggtcacttcccggcccatgcggcccagtgcgccgccaaggagaattttcataggacaaactacctcgtttctttgtcaaatggagaggggcagagcatggctctgtccctcggcttttagtttttcagatacccaagctccgtcaggcactttttcagcgccattctggtttcctctgcggcggggatcaggggcagccgcagctccccggagcactggcccatcatttccatggcgcacttgcaggggatggggctgacctcccggaacagggcacggatgaaaggcatcaggcgaatctggcggcgcagggaatcctgcgcgtcgccgtcgaaatacgcctgacacagcgcggccatttccccgggcagcacgttggacactacggagatcacgccctgcgcgcccatggccagcaggagataggtcaggtcgtcgttgccgctgtacagggtcagccgtccgtcaatggcgtccagtttttccagcaccagcgacagattggcgctggcttccttcagggcgatgaaccggcccgaggggatcagccgccgcagagtatcgggaagaatttccagcgtggtgcggctgggcacgttgtagaggatgatgggcagctccgtatgctcggcaatggccataaaatgagcgtacaggccctcctgtgaggtcttgttgtagtagggcgtgaccaccagctgggccgcgcagcccaggtcgcggaagcggcgctcgttgtcgatgacggtctgggtgcagttggcccccgtgccgcagatgaccggtacacggccgttcacggctttcaccgtctcccggatgaccagttcccgttcttccagcgacagggtggagggctcaccggtggtgccgcagctgaccagcgcggcaacgccgttttccagctgatgctctaccagccgccgcagagcgtccacgtccactttgccatcccgaaggggcgtgaccagcgcggtggccgcgccgcgaaacagaggttgtgtcatgatgtttttcctcctgtcaggcggttatttatgggggatatagcccagcttgcacaggtattcggcgctgagaacgccaccgcccgccgcgccccgcagggtgttgtggctcagacagacgaacttgtagtccagcacggggtcttcccgcagacggccgatggaaatgcccatgccgccgtaaaggtcgcgatccagtcgggtctggggccgggcggggtcgtcgaagtaggtcaggaatttctccgggctggagggcagtcccagtccctccgttgcgggatggcagttggcccagcgttccaaaatggtctccagagagggctttttgccgaactccacgctgaccgccgccatatggccgtcggagcaggcgacccgcaggcactgggcgctgatagccggttcggatgcgttgacgatctggccgttttccagatggccgaaaatcttcagcggttccttttcgctcttttcatcctcgccgccgatgtaggggatcacgttatccaccatttccggccagcgctcgaaggtcttgcccgcgccgctgatggcctgataggtgcaaaccatgaccttcttgggttcaaaatccaaaaggggccacagggcgggcacgtagctctggatggagcagttgggcttgacggcgatgaagccgtttttcgtgcccagacgcttccgttgagcctcgatcaccgccgcgtggtcgccgttgatctcggggatcagcatgggaacgtcgctgacgccgcggttggcgctgttattggacaccactggcgtttccgtccgggcgtagcgttcctccagcgcgcgaatctcgtccttcttcatatccacggcacagaagacgaaatccacccgggaggccacttcctccacctgagcagcatccagcacggtcatatccgccacgttagcgggaatggggcgatctttgaacgcccagcggccttccactgcttcccggtaaggttttcccgcgctgcgggcggacgcggccagacaggtcacctgaaaccaggggtgatgttccaacaggagagtgaagcgctggccgaccattccggtcgcgcccacgatacctacacgatacggatgcatagcgaatgacctcttttccttagagtttgcctgtgccgggcaataggaggatatgcgggggatggggatagtgtgtgcgggggacagggggaatatgatggggaacggggtcgctcgattgtttgcccgaggaaagcccccagtgctcctgcaggcgcaaatccatgcctcatcggtacgccgactccccgaagggggtgcagggggcgagcggaaagccaccctgcttgctccgtagagagaagcctctgccgaggaagttcccctttgagggggagtgacgcgccgactccggcgtgagggaagggcttataaccttcatggggtactcatttacttcggaggcgatccgaaggggtgcagggggcgagcggaaagccccctgcttgcagcgataggcaacaactttgccgtaagcaaatccccttggtggggattgacgcgccgactccggcgcggattgggactggccgtcccaaggggcgctcacacttttctttcgatggcgaaagaaaagtgtgcaaaagaaagccagcggcacggcgactcc

SEQ ID NO: 596 - DNA, 7331 bp, Unknown
  16S sequences of unknown bacteria
aggcggaggatgcggagaagaaacccgccgcaaagaaacccgcagccaaaaaagcagagggagagaaaaagcccgctgccaaaaagaccacggccaaaaaaccggccgcgaaaaaaaccgtaaagaaaacggaggatgcggaataatctttagggcaaaggaggaaaccgtatgagttatgtccccattgtcattgaacagaccaaccgcggcgaacgcagctatgatatttattcccgcctcttaaaggataggatcgtctttttggatggcgaggtcaacgaccacagcgccagcatcatcattgcagagctgctgtttttggaggcagaggacccggataaggacattatgctgtatatcaacagcccgggcggctcggtttcggccgggtttgccatctttgataccatgcagtatatccgctgcgatgtttctaccatttgcgtgggcatggcagcgtcgatgggcgcgtttttgctggcggcaggcgccatcggcaagcgccgtgccctgcccaatgccgaaattatgatccaccagccctctggcggcgcccaggggcaggcgacggatatcgccattgtggcggaccgcatcgtaaagaccaaggcaaagctaaaccgcattttggcagagcgcaccggccagccgttggaaaaggtagcggcggatgccgagcgcgattactatatggatgccgaagaggccaaggcctatggcctggtggacgagatcatcgtctccaaggcaaagggaaaggaggcgtaagatggcaaacgacgaacgcatcaaccgccctgtctgttctttttgcgggaaaccgcaagaacaggtgcgccgcctggtggcaggccctggcgtattcatctgcgacgagtgcgtagagctgtgcagggagatcatcgaagaggattattccgacgctaccaacgtagagctggaagagctgccaaagccgcacgaaatgatgcgcatcctcaacgaatatgtcatcggacaggacgaggccaaaaagaatttggctgtggcggtatacaaccactataagcgcatcactgcgccgcagaaggacaacgacgatgtggagctgcaaaagagcaacatcgttatgctggggcccacgggctgcggcaaaaccatgttggcccaaacgctggcccgcattttgaacgtgccgtttgccattgcggatgccaccagcctcacggaagccggctatgtgggcgaggatgtggaaaatatcctcttaaagctcattcaggccgcggattacgatgtggagcgcgcggaaaagggcatcatctatatcgatgagatcgacaagattgcccgcaagagcgaaaaccccagcatcacccgcgatgtgtctggcgaaggtgtacagcaggcgctgcttaagattttagagggcacggtggcctccgtgccgcctcagggcgggcgcaagcatccgcagcaggagtttatccagatcgatacgacgaatgtgctgtttatcgtaggcggcgcgtttgacgggatagataagatcatcgaagagcgcaccgggaaaaagaccatgggcttcggcgcggatatccagagcaaaaaggaaaaggaaatcggcaacacgctgatgcagattttgccagaggatctgttgaaatatggcttgatcccggaatttgtcggccgtctgccggtggtagtgaccctgcattcgctggataaaaacgcgctggtcagcattctgacagagccaaagaatgcgctggtcaagcaataccaaaagcttctggctatggatggcgtagagcttaagtttacgccggacgcgctggaggcgattgcagataaggccatcgagcgcaaaaccggcgcccgtggcctgcgcgccattttggaagagaccatgctggatgtgatgtatgagatcccgtcccgcgaggatgtgggcctgtgcaccattaccaaggaatgcgtcacggaaaacaaaccgccgctgctggcgccagcactgcccaaagaggaacaaaaggcgctgggcacggccaactaaacgactcaaaatggtaagagagcgagaaaattcttcctcgctctctttttttctgcgcaattcggcaaaaggcgacaaagtttgtgcccatcctatggtttgctaaggcaagagaaggagcttttcttaaaatcggcggggaaggggacatacatgccgacgatatacggatacattcgggtttctacccgggcgcaaaaggatgaaagacagtggctttcgctgcggcaggccggggtggaggaccagcatatctttgtggacaaggccacgggcaagcacttcaataggccggcctaccgaaggatgctatgccggctgcggcccggcgatctgcttgtggtgcagagcatagacaggctggggcgcaattatgaggagatgctgcgccaatggcggctgttggtggaggaaaagcaggtggatgtgcaggtgttggatatgcccttgctggatacccggcggcgcaaaagcgcgaccacggccctgatggcagatatgctgctgcgattgctcagctatatggcacaggcagagcgggaggccatccgcagccggcaagcccaaggcattgccgctgccaaggccaggggggtgcgctttggccggccgcgcctaccggtgccggaagggttcaaagggctgaaagcgcagtgggaggaggggaagatctcttcccgccaagcagcgcagcagctgcacatttcgcatcaaacctttttgcgctgggccaaagagaaatgagcgttgctccatatggcacgcttttgtgacatgcgcacagatgcgcaatccctacgccgggcgcatgtttttgcctgccgcacagcctggcccaaaacctatgaaatttggaacattctggaaaatgcggcatgagcatggcgaaaatgaaaaaattttcagcttccaactattagcactcgctatggggtagtgctaacaaaaaaactgtgttatactacaaccgagattaaattaaaggagcatgatgatggaaacaaacacatacccgctgctgcctttgcggggcatcaatgcgtttccaaaccttacgctgcatttcgatgtagggcgggaaaagtccgtgcaggcgttgcgggctgccctggaaaaagaacagaatctgtttttgaccagccaaaaggatatggaagtctccaaccccgaagaggcagatctatacagcataggaaccatgtgcaaggtgcagcaggtgctggccttgccgggcgatcatattagagttttggtggaagggctataccgtgcaaagatcgtgcgcgtgttggaaaccgagccgtatatgctcattgaggccgagcagatcgagccgcagcccgagccggatgcgcctaccttggaacaggaagctaccatgcgtgtgctgctggatcttgtagagcaatacgcttcgctgtccggcaagctgtcaagcgaggcgctgacccagctggcagagatcaaacagccgggacgctttaccgataagatcgcgctggaaacgctgctgcataccgaccagcgccaggccattttggaaacggtggaggtaggcgcccgcatggaattgatgatgggcatgctaaagcgcgaaatagacctgctgaccatggaaaagaaaattcagcagcgcgtgcgggtggcggtggataaatcacaaaaggaatattacctgcgcgagcagatgaaggccatccagaccgagctgggcgatgaggactctgccaaggaaatagacgcgttgcgcgccaaggcagataaggtgcagctaagcgaacaggccagggaaaaggtgcataaggaaatagaccgcctggcacgcttgtcgcaaaattcgccggaggccgccgtctctcaaacgtatattgagaccatcctagaactgccgtggggcgttcgtaccgaggataattttgatttggacaatgcccagcgcacgctggatgatgagcatttcggcctggataaggtgaaagagcgcatcatggagtacctggccgtttgccaaaagaaaaaggacatcaaagggcctatcctctgctttgtcggcccgccgggtacgggaaaaaccagcatttcgcgctccattgcacatgccatgggccgtaaattctgccggatgagcctgggcggcgtacgggatgaggcggagatccgcggacaccgccgcacctatatcggcgccatcccgggcgcgattttgaaccatatcaagcaggcgggtacgcaaaaccccgtcttcctgctggatgagatcgataagatgtccagcgattttaggggcgaccctgccagcgccatgctggaggtgctggatcccgaacagaacaagaccttccgcgaccattatctggagctggattttgatctatcgcatgtgttgtttatcacaacggccaacagcaccgataccattccgcgccctttgctggatcgcatggaggtcatcgaggtttcttcctacctggagcaggaaaagctgcagattgcaaagcgttatctcgtgccaaagcaggcgaaggaaaatggcatcgcatcggaagagatcgagtttaccgacgatgcgctgctctctatcatccgccattacaccgcagaggcgggtgtgcgcggcctggaacgccagattgccacagcctgccgaaaggctgtcaaacgcctggtaggcggcgagaaagctcctgtgcgcgttgccaaagagaacctggaggcgtttttggggccggcacggtatttccacgataaggcgcagctgaaaaacaaggtgggcgtggccaccggcttggcctggacggccatcggcggcacgacgctgcaagtggaggtctcaacgatgaagggcaccggccaactggagctgaccggccagctcggcgatgtgatgaaagaatccgccaaaacggcggtaagctgcctgcgcacacgctatcaggaatacaaactggatccggatttttatcagcatttggatctacacatccatctgccggagggcgctacgcccaaggatggccccagcgctggcgtaacgctggctacggcggtattaagtgcgctgacggggcggcccgtcaggggggatatcgccatgaccggggagatcacgctgcgcggccgtgtgctgccggtgggcggcatccgggaaaagctgctggcagcgcttagggacggcatccataccgtgctgatccccaaggactgtgtaaaggacttaaaggaaattccggaggaactgctcagccagatgcactgcattccggtggaaaccatcgatgacgtgttgaacgtcgcgcttttggaggagacggatgctgctaactaaaaccaagctggtttccacggcgtaccggccggggcaatacgatccacagccgctgtgcgaagtggcggtggtggggcgctccaacgcaggaaaaagcagcttgatcaatacgatttgcaacaacaaaaagctggcgcgggtctcttccgcgccgggtaagacgcggtccatcaacttttacgagatggatgcggcgcttatgctggtagacctgcccggctacggctttgccaagcgcagcggccgggaacgggaggattgggggcgcctggtagacgattattttgggcgcagccaaacgctggggcatttgctgctgctgtgcgatatccgccacgatgccagccagggcgatctgcaaatggtggaatggcttttgcattatcagattccctatacgctgattgctaccaaggcggataagattgcaaagagcaagcgcaagcctatggcggccaagctggcaaagcaggtgggggccgaacgctttctttgcttttcttccctggatggcagcggcaaacaagagctggccgcgctattggagcagctggcacaacgcaccctctaacgagcaagatcatagaaaaaagaggaattgattttcctctttttttctttggcttggtgtaggcaagcaaaaacaaagcaagcgtttataaaattcgaaggaaattttatattgacaacgcgtgtaaaaaccactatgtatattaccgaggaaattcaaatatcgaatgcgtaggaagtgtttataggttgaaactggtaaaatgtcccatttgtgaactcaattatatgccggcggacgccgagatgtgtgacgtgtgcagaaacgagcggaaaaagagcaagaaaaaggacgcacccgtcattcagatttgtccggaatgcaatgaaaaccccgtggtgcccggcgaggaattttgcgcggcctgcctaagggagcataagcgcttggaggccattgaaaagattgccttaaatcagcaggatgcgctggatgaagaggaagaggaggcgctggaagaggcgctggccgcagaggaagagacggaagacctggataaactcgactttgtgcaggaggataccgacgacatcccggaggaagagctggaggatatggaagaggagcttggcctggacgacgaggatgaagaagacgggctggccctgtaatggcggtatttgccattgccgatttgcacctttcccatgtggatgaaaagtcgatggatattttcggccggcattggaaagggcattgggacaagatacagcaagcctggcgcagccggatcggcgctgaggacctggtgctgatccccggagacatcagctgggccatgcacatgccagaggcccagccggatctagacgccatcggccgcatgccggggcaaaagctgattctgcgcggcaatcatgactattggtggtcgtcgttgacccaggtacgcagcgcgttgccagagggtatgtatgccctgcaaaacgattgctttgcctaccgtgggcaggcggtgtgcggcgcccgcggctgggtacagggcaatgcggcccagggggaaaaggacgccaagctgctgcggcgcgaggcgggtaggcttcgcctgtcgctgcaaagcgcggcggacaaagggctacccattgcgttggcgatgtttcattttcccccgtttgatgaaaagcaagcgcccaatgaaatcacagcgctgctgcatgaatacggcgtgcagcgcgtggtatatgggcatctgcacggcaagagcctgcagcatgcgtttgaaggcacgctggacggcatacagtacgagctggtgtcgtgcgatcatctaaactttgcgccaaagctcatcctgccttaagaagagaaaaagacccgaaagggtcttttttttgtacaaagaaagggaaggcgggtggcgcacggtggaggccggtggagggcaaattcagcaa

SEQ ID NO: 597 - DNA, 7878 bp, Unknown
  16S sequences of unknown bacteria
cctgcattttccgtccaagctccgcttccttcgccgcaagaatctcccgcgcttttttcatatagtaatactgccgctccggctccttcgcaggtactgcgcctgacaggtcgatggcatcaaaattggtttcatttgtcataaatctctgttctcctcaagttctgtcggtttacggccgcacctgcccgtttccgaatataatatattttacggtcgtaagggcctttagtcccatcggtccgcgcgcatgcagcttctgtgtgctgataccgatctctgcaccaaagccaaattcaaagccatcggtaaaccgtgtcgatgcattgacatatacggcagctgcgtcgatttcatccagaaaacgcaatgcatttgtataattttccgtgataatcgcttctgaatgaccggtattgtagcgattgatatgtgcgatcgcctcatccagagaggaaacggtacgaatcgacaggatgtaatccagatactccgtcccccagtcctgctcggttgcagccactaccttttcagacgttccgccaagcaccgacagcgcccgatcatcacaccgcagttcgacctgatgctcatccagctttttcttcaatgcagccagcagtgccttctccaccttctcatgcacgacaatggattcacaggcattgcagacaccgatccgctgtgtcttggcattgttgatgatattgacagccatctccaggttcgcactctcatccacataaatatggcaattaccggtgccggtctcgatgacagggatcgtactgttttccacgacagcgcggatcagccgtgcgcttccgcgtggaatcagcacatccacatactgcctcagccgcataaagcgtgcagtcgtctcatgatctgtcacttcgatcagctggagagcgtcctcagtcacaccagccgccgccagcgcttttttcaatactgacacgattgcaatgttcgaatgaatcgcgtcgcttccacccttcaaaatcacagcatttccggtcttgaagcacagaccgaacgcatctgcagtcacattcggacgtgattcataaataataccgatcacaccaagaggcactcttttttgtccgatcagaagtccgttcggacgctttttcatctcttcgacttccccgatcggatcatccagaccggcgatctggcgcaggccttctgccatcccgctgatccggctctcattgagcatcagccggtcaacgagcccctccggcatatgattttcccgtgccttccgaatatcctgtgcatttgcatccaggatctcgctccgatattcttccagatacgctgctgcctttaaaagcgcctcattctttttcactgtcgcaagtccgcgcaatgcccgttcagccttctgcgcatgtgtccctattccggtaagcagcagatccgcatctgcgtagaactgctcttctgtaacgagatactgcggacagatatcatgtacgtctgacggcacttcatccatgatctgaaatgcgaaagcggccgccactgtcgtatgggccgtatgcttgctcagataacggtcataaaagccctttccgtagccgcagcgatgccgctttgcgtcaaagccgacacccggaacgatcagaagcgcctcctcatccggagccggatttaccgcatccggctccgggatatgaaaatagcccggatgaacatctgcataagaagagatatagtaataatccatctcctctccgtctacctttggcgctgccacctttttcccaagccgccatgcttcttcaattagaggacgcatacatacttcaccattatagtccatgtaggtataaatgcagtctgccttctgaaatgcctccatctgaatgatcctgtcacagatcttccggctcttttcctgcaggctctctgtcgtctgctctttccgccttgcaaaaaccagctttctaatttcctttttttccatagcgctcctcatacttctttccgagattctctacgctgccatccttatttacaatatcaatattgtccagctgtcccttcaggtttcgccgaatcgcttccagatattcgctgcgcaaaagcgcctgttcctggcgctccgcagaagtcagtccttctgccttcgacttccgcgcaagctcattgatccttgcaagctttgtattatccattgatctctcctccttctgtctgcttccgtatatcgatccgagaatcattatctgaccaaattctgtcagcgatcttcctccagcacatcaaccagatcaaaattctcatccagatgtccgacaaataaagttccgatgttccggccatccagcagccggtgaataacatgaaagtcatctccgttcgcaataatcatatctgcacccgacgcattcgcaatctttgccgctgagagcttcgtcgccatgccgccggtgccgacatcactgccactgcctttgcccatcttcatgtaatgatcatccaccttatcgaccaggtcaataaactgagctcccgggttctttctcgggtcatccgtatacagaccgtcaatatccgagagcagcagcagcagatctgcatgggtcagtgcagaaacaatcgcagaaagcgtatcattgtctccgaactggatttcataagtcgatacagtatcattttcatttacaaccgggatcgcaccgagcttgatcagctcatcaaaggtattcgatgcatttcttcggcttaagttatcgatcatcgtatttttggtcattaatatctgtgcagcccgatgcccatactcactgaacagcttctgataggtcatcatcagctgtgcctgtccgatcgccgcacatgcctgcttctccgaaacatttttcggtcggtgatggacaccgatcgcctgtcgtccgactgcaatcgcaccggaagagacaaggatgacctctttcccccggtttttcagatcgcagagctcccgtacgagcacctcaagcttcgtcagattcaatgctccggtctccggatgggtgattgaggagcttccaatctttactacaattcgttttttatctttcaggttttctctgtaattcatatcctctgtccttttttcgatcagcaatccctgctttacgcaggatcccgccagtcctctactgtccgcgtacgagtccggtctttctcagcagccgcacgatcagatgtcccttcggaagcgctgcaatctcctcaacggtaatgcccttaaaggaaatcagcccgataccgtaagttgccaccccggccaggattgcaaacagcacggagatcgtattgccaaacaccagatggaacagctggtaaacgagataagcagccgcccccataataatggaaacaatcaccggtatcagaaacgtccgcttccattcctgacgataatgcaggaagcgggcaatcgcaatcgcattcaaaacgctcacaatcaacgcgaaacagatatttgaccatacgaccgcatagatattcaggttgcctgcggtcagcatgacatacagcaggataaagtgaatcacaagtgccgctgcattgttgatcagcggggtctgcagctttccaagtccctgcagaataccggtcgtaagagttgaaaatgcatagagaatgatcaggagcgcaccggcctgcataatgccgactgccagcgggcgaccggtctcaagactcggatagagcatcgtcaggatcggctttgcaagcgccgccatccccactgcacacggaattgtgataatcatggtaaaccgcacagaggtacggatctttcgccgcgcatcgccgcggtcgcctctcgccattgctgcggtcaggctcggtacgaccgacggagccagacaggaagcaagggacaacggcacattcatcagtacacggaactgaccggagtaaatgccccagatcgatgtatactgcttctccgtatagccctggctcaacagaaccttattgaacacgccctgatcggcgacattgctgatattgtagatcagtgtgctcaggacaatcgggataatcgtcagaatcatcgtccggtaaattgcgcgttcagactccagatgcgtcgtcacatccctgcgcatctgacgcttcagggtcgacttctgtaccgtatagacaaacatcataaacagcatcgcaaccgtgatcgatacgacggtaccaaatgtaccgcccgccgcaccccaggccggtcccagcagttcatttccgttttcctgtgccagagaaacgccgtagctgtacatgatattcgcacacacaaccgtaaaaattgcatttacaatctgttcaataacctgcgataccgcagtaggtgtcatatttgaatagccctggaaaaatccccggaacactccgacaatcgcaaacacaaaaatagccggtgcaagcacacgcagcgcatagaccgccagctcaatagacagcacatattttgtgataacgcctgcaaacacataggtcaaaagcgcaagcgcaccacctgcaatcagtgcaaaacgcatcgcgcacagaaaaactctgtgcgcatttttaaattctcccttatgaatccgctcggaaacgagcttggagactgccagcggcagactgaaggaggaaatcatcaaaacgatgttgtacacctcgtttgccgtagaatagtagctgtttccctcatttccaagtgtgttggtcagggggaagcggtagatcatgccgatgatctttgcgatgatcgatgccaccgccagaatagacccctgtaccagataatttttactgttcgactttttttctttctctttcacaccgggacctcatcaatccgcctgaatggatacgttatcgctgtaagagtcaagcacgatgcagacccatgtcttaccctgattcagcgtaatctcattgccgtcggcatcataataatgggtaacgccaaaattctcatttgcaaaggcatcctctgtattgatcacatccttacgccatgtcacatcaatcgctttgccgtttgtaatgtacttgccgttgccgccggagagcacgtcgatgttcagatagccgttctcgtcaaatttctcccacggacaatactggaaaatgatattgtcataggtcagcgcatttccggtcagatagtctatctggacgtctccgtactgatagcgcgtgtatttcccggtctctgcattgtaaacgaaataggcgttgttgtactcatagcccggagcgactgtgatcgcgtccacaccattgtcgagtgtcaccctctcaccgtctgctgcaaactggtaatggccgttcgtcgactgatactcatcagaatactccgtcggataattcatctcgtcaatacccttccagatccgctcataatccgtaaatacattgtgtggtgccggaaaatcatcagaacgataatatactgtctctccaattgaatccagtccgcttaaatttaaggtcgaatccagattcagtagatccagcgcatagactgcctgtccaaaatgcaggtaatatgtattgaattctcttgcgaaatagacataatagttccggcagctgcgcaccgacccgatccgttccacatcctgataatcctcgaaaattcccatcagacgggtaataccgccttctaccggagcttcataaacaacccccgcattcgcgataccggactgtgggagcgcagcctggatattattgagcataacagaaattgccttcgtacgcccaatggattccgggacaagcttaccggtcaggtagctgcgcaccattccgttgtcctcttccgcaaacgctgtcccggcacatgctgtgccgaccatgacagccacagccgcagctgctgtcagttgtttccacattttctttttcatagaatcatctcctattctggtcacggcagcttctgctaccggctgatgtgcagctgcgaaaggatctcttcctgcagccgctccatttcctttgcatcctcctcggtcatatgatcaaaccccatcagatgcaacatactgtgtgcaatcagaaacgcgtattcacgttttctggaatgtccgtactcctccgcctgcgaaatgaccttatcagcagaaattacaatatcaccgagcatcagctctccgctgtccggctcgaaacagtcctctccaccttcttcaagaaatccaaaatcacccggcgtctcatattcaaccatcgggaaagaaagtacgtcggtcggacggtcaatccctctttgctccagattgatccggtgtatctcatcattgtcagtgatcaaaatactgacctgcgcctcatatgggcattccatataatcgagtgcacaggaaacgacatcctgcgcgatttcatacagatccagatccagcgctgtactgctctcgttttcaaaatcaattgtcatcggttctcccacgctttcttatcggtactcttttttcttgtagcctggcggctctccttgtaggcttcctttttctcatattcttcatatgcggtaacgatcttctgtaccagcggatgccggacaacatctttgctcgtcagctggcagaaagagatatcctccacctttccgagcaccttcatcgccgtatccagtccggacggtgcaccacttggcagatccttctgtgtctggtcaccggtgatgaccaccttcgatccaaaaccgattcgggtcagaaacatcttcatctgagccggagacgtattctgtgcctcgtccagaatgataaatgcattatccagtgtacgtccgcgcatatatgcaagcggtgcaacctcgatcagccctttttccatatttttcaggaagctgtcgctgcccataatctgatagagcgcatcatacagcggccgcagatatggatcgaccttactctgcagatcgcccggcagaaatccaagcttctctcccgcctcgatcgccggacgcgtcaggatgatcctgccgacttcttcatttttaaaagcggtaatcgccatcgccattgccagatacgtctttccggtaccggccggaccgacaccaaagacgatcatcttcttgcggatcgcatcgacataagacttttgtccgagtgtctttggcttgatcggcttgccgttgatcgtatggcaaatacagtccccgtcgatcgccacgactgcatcctccttctcttcataagaaagagaaatcgtatagtctacattctgctccgtcagcggcgtcccgcgccttgccaaagtgtccaggctctcaaaaatcttctttgccctgacggcattcgtcgggctcccaagtatcttaatctctccgtcccggctcagcactgtgacctgcaatgcacgctcaatctttttcacatactgatcgaactggccaaacagctccttctggcgctctgccggaacagacagagatgtctcaatcatactcatttccagataattcctcctcgccatccgtaatctccgtccgtaccgtctccggcgtccccaccgtcaacactcctgacgcaatcgcggaagtttcagtccattctattttaacattattttcaaatatttgaacccccttttcctctaaatttttcatgaaatactgtaaatttgagttcaagatagacaatatctcttcttttgtgtgacaaatttccagattttcgtattcgcgtaccgtgatcttctgccagcaaaccggcaaatagaatgcatcgaataaccgcagctgacagagcttgctcagtgtatcactgcactcccatgatggcttccggatgggaagtgcaaagtctgcacccagaatctgcagcagcacccgattcgcctgcttcccggtgtactttttttcag

SEQ ID NO: 598 - DNA, 25964 bp, Unknown
  16S sequences of unknown bacteria
agcagagagaccttcagcacgtccctctgcaaggccagcctccctgccttcacgtttccacatagcttcttcttcccatcgttgcataaacttcactccaatctcttcactggcttttacttgcctgacatggttatggattttgatgagatttccattggtatcggggatatccacatccaaagtagattgctccatatactccagaaattgaattaattcttcggatacttcattacggttggttccgcgggtattgaggaaaattctggttgcgccatcttccaaaacaagagaaggattctcgtcgcagcgtgcatgaaatgtatagcagtatctgccttcgccaaagagatcaaaaggcgtgattatgatattaaacgtatcattcagcagattgaagctctcatctccagacttcagcagagacgagtccataacgctctgatagaagcgacttctgcgcggcagatcaggctttctggttttctgagcttcggtgttgtagatccgcagattttcatccatggaatacacatccagccgaatagaacgaagccatggagctgtacgcagttccttttctgtctgggatggggtgagcagccgtagattctcatcgccgaggatgatccgaagcgcagcttcgtgagcttctggaatatccataacctcatcaaacaaaaacttatcaagcaaagttaattcatttagtgtcttcaatagattactcctttattgtatctgcattagctttgcgttgcaaggaatttataaaattttacaactggaacatgcaaagaatcctgcaaagattaaaaataaaatggatagttgctttcgacggactgaatatctggatatagaacaatgatacatacagattagattcagagtagcatgttatggaataaaaatcaagaaaaatttttgcaggaagttaagtgttttcgttgcatttaaagtttccgaaacagggaaggcagccaaggatacaacacgcttgaaatgcaacatacatgaagaaaggattccggaatgatcgatctcattctggaatcctttttacgttcattcatgcacaatacaacacatcaccggtcacgcaggaactgactatagcttcgtacctgtttctgatcttcatggttcagatcctgataagtcgacagaagtccctgcatatcttttggaagtgaagcaaatggatctgccggtttttcgggatggagtccaacacgaaccagttgatccagcgagatttgaaaataatctgcaatcacgcaggcagtttccagatccgggagccgcgtaccattttcataattggaataagcctgtctggaaatatgaagttgttcactgagctgtttttgagtaaatccgcgatgatgtctcagctctttcagcgtttcggcaacttttaaactggtcatgatcttctccttcttgaatttgcgcttattatagcaagttcccgatttgacttgtttatatgaacagaaacgtggaaaactaattctatttgtactgaaaataaaagtaatagttgcaataaaatacacgaacgtagtacgatagaacaaaaagtgatgtctataagaacaaaacgggggattatagtatgaagaaaatcatgaaacagatttatgcccgcatgtggctggcatggagattcctgcggcttcactttgtgcggatgccggaatctgaagatggaaagtcgcaggagcagttattagaagagattcgaaaaagatcaggactgacttagcgtgctgttatgatactcggatgaactggttacatcctcgccgaaccagtcaggtgctttaaaggcaagagcttcttcctcagaggaaaattccacttctgccagcatgaggtccggtctcggggaagagaagagatccagctcaatagtatattttccaaagggaatcagataacggcgcttggtgatgagcttgccgtcagctttttcgcgcagatgtgcataagcctcggcggtcaggggcagattatattcttcccggaccatcagccctttggatttgtaagtgagataataagtgtcatcctgtttgcggatgcggacaaccggttcggtgcagagataaccctgttcgatatcgtgaaatgcatactccttcagatcaaagggaatggtatggatcagatatttgcgttcgatttcatatgatttcatggcagactccttttggttttatataatgtatggacacatgacagctttaaatttgtgtcccgggtatcttacattttaatatagcataacccgtgttcaaatgatacaatacatataaaaagcataaacaaatgccataaaggctggacagcacatggcatcacctatcatgggaaggaaggtatacgcacatgagcaaagcatgtatatttcttgcagacggatttgaagagatcgaaggactgacagttgtagatattttaagaagagcaggtgtggagatccatatggtatccattaccggagagacaaaagtgaccggttcgcatggaattgagatcaagtgtgatacctgtattggacaggaaaacttttcagaaacagaactttttgtattgccgggagggatgccaggaacgaagaatctgggagcatgcaaagcactgacagagcttctgacagcatcctttgaagcagggaaaaagctcgcagctatctgtgcagcaccaagtgtactgggagatctgggaatcctgaaagggaaaaaagcatgttgctatccaggattcgaggagcatctgaccggagcacaggtggtatttgatcaggtggctcaggacggaaatgtgactaccagccgtggcatgggaactgcaatcccgtttgcattgtcactggtgagccagatggtgtcagaagaaaaagcacaggagctggcgcagagcattatttttaagggataagatttagaaccattcgcaaagcatcgggaagattcagagccacatttgcaaaaacgcatgtgcatggctctgaatctccaacactttccagtatttcttccatgtaaatgtgaatactatgggcatggaggtgattagcatgacaaatcagaacagcaaatccggaaccaacagtatggcggtaccggaggcgaaatctgccatgaaccgttttaaggaggaggttgccagcgagcttggcgtgaacttgaaagacggttacaatggtgatctgaccagccgtgaagccggttctatcggtggcgagatggtcaaaaagatgatcatgaagcaggaacagcagatgtcatccggtcagtaacggacgactgaagccgtaaaagtgtgaaaaaccaaggctggacgggcttttttctgtgtattgagcaggaaaaagcctagacagtcttatttttttgtgctatactcttaaaatgtctatgagtatgtgaatcagggtatactgatctaagaatacaaggaggatataacataaaaatgagtgtacaggttgaaaaattagagaaaaacatggcgaaactgaccgtagaagtaccggcagagaacgtagagaaagcaatccagggtgcttacaataaaatgaaaaaaagcattaacattccgggattccgtaaaggaaaagctccgcgtcagcttatcgagaaaatgtatggaaaagaagtattctacaacgatgcaatcgatgcaatgcttccgtctgcatattctgatgcagtagaagagtgcggcgaggagatcgtttcccatccgcagatcgacgttgttcagatcgagagcggcaaaccgttcgtatttactgcaactgtagctgtaaaaccggctgtagagcttggtgagtacaaaggaatccaggtagagaaagcaccgaccgaagtaaaagacgaggagatcgaggcacagatcaccaaagagcgcgaggctaactcccgtactgtaaccgttgacgaccgtgcagtagcacagggcgacatcgttactcttgatttcgagggatttgttgatggtgttgcatttgagggaggcaaaggtgagaactatgatctgactatcggatccaatactttcatcccaggcttcgaggatcagcttgttggagctgagatcggcaaagagcttgatgtaaacgtaaccttcccggaggagtacggtgcaaaagaactggctggaaaagcagcagtattcaaatgcaaagtaaacggaatcaaagtaaaagagcttccggcagtagatgatgagttcgctcaggaagtatctgagtttgatactctggatgaatataaagcagatattaaggctaaactcctcaaagagaaagaggatgaggctgcaagagcaaaagaggatgctgtaatcggcaagatcatcgagggagctaagatggagatcccggatgctatggtagagtatcagacccgtcagatgctggatgagttcgctcagagaatccagtctcagggtatctctctggatcagtacttccagttcaccggcctgaccgaggagaaatacatggaagagatgaaaccgagagcacttcagaacatccagagccgtctggtactggaagcagtagctcaggctgagaatctggttgctgaggaagctgacattgaggaagagatcaagaagatggctgacatgtacaagatggaagctgacaagatcaaagagctgttaggcgagcgtcagatggaagagatgaagaaggatatcgcagtccagaaagctgccaaactggttgcggaagctgcagtagaggcttaaaaagaaagatacaaaagggcatggcagttcgctgtgcccttttatagacgaatgatatacacagacgagggagttacatcattcaggaggaggacaaataaatggcattagtaccttatgtgattgaacagaccagcagaggagagagaaattatgatatctactccagactgctgaaggagcgtatcattttccttggagaagaggtaaatgagaccacagccagcctgatcgtggctcagcttctgttcctggagtccgaggacccgggaaaagatattcatctgtatattaacagcccgggcggttctgtaactgccggcatggcaatttttgatactatgaattatatcaagtgcgacgtgtctaccatctgtattggtatggcagccagcatgggtgcatttcttctggcaggcggtgcaaaaggcaaacgttttgcacttccgaacgcagagatcatgatccatcagccgcttggcggagcacagggacaggcaacggagatcgagatcgcggcaaaacacattctgcgcaccaaggaaaagctgaacagtattctggcagagcgcaccggtcagccgctggatgtgatcgtacgcgacactgaccgcgataactatatgactgctgaagaggcgaagtcctacggactgatcgatcaggtaattgcaggacactaagggagacacacatggctagaaatgaaatcaggtgttccttctgcggcaagacagaaagtcaggtcatgaagcttttgaagggaccaaatggcgtctatatttgcgatgcctgcgtagaactttgctcagagatcattgaagaagagatgcaggaagagaacaatcacacatctgaggaagatatccatcttctcaaaccggaagagatcaagagctttctggatgaatatgtgatcggacaggaaaatgcaaaaaaggtactgtccgtggcagtttataatcattataagagaatccttgcacagcaggatctggatgtggagctgcagaagagcaacattttgctgcttggacctactggttccggcaagacccttctggcacagactctggcccgcattctcaacgttccgtttgccattgcagatgcaacgactctgactgaggccggatatgtgggtgaagatgtggagaacatccttctgaagatcattcaggctgcagactatgacatcgaacgtgcccagaaaggcattatatatattgacgagatcgataagatcaccagaaaatcagagaacccgtccatcaccagagatgtatccggagagggcgtacagcaggctcttttgaagatcctggagggaaccgttgcatccgtaccacctcagggtggaagaaagcatccccatcaggagctgatccagatcgataccaccaacattctgtttatctgcggtggagcatttgaaggtctggataagatcattgagacacgtatggatcagaagtccatcggatttaatgcagatatccgtgacaagcgtcaggaaaatgtaggggaacttctgcgaaacgcattgccggaggattttatcaaattcggtatgattccggagttcatgggtcgtgtgccgatctctgtatctctggatccactgagcagagatgatatggtccgtattctgctggagccgaagaactccatcgtccgccagtatcagaagctgtttgaactggatggcgtggatctgaagtttacagatgatgcggtgaaagccattgcggataagaccattgcccgcaagacaggagccagaggactgcgttctattatggaagagaccatgatggatctgatgtttacgattccgtcggatgacacgattgaaagctgtaccatcacagaagaagcggtggatggcagcggagtcccgatgattgacagaaaatgagtgacaatttagaagcgtgagaagacggttccaaattgttgaagaaattaaatgagggagccgtgtcacaagacaggctggtgtgttaacatacacacggcagccgtccgtgtggtacggcttttttagataaagaaggaggatggcagatggagacaacagaatacaggattcctgcggtggcactgcgtggaatggttgttctgccggagatggttacgcattttgacgtgagcagatccagatcgatcaaggctgtggagcaggcattgtctcagaagcagaatctgtttgtggtgacacagcgagatccggatacagatgcgccggagcaggaggatctgtttacatacggaacggtcgtggagatcaagcagatcgtgaagatgccgcacaatatattacgggtactggtggaaggtatgttccgggccagactggtgaaacttgagaccggtgagtatctgaatgctcaggtggaggagtcggagccggaagatttcggcgatctgccgttggttggaaaggaagccatgcttcgcaatctgaaggagatctttcagacctactgcgaaggagccagcagaaacagtaaggaactggtgcgtcaggtgctggacagcagaaccctggaggatatgatcacacaggttatggtacatgcgccctttgactgggagaagcagcagcatctgctggaggcacagagcctgtccgcatgttacgagatgctgtgcatcaccctgaataatgagattgagatcgaacgatatcgccgaagcgtgcaggaaaaggtaaaagcgcgggtagataagcagcagaaggaatattatctgcgggagcagatgaaggtgatccgggaggaactgggcgatgatggcccgaatacagaagcggaggcgttccgtgaagcggtagagaagctggaagcttctgatgaagtgaaggagcggattgagaaagagatccagagatttctgaatgcaggctttaattcagcagaggcatcggtgagccgcggctatattgagaccctgctggatcttccgtgggacaagagaggcgaagacaggctggatctgaaagtggcggaagatattctggaaaaggagcactatggactggaaaaagtcaaagagcgtattctggaatttctggcagtccgcaagatgctggatgccagtgagagtccgatcctctgtctggtgggacctcctggaactggtaagacatctgtagcccgttctattgcagaagcattgaataagaaatacgtacgcatatgtctgggcggcgttcatgatgaggcggagatccgcggacaccgcagaacctatatcggagccatgccgggacgtatcgtggatggcatccgtcaggcaggtgtgaagaatccgctgatggtgctggacgagatcgacaaggtcagtgcagattataagggagacaccttctcagcactgctggaggtgctggacagcgagcagaacagcaaattccgggatcattatgtggagattcccatggatctgtcagaagtgatgtttatctgtacagcaaatgatctgagcaccgtaccgagaccgctgcttgaccgtatggagatcatcgaggtcagtggttatactgaaaatgaaaaataccacatcgccacagagcatctgatgcagaagcagatgaagaagcatggactggatgaaagcagattccagatcagtgagaaggcgatgcagaagatcatccatgagtacaccagagaatccggtgtgcgtgcactggagagacggatcgcatccctgtgcagaaaagcagaccgggagattctggagaagaaccggaagaaggttcagatcacggagcgtaatctggagaaatatctgggaaaaagcatctatgagaccaatatgaaggctgagcacgatgaggtggggattgtccgcggtctggcatggaccagcgtaggcggagatacactggagatcgaagtgaaccttatgccgggtaaaggaaaatttgaactgaccggacagcttggagatgttatgcaggagtctgccaaggcaggaatcagctacatccgttccgtcagcgatgactatgagctggatccagagtatttccagcagcatgacatccacatccatattccggaaggcgcagtgccgaaggatggtccgtcagcaggaatcaccatggcaacagccatgttgtctgcagtattaaataaaccggtgcgggcagatgtggccatgaccggagagatcactctccgtggacgggtattgcccatcggcggcctgaaggagaagcttctggcagcgaaaggggctggcatgaagactgttattgtaccggagaaaaaccgccgtgatgtggaagagctgtccagagagatcaccggcggactggaactggtctatgcacagaatatgaatgatgtaatctcgcatgcatttgtgcagtaatgaaggactgcgcaggcatcgcggccttgaacaatgcagatcggaaaaggagaaaatatatgatcatcaagcaggcagagctggagaccgtatgcggcatcaccagcaagcttccggaaaatgaatggccggaagtggcatttgcggggaaatccaacgtgggaaaatcctccctgatcaacggacttctgaatcggaagtccctggccaggacatcttcccagccgggtaagacccagaccatcaatttttataaagtaaacggtgacctgtacctggtggacctgccgggctatggttacgcaaaagtaagcaatgagatcaaagcaaaatggggtaaaatgatcgagcggtatctgcatggatcaaagcaactgcgtgcagtgtttctgctcattgacatccgtcatgacccgtcggccaatgacaagaccatgtatgactgggtggtccatcagggatttgaacccattatcattgctacaaaactggataagattaagagaagtcaggtgcagaagcagatcaaagcgatcaaagaaggactgaatctgctgcctggaacaaaagtaatcccattctctgcagagaccaaacagggtcgtgatgagatctgggaggtcatcaattctctgagagaggatgaatcggaagaaggagtctaagatgagcgaagatgcgcataaaacaactgagggagcagtgttgataaagcggatcggacgaaatgtactgaatgtagggatcttccttgtggaagtcctgttcctgatactggcaggaccggcactgctgaagtttttcatgccggtggtgctgggctggctgatcgcctgtattgccaatccactggtgaaatttctggagaaacggctgcacattgtgcggaagcacagttcctttgtggtgatcttaggtgcgatcctgctgatcgtgctgggatgctattatgggatcactgcgttgttttatgaaggcgcgaagatcgtggagcgtttcccggcttattatgcgaccttgctggatagcctgaatcacctgggagaccagctgcagcagctggttggccgtatgtctccggagatgagtgataagatcgaacaattgacggatctgatcacttccaatctgggacagattgccggaagtctgggaagcattacggtaggtgctgcaggaaatgtggcaaagaacattccgtcaattctgatatcgtttttatttactctgctgttcgcttatttttttattgcgcagagagaccggatccagaagatggcgagaaagctggttccaacggatacagcagaacagctgaagctggtatggaatcgactcacctatgcgttgggcggatatttccgtgcacagttcaagatcatgggaatcgtaggaatcattctatttgttggattcctggtcatgagaattgagtatgcagtattccttgcgttgatcattgcggttctggatttcctgcctatgctgggaaccggaacagtgatgattccatgggcgctgtatctggtgctgtgcggtaatctcccgctggcagcaggactggtgatcctctatgccgtgactcaggtcacaagacagctgatccagccgaagatggtgagtgacagcattggcatagatacactgaccacactggtattcatgttcattggctggcgtgctgccggtctgatcggcatgatcgttgcagttccggtgggactgatcatcctgaagctttcggaggcaggagcattcgaccatattctgaaaagcatcaaagaattgagagaagatattcatacattgagaagaggataaaatgaccttcagagtgcattcgcaaaattgcatttgcggatgcactctgaaggtttacaagagttctttcatgatcgtagcataaatattctggcttttttcagcccagtgactgcaggcggattccgcctgcttttttgatggaacctggaaagtcaggtcgatcagattggaatcctgctcacgaacgcggcagcgtaccacgtactcgccattatttcctacaaaataatcagcggtggtagacagagcttcacggatcgcgatcttgtgttcctccaggtaattgtgaatatctgtcaggatcgcatcagagatcttattcccaaaaaattccagtgtattttttccggcatcggtgatgtgatacagagaattatttcgcttggtagtcacatttacaagaccggtctcatccatctcggagagtgcctgctgaacggtgaaataattggtgtattctttgtccagaatgaattcggtgatctgagagttggtcagcggatattccacctgttccagcattttcagaatgatcagtttatataaactcagcgtatcagccatggggtgtctccttctttctatatttttttccctgccacgtatcctgcagacggaattcccggtgaatattgttcagcacagttctctttgccagactccagcggggctcgatgagcagatccttaggaccatcaccggtcagacggtggatgaccagatcagggcgcaagatctccacgcaggcagggatcagcttcacatattcctccatagtaaatacgtggaacgggtcttcctcatagcggactgccaggtctgtccctttcaaaatatgcagaagctggagctttatgccttgaatatcctgatcgttcagataatgcaaggtttcaaacatccgctcctggtcttctccgggaagtccgaggatcgtgtggacgatcacttccagaccagccgcacgcagacggtttaccgcatcctcaaagacggacaggggataaccgcgccggatatcacgggcggtatcttcgtgcatggtctgaagtccaagctccacccagacaggcttgatctgatttaactgggccagcagctccacgatctctggctgcaggcagtccgggcgggtggcgatagataataataccacttgaggatgggcaatggcttctgtgaagatggtccgcagataatccaccggtgcataggtattggtaaatgcctgaaaataggcaatgtatgcattgaccgggcgtttgcgggagagccgttccttgccggattcaatctgttcccggatggatagcgccggatcggaggcaaattcgccggaaccgccgccgctgcagaagatgcagcctccgtgacctacagtgccatcccggttaggacaggtcatgccgccgtttaacgccagtcgatatactttttctccgaaccgtttttttaactcatagtccagagagtggtaaggtttgtcattccatagtctcatatattcaatctatcataggaaaaaataaaaatcaatgaaagtttcccttttcatttagggataaagagagtatactaaaaatagtgttagtgaagaaagacaggtattcatcgacagacagattccatacaattatttcgcacgtcaggcggaacatttccccatttagttaagacaacagatgacgaagaaaaaatcgcaggaggattttatggcagataatatgaaagaaaaatatgagtctctttctctggcagtattaagagatgtggctaagagcagaggcatcaaaggaacctctaccatgcggaaagaggctgtgatccaggtgatgctggcagaagacgagaaggaaagagctgcagagtcagtgaaagcgcaggctgcagacagcggacgcaccgtggctgatatggaacagctggacagtggacagaccgtgaccggtattctggaagttatggcagacggttttggatttatcagaagtgatcattatcttccgggagagcatgacgtctacgtatctccggcacagatccgcagattcggactgaagaccggtgatatcctggttggaaatacgaagattaagacggaaaaagaaaagttcagtgcattgttatatctgaaaagcgtgaatgatctgaatccggatgtaaatgcaaaacgtccgaattttgaagatctgactccaatcttcccgaatcagaggattcgtctggaacggaaaggaggaagtacggcagtccgtgtgatggatgagatcgcacccatcggaaaaggacagcgtggtatgatcgtagctcctccgaaagcaggtaagacaacccttctgaaagaagtggcaaaatccattaccaccaacaatccggagatgtatctgatcatccttctgatcgatgagcgtccggaggaggttacggatgtaaaagaggcgatcgagggacagcatgtggaggttgtctattctacattcgatgaactggctgagcgccacaagagagtgtcggagatggtgatcgaacgtgcaaagcgtatggtagagtcaggaaaggacgtagtgatccttctggacagcatcacccgactggcccgtgcctacaacctgatcgttccgccaagcggacgtaccctgtccggtggtcttgatccggctgcattgcatatgccgaagcgtttcttcggtgcagcgagaaacttaagagaaggcggaagcctgaccatacttgcaacggctctggttgatacgggaagcaagatggatgacgtggtctacgaggagttcaagagtaccggtaatatggaactggtgcttgaccggaaactgtccgagaagagaatcttcccggctatcgatattcccaaatccagtacccgtcgagatgatcttctgctggatccggacgagcagcaggctatggacaatatccgtaaagcactcaacggaatgaaagcagacgacgccgtagagaccatcctcaacctgttctcacggaccaaagacaataaagaatttgcacaaaatgcaaaacagacaagatttttttaagaaattcttgcatcaggcatgtgcctgtgctataatctaatggataatgtaggtgattgcccacaggcaatcaaagaaccgcagggacttgcggggttagcccgggatatcttaccgtggaagtatcggagcggtattggccgggaatcagcacctgtgctggaagttcacgaataataagagaggtgaaaagaatatgagagaaggaatccatccggagtactatcaggcaaccgtaacctgcaactgcggtaacacatttgttaccggttctaccaaacctgatatccatgtggagatctgttccaagtgtcattcattctacactggacagcagaaagtggcagcagcccgcggacgtattgataagttcaatcgtaaatatggtatcagcaaataagattgctaaaagtaaggttgaggttagaagtaatctcaacctatttttaattaaaccaaaggatgtgaaatattgaaaccatcaggaataggcggtcaggcagtgctggaaggcattatgatgaaaaataagagccagtactccgtagccgtgagaagaccggacggcgagatcgaggtaaagactgacgagtatgttggtattgcaggagacaaagcctgggcgaagctgccgttgatccggggaatggtgaattttatagattctatgatcctgggaatgaagactctgtcctggtccgcaagcttttatgaggatgaggaagaagaggcaaagccgggaaaatttgagaaatttcttctgaagctgtttggtgagaaggcagagaaagtagtgatgggagcgaccgtggcattttctgtgatcatggcagtgctgatctttatgctgcttccctacttcctgtccggactttttcggaaatttatcgtatccaatacactgctggccattgtggaaggctgtatccgcatgggaatcttcattctctatgtggcactgatctcttccatgaaggatatccgcagaacgtatatgtatcatggtgcagagcacaagtgtatcaactgcattgagcgcggaagagcactgagtgtgagaaatgtgcggaaaagctcccgttatcatgcgcgctgcggcaccagctttctgttcatcgttatggtgatcagtattattttctttatcttcattcgggtagagtcaccggtggcacgagtggtcgtccgtgtgctgctggttccggtcattgccggagtggcatatgagttcattcgcttgacaggacgcagcaacaatattgtcatgcggatcttaagtcttccgggcaaagggatgcagatgctgaccaccaaagagccggatgatgacatgatcgaggttgccatcgcagcagtggaagcagtctttgactggagagcattccagggactcaaagaggaggagccgctggaggagctggaaccggatgtaccggagcttggatccgggcagacagacgcaccggaactggaggagctggatgagatcaagatcgaggatctgtagatgacactgggaaccttattaaaacaaggaagagagattcttcagaatgccgggatcgcagagtgggatctggacgcctggtatctgctggaatatgtgacaggtgtgagccgcagccagtattttctggacccagagcgggaagtgccgcaggaacaggaagccgcgtaccgtcagatgatagacaagagaagcacccacattccgctgcagcatctgaccggggagcaggagtttatgggccttacattcaaggtcaacgaacatgtgctgatccccagacaggacaccgaggtgttggtggaagaggcactgaactatgtgaggagcggcatggacattctggatgtgtgtaccggatcgggatgcatcttattgagcgttctgaagctgggagagaaaaagtgccgtggaatccttcacggaaccggtgtggatctgtccagagaggctttgcaggtggcagaagaaaatgccgggcggcttcaggtagaagccacatttctgcacagcgatctcttcgcagaagtgcaggggcagtatgacatgattctgtccaatccaccatatattgaaaaagcagtggtggagacactggaagaagaggtgcgtatccatgagccacgtatggcactggatggcggagaagacggtcttgatttttacaggaagatcacggcagagagtgtgcagtatttaagaaaaggcggacggctgctctttgagatcggttacgatcagggagaagcggtcagcgcccttatgaaggaacattttgcagaggtgcgcgtgattcaggatctggcaggacttgaccgggtcgtgagcggcgtgtactgtggttaatgatatggaggaaaaaagatgtttgataaactggaagatctggtaagacggtttgaagagatcaccaacgaactgaccgaaccgtcggtagtcaatgaccagaatcgtttccgcaagctgatgaaggagcagtctgacctgcagccgctggtggatgcctacacagaatatcggaaatgtcaggaaaccgtagaagacagtctcgccatgctggagagcgagtctgatgatgagatgcgtgagatgctcaaggaagagatgtctgacgcgaagaagcggatcatagagctggaacaggagatgaagatcctgcttctgcccaaggatcctaatgatgagaagaacgttatcgtggagatccgtgccggcgcaggtggagatgaggcagctctgttcgcagctgaggtctatcggatgtatgtgcattatgcagagtccaaacgctggaagacggagatcgtggagtgcgacgagatcggtatcggcggtatgaagagcgtgacctttatgatcaatggtcagggcgcatattccatgatgaaatatgagtctggcgttcatcgtgtgcagcgtgtgccggagacagagtccggtggacgtatccatacatcaacgatcagtgtggcagtgatgccggaggtagatgaggatattgatatcaagatcgaggacaaagatatccgtatcgacgttatgcgtgcatccggtaacggtggacagtgtgtcaacaccacagactccgcagtgcgtctgacgcattacccgactggaatcgtggtatacagccagaccgagaaatcacagctccagaataaagcaaaggcatttgcactgcttcgtgcaaagctgtatgatattgaacagcagcagagacatgatgcggaggcagagatgcgccgcagccagatcggtaccggagaccgttccgagaagatccgtacctacaacttcccgcagggacgtgtgaccgatcaccggatcaacctgacgctgtataagcttgataagatcatgaatggagatatccaggagatcatcgatgcctgtatcgcagccgatcaggcaaagaagctggcaaatatgaacgattaaggtcttcgctgtcagatgaccttataaaaaaatatattaagtaggatagtaaggagcaaaacatgggaaaatattttggaacagacggctttcgtggagaagcaaacgtaaatctgaccgttgagcatgcctacaaagtaggtcgtttccttggctggtactatggcagggaacacaaagcacaggttgtgatcggaaaagataccagaagatccagctatatgtttgagtactccctggtagcaggtctgactgcatccggagcagatgtatatctgcttcatgtaaccaccacaccgagcgtatcttatgtggtaaggaccgaaggctttgactgcggcatcatgatttctgccagtcacaacccgttctatgataatggaatcaagatcataaacggaagcggctacaagctggaagcagatgtggagcagaagattgaggattatattgatggcaagaccgaagagatcccatttgcaaccagagaaaatatcggacgcacggtagacttttctgcaggccgtaaccgctacatcggttatctgatctctctgccgacacgttccttcaagaccatgcgtgtaggacttgactgttccaacggaagtgcatcttccattgccaagagtgtatttgatgcactgggggctaagacctatgtgatcaacaacgaaccggacggaaccaacatcaaccgtgactgcggatccacccatatcgagggactgcaggcatttgtaaaagaaaaaggactggatgtaggattcgcttatgacggagacgcagaccgctgcctggcagtagatgaaaatggaaatgtgatcgatggagacctgattctctatgtgtgtggtaaatatctcaaagagatcggacagctcaaggatgatatgatcgttaccaccgtcatgtccaatattggtctgtacaaggcatgcgacaaagttggacttcattaccagcagaccaaggtcggtgataaatatgtatttgaaaatatgatggagaacggctatcgtctgggcggtgagcagtctggccatattattttcagcaaacatgcgactacaggtgacggtatcctgacttccctgaagatcatggaagtgctgctggagaagaagacgacactgggaacactggcatctgaggtgaagatctatccacagctgctggagaacttacgagtgacagacaagaaagcagtgctggagcatccggcggtaaaagaagtgatcgaacaggtgaaagaagatctgggaagcgacggacgtatcctggtgcgtgagagcggtacggagccgctgctgcgtgtcatggtagaggcaaccacccaggagctttgcaaagaatatgttggaaaagtaattgaaactatgaagagtatcatgtaggaatacaggaggggaaacatgagaaaaacaacactggtagttatggcagcaggaatcggcagccgtttcggcggcggtatcaaacagctggagccagtaggaccgtccggtgagatcatcatggattattcgattcatgatgcgctggaagcaggatttaataaagtcgtatttatcatccgcaaggatctggaaaaagatttccgcgagatcatcggcaaccgtatggagaagctggtggagaccgcttatgcatttcaggagatcgatgaccttccggccggattcacaaaacctgccgacagaaccaagccgtggggtaccggtcaggcgatcctttcctgtaaagatctggtgaatgagccatttgcggtgatcaatgcagatgactattatggaaaagaagcatttgtgaaagtgcatgactatctggtggaagaacatccggccagtgataaactggatttctgcatggcaggcttccttctggaaaataccttaagtgaaaatggcggcgtgaccagaggcatctgcagtgtcaatgagcagggtcacctgaccaaagtaacagagaccaaaaatatcgtaaagaccgcagaaggtgcagccgtacaggcagaggatggcagtctcacagcagttcaggcacattgtccggtatccatgaacatgtggggcttcactccggagatcttcggcattctggaaaaaggatttgcagaatttttaggttcactcaaagaccagaccaagggtgagtatctgatccctaccgttgtggatcagctgatccaggccggtgtgtgcaatgtaactgttctgaaatcccgcgacaaatggtttggtgtaacctataaagaggacaagccgctggtagtccgttccttcagggaactgatcgatgccggcgtgtataaagaaaggctgtttgactaaatgatggagattttattcagaagacccgaactggatgacagggagacgattctgaagcatctgtctgaacgcagactcagaggctgcgagagaacatttgcaaatgtttatctgtgggcacgtttctacaatgagggctgggcggagatcgaaggaacagcagttttccggacaggccctgaaggtgcctattcttatacgtatccgatcggagccggggaccgtaagaaggttgtagagcttctgatgcaggatgcacaggaaaaaggatatccgtttcagctgcatgctctcagtacagaagaaatgaatgaactggagagttatttcccaggaaaattccaggtgacctggcccagagattatgaagattatgtctatgagacagaaaaactgatcaatttatcaggaaaaaaatatcacgggaagaagaaccatatcaaccagttcaaggcagcatacccggactggtcatatgagaccattacggattccaatgtggaagaatgctttcagatggctctgaaatggcgcggagccaatggctgtgaggaagacccggagaagaatcaggagatgtgtgtgacactgaactccctacggctgttcaaggaacttcatctgaagggtgggcttcttcgcgccgggggaaaggtagtggcatttaccctgggcgagcctgtgtgtgatgatacatttgtcgtgcacatcgaaaaggcatatgcagatgtgagaggtgcttatccactgatcaaccagcagtttctggagcatgaagtatccgggtacaaatatgtgaaccgtgaggatgacacaggagaggaaggtctgcggactgcaaagctgtcctatcatccggtatttatggtggaaaaaggtattgcgaccttaaaaggagaataagataagatgagtacatgggaagagaatgtccggaaggtgactccctacacaccgggagaacagcccaaccgaccgcagatgatcaaactgaacaccaacgagaatccctatccgcccgccccaggcgtggctgaggtactgcgacatccagacgaggatgccctgcgccgttatcctgacccggcagcctctgtgctggtaaatgcactggctgagaattatcacgtaaagccggagcaggtgtttgtgggagttggctctgatgatgtgctggctatggcattcatgaccttctttaactctgaaaaaccgatcctgttcccggatatcagttattccttctatcctgtatgggcagaagaattccggatcccacatacgcgagtggcgctggatgagaatttctgcatccgcaaggaagattactatggggagaatggcggtatcgtcttcccgaaccccaatgctcctacagcactggctatgggacttgacgatgtggaagacatcatccgtcacaacccggatgtggtcgtgatcgtagatgaagcatacgtggactttggtgcggagtctgccctgaagctggtggaaaaatatgagaatctgctggtggtacagacattttccaaatcccgttctctggccggtatgcggatcggctttgccatcggttctccaaagctgatcaaatatttaaatgacgtaaaatattccttcaattcctataccctgaaccagacctctctggcctgcggcgtggaagctgtgaaggatcaggcatattttaatgagacccgctcccgtatcatgaagacccgggagcatgccaaggaagtgttaggagagatgggattctccttcccggactccaaggcaaatttcctgttcatcacccacccggattacccggcgaaagaactgttccaggcgctgcgccagaaggatatctatgtccgttactttgatcagccgcggatcaacaattatctccgcgtgaccatcggaaccgatgagcagatggaagcattttatgaatttttgagagactatatgaggtaaaaaataatggaatcaattatgtcatgggtgatctctgcgctgagcggccatgtatcccgggaaatgatcgttttcatcatttccatggtaccgatcctggaactcagaggtggtctgctggcagcatctgtgctgaatatcaatattaccagagcactgtggatctgcattatcggaaatattattccggttccgttcatcctgctgttgatcacaccgatctttaactggctcaaacagacgaagaccttccgtcccatggttgagaagatggaagcacgtgccttgagcaagcgtgagcaggtagaaaaatatgaattctggggactggtattgttcgtagggattccgcttcccggaaccggcgcatggaccggctctctgctggctgcactgctcggcatgaaattcaaaaaagcatttccggcggtgctgctgggaatcgcactggcatcagtgatcatgtccatcgtgtcctatggactgctgggagcgttgatccactaagaactagaaacacatactggctgggaaaccggcacaaagcgtaaaacttgcatatgcgttctgcgaaaaggatgaggctgttatgggagagaatgcaaaaagattgtttttcgtttataatcctcactcaggaagaggaaatatccgttcaaaattatttgacatcgttcaggtattttccgaggcgggatatgagatcaccatctatcctaccagggaggcgaaagatgccacccgcaagattgagcatctgtcagatcaatacgatctggttgtgtgcagcggcggtgatggaaccctggatgaagtggtagaaggtatgatgcaccggcagaaaaagctgccgcttggctacattccttcaggaactgtcaatgattttgccagaagtctgaagattccgcgggatatggtgaaagctgcccgtctggcagtgtccggaaaagatttcctgagtgatgtgggtactttcaacaacagtcattttgtatatattgcagcatttggcatcttcacggatgtggcatattccacgccgcaggatatgaaaaatgttctcggcaatatggcttatcttctggagggagtcaagcgtcttgccaatattccgtcttatcacctgaaattttcctcagaggaatgcagcggggaaggcgatttcatctttggaatggtgaccaattcccgttctgttggcggatttaaaagcatcataggaaagaatgtgcggtttgatgatggtgtatttgaagtgacttttgtacgccttccgaaaaatgcggcagaactgcaggagattctggcggccatcgtactcaaagagatggatacacactatatgatctcatttcggactgcccggttaaccatcgaagcacagcaggagatcccctggactctggatggggaatatggcggtgaatctcaaaatgtcattattcaaaatcatcaaaaggcgttgcagattcgtaccggaaattgaaaaaggtcacaaaaaaaataaaactacttgcatttttatggggtatcgtgtattttaatagcatcagatgcagcaaaagcttctgacataaagattgagcgaacaaagatgttccacttttaggggtggagcatctttttttgttatagcgacgagaaaatggacagcatgcttacatgaacggatatttgacgacagctgttcagagccgggtttgcagagcagatcacaactctgacaggagtaaggaagttgctatatgtcaaggaaaggatggagagaagtatgagtgtaaatgtggctgaagtatttggtcaggacgtatttaacgaagcagttatgaaggaacgtctgccggaagtgacttacaagcagatggtaaaactgatgaatgagggcggcgaggttacgctggagctggccgacatcgtggcaaaagccatgaaagaatgggcgatcgaaaaaggagcaactcattacacacacattttccagccgtacattgtaagtatcggagctgagaaacacgactccttcgcagatattccgaagggtggcaagatcgagaactgcttttccggcaaagacctgatgatgggcgagccggatgcatcttcctttccgtccggcggactccgtgcaacctgtgcagcaagaggttataccgcatgggatgtaggttcgccggcatatgtgaaagatggaatcctctgtattccgactgcattctgctcttacactggcgagtctctggataccaagactccgctgctcaaagcatgtgatgctgtcagcaaagcaggtgttcgttttgtaaaaatgtttggaaataccgatgctaaaagggtcagctcttatgttggacctgagcaggagtattttattgtaaatcgtgaaaaatatctggagcgtccggacctgatctatgctggacgtactcttttcggagcaccggcaccgaaaggacaggagatggaggaccagtacttcggaccgctgaagaccaagatcgcagatttcatggcagatgtggatgagcagctctggaaactgggtatcactgttaagacccagcacaacgaggtagctcctggacagcatgagatcgcaccgatcttcgcaccggctgacgcagcactggacagcaacttcctggtaatggatgtactgaagagcaccgcaaccaagcatggtctggcttgcctccttcatgaaaaaccatttgcaggagtcaatggatccggtaaacacaacaactggtctctgggaaccgacaatggtgtgaacctgttcaaaccgggcaaagaaccgaacaagaatcttcagttcctgtgtgtacttgcctgcctgatggaagcagtcaacaagcatgctcttctgctccgtgcagcggcatccaacactggtaacgatcacagactgggagctaatgaggcaccgccagcaatcatctccatctatatgggcgatcagcttggcgagatcgtagatgccattgtagcaggtgtcccgtttgatcagcttccgtgtgcagaggttggaactctggatcttggagtcagcacccttccggtactgccaaaagacccgactgacagaaaccgtacttcaccgtttgccttcaccggcaaccgtttcgagttccgtatggtagcatcttctgtatccatcggtgatgcaaatacggttatgaactccatgatggcagaatccttcaacaaagcatgcgacgctctggaaggagctgaggactttgaaaaagctgcaattgactacatctacaagaccatgaaagagaataagaacattgtcttcaacggtaatggttactctgatgagtgggtagaggaagcagctaagagaggtcttccgaacgtgaagagtattgtggatgcaatcccggcatacacagatgagagcagcattgagatgttcgagaaactgggcgttatgacgaagagagagctggaagctcgccgcgagatcaagctggaagagtatgcaggcctgatcaatatcgaggctcgtaccatgatcgacatggctgcaaaactgtacattccgtcagttatcgcttatgtcaatagcgttgcatcttccatgagcaccgttaggaacgcatatgcacaggctgatactaccgcacagcagaccattcttgtaaaagcaagttccctgctggcagatactcagcaagctctcgataacctgaaagcagttaccgatgcagccgagtccgcaaaagacttccatgagaaagttcttccggcaatggcagctcttagaacaccggtcgatgaactggagaccatcgtggacagtgagtactggccagtaccgacctatggacagatgatgttcgaggtgtagtgagcggcatagataatttagctatttaggtgagtccaggtgcgagtggtgtagataccttatctactaatgagaacctaagtgccacgagtacctaatatatatgttaacaagtttaacttctcctaatatagaaactatttgcgaaaaagagcccgtatgggctctttttcgttggtgggggacttgttggttgattgccgcggttttgagttttgaatgtgtcaaaatctgttccgcggtggtctgccgggaggatgtttgggcagcaaacgcgggaaagaggtactggttgcccaaaaccaagtccgcgggaagccaaatac

SEQ ID NO: 599 - DNA, 1840 bp, Unknown
  16S sequences of unknown bacteria
tcgtgggctcggagatgtgtataagagacaggtctccagcaatctacctaccctgcaggacttttatttgacgcaggacgaactggtattgctttttccctctcctgatatgctcacaacactttctttctctattcctttggcggatctgagtggtattctgtccgaatctctgctttcctccctatcctgaaccaacaaaaaagcagctgacttccagctgctttggtacataacattatattagttctgccaaacacaaatcagtcaaagccgccgtaatccgcacccgccggatcgtcccccgtatatcctcctttgtttccacacatacaggcgtatagttaggcgtgtagccttcgataccataaggcgtttgagtcgtttcgaaaaggacatcttcttcccggcccacctgtgactgtaaaaaggcttgacgggtcttgtcggtcacctcgatcaaccgggcgctgcgggtctctttttcccgttgaggcacttggtccggcatcgacgctgcccgggtaccggggcgcaccgaataagcaaatacatgcgcttttgcaagtccaatctctttcgcaaaatccgccgactgctgaaagtcctcttcggtctctccgggaaagcccaccatgatatccgtagtaatagaagggttctcaaatgcttttcgaatatcctctacaatcctacgatactcagcgctgtcataatgacgattcatcgcttttaacgtacggtcacagccgctttgcagtgacaaatgaaactgcgggcagaatttaggctgggctgacaaccgattcaaatcttctgctgtcaaaagctccggttccaatgaaccaagccgaacacggcggataccgtccacctggcaggcagcctctactgcatcaatcagccgcagccccagatctttgccgtaacacggcagattgatgcccaccaacactacctcctgatatccctgtgccgccagctgtgcaagctctgccatcatatctgcaatcggtttagaacgaaccgggccgcgagcatatgggataatgcagtaggcacagtagcggtcgcagccatcctgaatcttaacaaatgcgcgggttcgttccgaaaaacggttggcagacattttttcaaatgcctcccctttctgatgcggaataatctgaacaatgcgctggtggttctgcaaataattctgcaccaagtccaacagacctgcccgattggtggaaccggttacgatatccgcctcctctagtccagccgcttcctggggaaaggcctgaggataacacccggtcagaaccattaccgcatcaggatgctgccgtttaagacgccgcagcatctgccgggtttttttatcccccgacgctgtcaccgtacaagaatttataatacaaaaatccgctttttccccattctttgccgactcaatacccgccttggcaaaacgctcttccaaaatttggctctcatattgattcactttacagcctaatgttacaaataccgctttcatctgttcctccgcatctttgagtgaaaaattttatcgcatttacacaaaaaatcatataaaaaattaacagaaatcacgaatcaaaaaggcatatccattggatttccttccaatattctaacaaaaagtatgaataaatacaattacacattgacaaaaagaaaaaaattgtatatggttgtaattggtaggaaaaaataaaaaataaattgatttaaggaggaaaatattatgaccacaaaaactatttctttgaacaccatcgttgatgtaaaagaatttgtcaacacagttgctcgctatgatttcgag

SEQ ID NO: 600 - DNA, 32759 bp, Unknown
  16S sequences of unknown bacteria
ggcctgcagagggagattgcggagacggaggcaaagctgaagtctctggaagagcaggcaaagagttctgccacggctcttcaggagatcgccgcgaagggtgagaagctgaagacggtcggagataatatcacgaatgtcggaaagaagtttcttccggtgacaggggttgtaacaggcttaggcgcggcggcggtgaaaactgccgctgattttgattccgccatgagcaaggttgcggcggtgtccggtgcgacaggtgcggactttgatgccctgagggataaggcacgtgagatgggaagcaagacgaagttctccgcatccgaggcggcggaagccatgaactatatggcgatggctggctggaagacagaggatatgctttccggtattgagggcgtgatgaaccttgcagctgcttccggtgaggatctggcgactacttccgatatcgtaacggacgcgcttaccgcttttggattatcggcttctgattccgggcatttcgcggatatccttgcggctgcttcgagtaacgcgaatacgaatgtttccatgatgggcgagaccttcaagtattgcgctcctatagccggtgctttgggattctctgcggaggatacggctgaagctatcggattgatggccaacgcaggtatcaagggttctcaggctggtactgccttaagaaccattatgaataacctttccggggatgtgacggtctgcggatcagctatcggtgaagtgacgattgcaacgactaacgctgatggaagcatgagggatctttccgatatcttggctgactgccggacggcattttcgggtctgacagaatcggagaaggcacaggcggctgagtcgcttgtgggaaagaatgcaatgtccggattcctggctctgatgaatgccggggaaggtgatatcaataagctttcttccgcaatagataactgtgacggctgtgctgccggtatggctgagaccatgaatgacaaccttgccggtcagctgacgatcctgaagtcacagctgcaggaactggctatctctttcggagaattgctgatgcctgcgatccggacgatcgtcggatggatccagaagtttgtggactggctcaattcgatggatgaaggcacaaggaaggttatagtgacaatcgctttggtggcggctgctatcggtccggtgctgatcattgtcggaaaagttatttcagccgtgggtaccattatgacattggtgccgaagctggcgggtgtgatcaatgcggctaagggtgtttttgctgctttcaatgcagtatgcgcggcgaatccgtatgtgctgatcatagcggctatcgtggctctggtggcggcgtttatctatctctggaataactgcgaagagttccggcagttctggattgacctgtgggagagcataaaagagatcgctgttgccgtatgggaggcattgaaggaatttttcacggctgcttgggaagcgatcaagaccacggcagtgacagtctggaatgcgatcaaggatttctttaccgggctgtggaatggaattaagaatgtgttcacgactgtggtaaatgcgatttcgacatttctgacgaatgcctggaacgcaatcaaaaatactgtgactacggtgttcaatgcgataaaaaccttcttcaccacggtctggaatgggatcaagtcggttgtcacgactgtggtgacagcgatttccaccttcctgacgacggcgtggaatggtatcaagaccgtgatcacaacggtgctgaatgcgataaaaactgtggtaacaacagtctggaatggcattaagaatacgatcacgactatcgtgaatgggataaaaaatgccgtcacgacagcttggaataatatcaagtctgcggtatcgacggcggccaatgccataaagaatgcggtttccaatgcttttaacgcgatgctgaacggtatcaagaatgtctgcggaaatatctatggcgcagtgaagagcggctttgataaggcgatcaattttgtgaagaatctggcgacacaggctttccagtggggcgctgatttcatcggaggtatcgtgaacggtatcaagtccatgatcggcaaggtcggggacgctgtttcatcggttgcggataagatcaagagcttcctgcatttctccgtgccggatgaaggaccgcttacggattatgagagctggatgccggactttatcggtggacttgcgaagggcattgagaagagccggggcatgatcgaacaggcaatgcagggcgtgaccggggatatgacgatcactccgagagtgatggctgctcagggtggttattccggcggcggagtgaatggcggtgatctgatttccggtatcaatacggcgctgacatctgcccttgcgggtggaggttctgcaggggatatcgtgatcccggtttatatcggcggtgacatgatcgatgagatcgtggttacggctcagcagagaatgaatctgagaagtggaggcaggtaagatggcacatttgcaatatctggttttcaacaatgaaaacataccgatgcctgcctcttattccgtgaatctgtcggatgtggaggcagacagcggcggcgtgacggaagcgggaaccactcagagggatgttgtccgtgaaggcgtggttcagatcggggtgacattccgggtatcgaagaagtggctgaataagttttcagcatataagaagctggcgagcattaccgtgggatatctggatatggaaaccatgaacattgtggatacgcagatgtatattgacggctatcaggtgaagctggtcagcgatacaagctatgggagcttatgggaggtttccttcacattgaaagagttttaaggagggcggctatgtatccagtgagcagtgccttcctaaatgcagtgaaggcgaatacaagaaaatattactggacgggcaggatcacaacgactgccgggacggtttataactttgaccaggaagatatggtcaagggcagcggatatattacaagccagtgctgcggaagtacggagattgagcttggtacggtgtatgctgctgagatggggatatcgctattttccgagatcaacaggtacacgctggaagatgccattgtggaactgttttatcatctgcagatatgaaacgatcccgatggggatatttgaagtatcggaggcaaacaggaaggcaaagtgcctggaaatcaaggcgtatgattttatggtgcggttcgagaaggcgtttacttctttggaatccattggtaacgcttatgattttatggtgctttgcagtacgacctgtgatgtagagctggctcaggacagggcgaccattgaggcaatgccgaacgggtctgaaaacctgtccatttattctgataatgatatcgagacttaccgcgatgtgctgttctatgttggacaggtgcttggcggttttttcgtgataaacagagccggggagctggaacttcggaagtatggcaatcagccggtactcgtggtggaaagaaagcacaggttcacttccagcttttcggattttatcacgagatatacggcggtttcgtcaacgaacctgcggacgcagattgcggagtattatgcgctggatccggatgacggactgacaatgaatctgggagtaaatccgctcctgcagtttggcctggaagagaccaggcggcagctctgcgagaatatcctggatgacctgtcggtagtgaactatgttccgtttgattctgatacgataggaaatcctgcattggatgtgggagatatcctttccttcaccggcggtcaggcggatgccacgaagattgcctgtatcacatcgaacagtatcaagatcggcggcagacaggcgatcaagtgtgtgggaaagaatccgaagctgtcccaagcaaagtcgaagaacgataagaatatctccgggcttctggcgcagattgaggcagggaagatcggaatccatacctttaccaatgcatcggcgttcacagttcagaatgtggatacgaagatcatttccatagagtttgccacgacggaagcgaaccatgctcagtttttcggacaggtgatcgtggatatcacggcagatcaggtgacaaaaacagcgacagcgaccggggatgtggttatcccttctgttgcggtggatgaacctgagccagaggatccggataatcctgaagttatagggaatacggaagaacagacggtgaacgtatcgcttcctgtcagctggacggaggacggccatgcggatgtgatatttaccttcgagttcaacaaccagatgatcccggtgcattatccgcaggaaaactggcatagcggcaggcacacgatccttctgtattatccgatcgagaatgtggtgccgaactatacgaataccttcaatgtctatataaggtgttccggtggtacggcttttgtggatacgggattctgcatcgcttccatttccggtcagagcatgggtgcttctgcggcatgggatggtaggatcgatattgaggaatatgtggatctctttgttatgggtaacggcactaatcctgaaagacttcaggtgaaggcgtttacggagtcgcaggcatgggagatcaaagagaccgtgaagaggttctattcggatgtgaaagccggaagaacaagtatcggaggctttgcgatgccggttgatgtgccgggaagcaacagttaggaggcttttatgaagagatatacaggtaatctgaccatagagttggaggatgtgaacacggggacggtggaaaccgtctccgaaacaaatatggtgacgaacgccgtgaatgacatcctgggtgtgaatccgatgggtgtcatgtacaaggcgggcggtcagtatgatgattcgctgacatggaatgatgagctgcttccgatctgtccgaacatgatcggtggtatcctgctttttccgagttccatcacggagcaggcggataacctttatctgccgtcaacgaatttgccggtggcatatgcgtccaatgatgtcaacgccacggcgaacacgaagaggggaagcatgaaccttgtggaaagcgaggcgctgagcaatgggtacaagtttgtctgggagttcacgccttcgcagggcaacggcacgatcgcggcggtggggcttacttccaagcatggcggggcgaatgcctatggctctgatgtgggagtggatacgacattgcttgaaataaagaaaatcagcctggatgatgatgacgggttcatcaatgatctgttccgctgcgtgacggtggattttacgaacgcgaaactgtattcgttgtcttatgcgagcaataccgtaacgatcaagaaatacaggataccggtgtttgatattgggctgaatgagaagctggatgacagtacgcttaagctggaagataccacggtgctccagtgccagacattccgattctatggaagctatacgccgtatgggatcttcatggatggcggtgatggatactggtacggattttccaaccagggcaattcatccggcagcgcagcggtgctgtggatcaagattaaaaagagcgactacaccttcacggaaggaagctggacgctttccaatgccacgctgatgacgatgggaagctttaaggaaggatccagttatccgtccgggaacaggagcgcggttgtcagaaacggatatctgtatgtgccttcctatgataagaccggcgtttataagataaatatctccaacagcacggatgtgacattgatcccgcttggctttacatcggctatgaggtgccttggcgagacaggaagctgtgactgctgcatgtcgctcatcaatgatatcatcgtggcttatgactttgagatcgatgtgaacgataatgtgatcgcgacatatgccggtacgagatgtgggaatgtgtccacgccattcttccggtataaggaatatgtctttgcatggggcggcgcgtatctgaaccagtacagatatacatggcttttgacgccgtatctggcgacgatcagtaatctgagtcaggcggtcgtgaagaatgcggataagacgatgaagatcacttatacgctgacggagacaacggtgtaaggaaccggcaactgaataatctgttttcaagggatggctctggctgtccctttaattttagcgataaagtcgagagtgcctgccatgcttgcatgagcaggcatttgaggctaacggaaagtgcggagcgaagcttcgcacatgcaaagaaatggagggatttgcgatgaaggaattttggaatgtgatacaggcggtatttgcggctgtgggcggatggcttgggtatttccttggaggctgtgacgggcttctgtacgcccttctggcgttcgtggtgctggattacatcaccgggatcatgtgtgcggtggcggataagaagctttcgtctgccgtggggttcaagggaatctgccggaaggtgctcatttttgcgcttgtcggtatcgggcatttattggatgtccagattttcggagagacaggggtgctgagaaccgcaatcattttcttctacctgagcaatgaaggactttcggtggtggagaacgcggcatatctggggcttcctattccggtgaagctcaggaaggtactggagcagctgcatgatcggagcgagaaggaagaggattctgttgaagagaagaaggatggtgagcagtaatgggatacacgaatagttctatggtagtttatacgaaactctccccgaaccattccgggcagagggcgatggcgattgaccgcatcacgcctcattgtgtggtcggacagtgtacggcggaagggcttggggactggttttataagagcagtacacaggcatccagcaattacggcattgacaaggatggtcgtgtcgggatgtatgtggaagagaaaaaccgctcatggtgttcttcttccggggcgaacgatcagagagcgatcacgatcgagtgtgcttccgatacatcggagccttacgccttcagggatatcgtttatcagaggctgatcgagctctgcgtggatatctgcaagcgtaacgggaagaataagctgatctggttcggggataaggacaagacgctgaattattcaccgaagagcggcgagatgatcctgacggttcacaggtggtttgcgaataaatcctgtccgggcaactggatgtacgcgaggatgggtgatctggccagtaaggttacggcggcgctgggcggaggttctgattccggtggcggttccgtgtcaaaggggacgcaggcatctgtcctgaaggatctttccgagacggacgcgatcaagaaggtcggtgcgctatttacggctgacatgaagaaaagcggtatccttgcttctgtatcgctggcgcagtttatcctggaatccggttatggtaagtcggaacttgcgcagaatgccaataatatcttcgggatgaagtgcagcctgtccgggaacacttggagcggttcaagctgggatggaaagagcaagtacacgaagaagacgcaggaacagcacacggatggaagctatgagacgatcacggctgatttccggaagtatccctgcattgaggattcgattgctgaccattccgcttatctgcttggcgcgatgaatggaaagaagccgagatatgacgggctgaaggaatgcacggattacaagaaggcgctgcagatcatcaaggacggcggctatgcaacaagtctgacctatgtggagaagctttgctccatcatcgagaagtggaacctgacacagtatgatgtgaaggattccggcggcggtgaagtgatccgctggtaccgtgtcaggaagacctgggaggatagcaagacgcagaagggcgcatataagattctggataacgcgaagaagtgcgctgaccagaatccgggatataaggtgttcgatgcggatggcaaggtggtgtatgagcctaaaactgcggagcctgaggtgaaggtgccgtttctggtgaaggtcagcatctctgatctgaatatcaggaagggtccgggaacggattacggcagggttcagttctgcccgatcggagtatataccattgtggaagtgaagtccggcaagggttcaacgtctggatggggaaggctgaagagcgggatcggatggctgagccttgattttgtcaagagagtgtaaactgaataacgaatcgttaccccgcctgcgggcattgggataaatcctgatgttcgcaggctttttttgtgtaaaaaaatattttgaaaatattttgatgtaactattgacattacatcaaaggaatgttatattagcatcatcagatgaaaccgcggcagttacatcaaaataaattcaatcattcataggaggatacgatcatgacaaacaaagaaaaagcattggcactcattggcacattcgcaactggtgatactgagaaggcaaaggagcttctggctccgggatacatccagcacaacctggcatacggtacgggagcggaggcattcgtaggaagcgttgcttatcttgcatccgcaccggttaagacgaccgtaaacaacatcagggcattcgaggatggcgacaaggttttccttcagaccgtttataacttcgccggagcaggtggcattcgacatcttcagattcgatgcagagggtaagatcacggagcactgggataacctggcgacaaaggcagatccgaatccttccggacatacccagatcgatggatatgacagccttgaggatattgataagacagaagctaaccgtgaactggttaaaaacttccttgtggatgtaatgcagggcaagcatcctgagaagactcctgagtattttgagggtgacacctatattcagcacaacaccggcattgcagatggtctttccggtcttggcgtagctcttgaagcacttggcaaacagggcatcgcaatgatctacgatactgtacatcaggttcttgctcagggcaatttcgttctggcagtttccgaaggaacattcggcggagcggctacatcttactatgatctgtggagagtagagaacggcaagatcgcggagcactgggatgttatggagactatcgcgtccaaggatacctggcagaatcggaacggcaagttctaatgtaaccattgaatttacaacggattggttgtacaatggttccggaggtggaaagaaatgcagatatcaagcagatttacggtggctttgcatatcttcacatgcgtagatacctttaaggatgattataaggtcacgagtgatttccttgccggaagcattggaaccaatccggtcatcattcgcaagatactcacgcagctgcagggagcagggcttataaaagtgatccggggaaccggaggaattgaacttacaagagagttgaaagacatatccttctatgatgtttatcaggccatagagccggtggaggatggagacttgttcagattccatgagaatccaagcccgcagtgtcccgtagggagaaatatccacgcattactggatgaaaagctgaaagccattcaggaatcaatggaaacggaaatgaagaaatacacgcttgcggatctacggactggtatgcaggagatacttgctaaggaagcgtaaagatggactccgaaggctgaagactttcggagtcttttcaaaagagtagggcggtacatatggaagcaaaagattatcttaagattatcagaaaggatattcatcggacgattgttgcgacggtggatgacgaaggattacctgttacggcagcaatcgacatgatggacagcgatgaaaatggtctgtatttccttactgctaagggaaagaatttttatgaccgtctggttaaaagaggatatctggcgctgaccgcgatgaagggcgaggataccatgagcagcgtggcggtgtccgtccggggcaaggtcagggagcttgggtatgagaagataccggagctgtttgagaagaatccgtacatgcatgaaatctatccgactgaagaagccatgcatgctctgacggtgttccagatctatgagggaacaggtgaatactttgacctgtcgaaaaagccgattgagcgggcgaactttgctttcggcggtgaggaaaagaaagagcagggttatatcataacagatgcctgtatcggatgcggatcatgcgtggcggtatgtccgcagaactgtatcattcaagatgaagtgccttttgtgataaaacaggaaaactgtttgcattgcggcaactgcatgacggcatgtcctgtgggagcggtggagagaaggtgatggcatgagcaaagaaatgacgcaggaacagagacttgactatcttgtggaagggttcaaggctgattctgatgaatataaggatcttgaaacgccaaaggatacggaagggaaaagaaggatccttcgatcgttgatgaatatccgtatgccaaagaagatggcggatgacgtggtggctgtgcaggatgattatctgaaggaaagagcagctgataaaggaatcatggaattgtcggatatcccggttatcagagatgctatttctatatggcaaggggatatcacaaggcttgcggtagatgcgatcgtcaatgcagccaattcgcagatgcttgggtgttttgttccgatgcatacctgcattgataactgcattcatactttcgcaggtatccagctcagggaagagtgcggcagacagatggatcagcttagaatcagatatggcagggattatgaacagccgacagcggttcctatgctgacggatgcatataatcttccgtcaaagaaggtaatccatatcgtgggtccgattgttcagtacaagctgacaccagcacttgaaaaggatctgtctgactgttaccgcaataccttagatatgtgtatggagaatgggcttaagagcgtggctttctgctgcatatcaactggagtatttcattttccgaataaaagagctgcggaaatagcagtggagactgtgcagggatggctaagggagtatcccggtcagatggaaagggtgatctttaatgttttcaaagatgaagataaggacatctacgaaggacttctatcgtgagatgcctaacggatatgaagaatctatcaggaaggggatgagcgcggtgaggtactttagcagaaacctttcttatggcaagggtacaagggaagaacagattgccagactgaaaaaggaaattgaaactgccgatgccatagtgatcggagcaggtgccggactttccacctctgccggacttacgtacagcggtgagcgttttgataagtatttctttgatttcgctaagcggttcggaataagagatatttattccggtggattttatcccttcccggatgatgaaactcgctgggcgtggtgggcaaggcacatctattacaacaggtacattgatgctccgaagccggtatatcgtgaactgtatgaacttgttaaggacaaggattatttcgtcataacaacgaatgtagatcaccagttccagaaggcaggatttgataagaagcgcctgttctatagacagggggactatggcttattccagagtgcggatggccacattcagaagacatatgataatgagaaatgggtgatgaaggcaatggaagcacagggctttgtgaaagatgaatccggcgtgtttcgggtgccggaggataagggaattaccatgaagattccaacagaactgattccgaagtgcccggatgacggatcggatgtaacgatgaatctccgcgcagatgattcatttgttgaggatgaaggctggcacagggcttcagcggcttactcggattttctgagaaggcatgaaaaccttcatgtgctgtatctcgaactgggcgttggagccaacacgcctgttatagtgaaatatccgttctggcagatgacaatggctaatgagaaggctgtgtatgcctgcttgaattatggagaggcattctgtccgggggagattgaggatagaagcatatgcattgatggggatatcggagaggtgctggagacaatataataaaagtgttgtgatatagtgacggtcagtggagattgatttctctgctggccattttttgttttataggggtttaagataccggattttctttgactgggatgtggaaggaagagccgcatccgggaaagaggatccttttttatttggctcaggccttcgagattttgaaggaggtgccagcagcatgacattggaagagatgatggatgtggatgtaaggactgtcagccgggatgatctggtggatatccgtgatgttgtcatcgatcaggatcagcctaaggaagagcggataaagagcttcatccggcagatcaggaatccgtactgcttcaaggtcgggaatgtggtagtgaagaccgtgttcgcggatacggatgttaccctggatgaccggctggagcattacctgaggaataaatgattttggtatacatacaagaagagtgatcccgcgttaagataagggcaggtcaaaaaagataaggatacggacaggaagccaatcggacttctaactgccagaactatgcggtttagaaggaggttggctatgtttgtttcaaaagaaagctacaaggcgtgtatttacgcaagactgtccaaggatgacggcgataagcctgagagcgacagtattggaaaccagaaggctctgatcagggatttcctgaagaagcatccggagatccaggtcgtgtccgaaaaggtggatgacgggtacagcggagtcaattttgagcgtccgggtttcaaggagatgatggaggatatccgggcgggcagagtggattgcgtgatcgtcaaggatctgtcccggttcggacgaaattatattgaagccgggaattatattgagagggtgttcccgttcatcggggtgcggttcatagcgatcaatgacagctatgacagcattgaccggaaccagtcggattcattgatcataccgttcaagaaccttatcaatgatgcttactgcaaggacatttccgtgaaaatcaggactcagcttgacatcaagaggaagaagggtgagtttatcggtgcatttgctgtttacgggtacctgaaggatccggaagaccataacaagctgatcgtggatacgttcgcgtctgaggtcgtgagggcgatcttcaaatggaagtttgaaggtatgagccagggggatattgcggagcgcctgaacgcgcagggcgtcctttgcccgatggagtataagctgtcgcttggcatgaaggttcagaccaatttcagggcgaacaggaaggcggtctggtcatggtcgagcgtgagcaggatacttaccaatgagatctataccggagtgctggtgcagggcaaggtgagcacgccgaattataaggtgaagaagttcatggagaaggatgaatcggaatggatccgtgtggagcagtcacatgaagcgatcattgacgaggatactttcaaggtgatgcaggagcttctgaaaaaagatgtccgccggggaccggaacgcggcagggtatatccgttgtccgggtatcttgtgtgcgatgattgcggccagaacatgatccgcaagagcgccgtgagccgtgggaagaagtattactattatgtctgctctgggcataaggtgaggaatgactgcggcccgcacagtattcgtgaagaagaactgtttgagggagtgcttgcggcaatgaaggggcatatcagtgttgtcgctgatatgaagcggatgatggagaccctgcagtcgcttccggaagaacagcggaatgtcatgaattatgatgtgcagatcgtcaagctgaaggaagagatcgagcggaaccagggcttcaagatgaagctttatgataacctgcaggacaacctgatcaatcaggacgagtatttcctgttcaagaagacctatgctgataggatagcggaagcggaaaaggcgatacgccgtctggaacaggagcgcgatgatacagtgagcaggaatgcttccgagcagacatggacggaagtgttcctgaaatacagaaacctgacgaagatcgacagaaaagcggtcgtggatatggtcgatgcgatacggatctgcgaggacaagcgcatcgtggtgaagttccgctatatggctgagtttgaaaagacactgaatatggtcagtatgctgccttctgaaaagcagaaggcggccatgtaagggggtgtcgtaatggcgaggaagagcaggaaaaaccagacagcgcaggtcaaatacccgaaacggcggaaacaagatcattctccacagcgatctatgtgagactttccatagagaacagcggcaaggatgacgcaggcgattccatagagaaccagaccggtatctgtcgtgaatatgtggaggcgagaccgtatctgaacctttacgggatttattcggataacggggaaaagggatggaagtttgaccgcccggagtttacaaggctgatggatgatgtgaagtccgggaaagtgaactgtatcgttgtgaaggatctgtcccggttcgggcgtgactatatcgagaccgggaactatctggaaaagatattcccgttcctgggcgtgaggttcatttccattacggacaactttgacagctttacctgtgatgatgcggagagcgcattgatgattccgctgaagaacatggtcaatgatgtttacgcgaaggatatcagccggaagatcatcacgtcattccggcagcggcaggaaacgggggacttccttccggggaatccgccctatggctatatcaagtcgaaagagcggcagtttcgttatgacgtggatgaaaaggtcgctccgtatatccggatgctgtttgagtggaaggcggcaggggtgagccatgcggaaatggcaaggcggctgaatgatatgggcgcggtaacgcctgcaagacggaagatcgagctgggcatctggcacgccgagaagtataagcataccgtgtggggtggtcggacgctgatcgatatccttaccaatccggtctatacaggggctttggtctatgggaagatcccgaaagcgctttatatggggatcaggggacaccgggtaccgaaggaagaatggcggatactggaagggatgcatgagcctattatcagcaaggaactgtttgaccgggtgcaggaaatcttcgaccagaacaggaaggtcgtgcatgagaaatatgaggcgaacgccgtgaatcgggaaggtatcgtgaacaggttcaaagggaagatcgtctgcggcgactgcgggaagaatatgagatatagcaggaaccagccgaagaagcggcaggagatgtacggaacttatacctgcggtggatatatcgattcccacaggacaaagtgttcgctccattatgtctatgcgtcggatgtggaggctgccgtgtacgcggtgatcgaagggcagctgaagcttgcggctgacatggaaaaggtcatggaccggttgaagggcggcagcggagagcggaaccgtctggaagctttcaatgtgcggaccagtaacctgatgcaggagatcacgaagacgaataccagacggcagggcttgtatgagaactttgtttccgggatgctggatgaatcggagtaccagtacgcgaagaaggaatatgatgatcggatgtccggcctgaacagggaactggacgaggcaaggaaggaaaaggaacagtttgagactgtgttttccagagataacaagtggctgaagggcatccataccgctgatgacgcttcggagcttacggatgagatgataagccggcttgtggatgtcgtgaagatttatgaggacagccgtgtggaagtcgtgctgaactattcggatgacaggcagaagctggcggagctgctgaaggaactggaggcggaaaatggtgatcggtaaatatatccgtctgtcgcaggcagaccaggacatgatgaaaaaagagaataagacggagagcgagagcatttcacaccagagagatctgatccagaggtacatcaattcccatgcagacctgaaaggctgcgaggtcagggagttttatgatgatgggtacagcggcacaaactttaaccgaccttcatttgaacggctcttggagcagatcaaaaagggcgagataaactgtgtgatcgtgaaggacttctcacgtttcgggcgtgattatatcgagctgggcgactatctggaacggatctttccgttcctgggcgtccggtttatctccgtgaatgacggttatgacagcaatgattacaagggtaccacgggcgggctggatgtggtgctgaagaacatcgtctatgatttttacagtaaagacctgtccgtgaaggtgacaacggcaaagagggcgaagatgaagcgcggggagtacattggcggccacgtgccgtatgggcttctcagggatccggcagacaagcataagctggtcattgaccctgaagcggctgcggtggtaagggaaatctttgacatggcgaccgaagggaagaagctggtggagatagccaggtatcttaacgagaagggcatcgaaacgccggccagatattttcagaggaagaatcctaagaagaacaaattcaggaatacttctgctgtggattgctggaatgataattccataaggcggatcctgaaacaggaaatgtattacggggctgtggttcagcataagcgggaaggggtaggcgtccgtcggatggaaacgatccgtgggagtgccgaaggaagagcagatcatcgtggaagggatgcatccgggtattgtcacgaaggaagagttcctgaaggcacaggagatattccacaagcggggacccgtaaagagggtcgtggataaggattatcctctctggcgcaaggtcaagtgtgggaactgcggacgcgcgatgccgatgaagagcggagttgtcaggggcgtggattaccggtacttttattgccagcacgccacggttcagatcggggatggcggttgcaccaaggaatttatgagggaagatatcctaaatgaaatcgtctgggattccgtaaaaggtctgctttcagcggtggcggacgctaagaaaaggatcgggaagaaacgggcggcagcggagaaaagcagtgccgggatggtggagaagctggctgacctgcagaagaaaaaggccaagtgtgaatcagaccgttttaccaatatggaccagttcatggcgggcaatctggacaaggaagcctaccagaaaaggcgggcggaactgacgaaggaagtggagcgtctggatggcctgatctccgatatggaagcgaagcttcaggaaatggagactgtgcaggatgaaaggacgaaggctttgattgaaactgcggagagtttttcgggggcaacagaacttgaccagaagatggttgacgcactgatcgagaaggttctggtatatgatccggagcatgtggagatccggtggaagttttcggatgaaatgatgaagctgctgaagaaataaggatatggagtcggttggagtgatctgaccggcttctttttttattttggactatccatgagacgggttttgtgctatactggattgagttataagtcaagtaattgagataagtagcgaggaagaatatgctgaagaacaatattgaaatggacgtaaagatgaggtgtatcgagaagtccaccactcaggcgaagattgcggagaatatcggtacatcgccgtcatatgtgaataagattgtccgcagcaaggaacagatcatgaacaagaccttcctggctatgatggaggatctgggctttgatgtggaactgcattatgtggagaggaaggaaaagtaagatggcatcaagcaaggaataccttgatttcattttggaacagctttcagaactggaggatgtttcttgtcgagcgatgatgggtgagtacatcatctactatggcggaaagattgtcggcggtatctatgatgatcggtttcttgtgaagccgacaaaatccgctgtggaaaaaatgccggatgcaagtctggaaattccgtatgaaggcgcaaaggaaatgctccttgttgatgacgtggagaataaagagttcctgcgggaactgttggaagcaatgtatgatgaacttccggctccgaagaaaaagaagaaagcgtagggctcagcattgaaacaaataaaagataaagagtatgagcattttcagcaatacctctacaataaggcgcatggatatatctggacgcctgacacgttggaactgatctgcaatggaaatgatggagatccggagcggatagggaagcaggttctgggaatggcggccagacttcggaatgagcaggtatcacacaggcttaatgataagcataaaagttatgtcatccgaatgctccgaaagaatgaaacggagctgctgaaggattttctgtatgaggcgattttcattcccaaaggggcggagccgcctgcgagggatatcatagagaagccggaactgagagtttacacagatgacttcgggaccagaaaaggcgataactgtctggtggctgatttcggtgggaaggttgttggcgcagtatggacaaggatcatggacgattacggccatgtggatgatgaaacaccgtcctttgccatttcgctattcaaggaataccggggacaaggtatcggatcacagctgatggtgaggatgctggagctgcttaagtggcaggggtatgagaaggcttccctggcagtgcagaaggcgaattacgccgtgaagatgtatgagaatgtcggattcaagactgtcagtgaaaatgccgaagaatacattatggtgtgcgagttataagcagaacgaggtgatggagcgtgattatagattttaaccagattgaaaagatgacgcttccgggaatgaataatggtaccggaatgatgtcagctcagatgtatgatgatgaaaagtacaggatcatacctacgtcaatccatccgggtggaagcatcggtgttcatgcacagagttccggggatgatatgaattatattctgtcaggcgaaggcaaagctgtctgtgatggcgtggaagaggaactgaagccgggagtgatgcacatatgcccgaaggattccgagcatagcattatcaataccggagataaggatcttgtgatgttgaccattgtggtgaagagatagaacgggaggacttaaaaacttttttgaaaaaatttgattgtccctattgacaatacgctgacgaagcacatcatgcggcagccgcctcttacaagcgggttatggaatactttgctccgaagttctctctgggcatgacagcgacgccggaacgaagagatgatgatttggacggccgcaatatttatgagatctttgatcatcagatcgcctacgaaattcggcttcagcaggcgatggaagaggaacttctctgtccctttcattattttggcattacagatctcgatatgatctcggatgaaggaacgacgaaagaagagaggttaaataattttcgctatctgacatcggatacccgtgtggactatatcatgcagcaggctgagtattacggatacagcgggagcagggttaaaggactgatattttgcagcagaatcgatgaggcgaaagagctttcgaaaaagttgaatgaaaaaggctggcgtacatctgttctcagcggagaagattctgaaaagcaacgatcggagatcatcgagcgcttgacgatggaggaagaagaggcgacagagcagaagatgcctttggattatatactatctgtcgatatcttttcagaaggtgtggatatcgtagaagtgaatcaggtgattatgcttcggcctactcagtcgccggtagtatttactcagcagctggggaggggtctgcgaaaagcggagggaaaggaattcgtcgtcattctggattttatcggaaattacaaaaataattttatgattcccatcgcattgtccggagatcggacttataacaaagataatatccggcgttatatgttagaaggcggacgggtgattccaggggcctccacaatccattttgatgaaatttcacgaaagcgtatttttcaagcgattgatcatgcaaacttcaacgatatccggctgattcgggaaaactatacaaacctgaaaaataaacttggacggattcccggacttgccgattttgatcgatatggagagctggatgtactgcgcatttttgataacaagaatctcggttcctactataaatttctggtaaaatatgagaaagaatacactgtgcggctttctgaagacgaggaaaaggtaatcgaatttgtatcaaagaaattggcgaacggcaaaagagtcactgaattggagctacttcatcggatgctatcttatcggtacgggctgctgaacggtctggtgacggatatgaagaaaaattatggaaagacactgacgaagaatgaggtgaaaaatctggtcaatgtgatgacaaacgaatttccttcgggttccggcaaagccacttacgctcgttgcatactgatcgaaaaagaagattcggaggagaaccctgcatccggaggtctgattcgcacggcagaacgatgggtgaattatgctgcagagttgttggaagataattgtgattatcgcgtttcttctgctgctcaggaaatgctggaaaatccggagttttgctgtattctgaaggagttgacggaattcggaatatcgagataccgacgggattattctcaaaactataaggatacggcgtttgtattgtaccagaagtatacttatgaagatgtctgcaggcttttaaactgggagcataatgaagtgccgctgaacatcttcggctacaaatacgataaggacacacagacgtttcccgtatttatcaactatgataagtcagaggatatcagcgcgtctacgaattacagggatcattttatcagtaacaatcgtttgatcgctatttcaaagagcggaaggagcatccattcggaagatgtacagaattttttacatgccaaggaacgtgaaatcgacgtacatctgttcgtaagaaaaaataaagacgataagatatcgaaagaattctattacctcggacgtatggcagcatcaggacgtgttcgggaatttataatggaaggaaccgaaaaatctgcagtagaaattgagtggcttttagatactgcggtgagagaagacatctatgaatatatcgtgaattcatagcatggatgagtttgctttgtgcggaaatgaaaagtgagaacgagatacgaaccgaaaggaaaatagaaatatgaaaacgattcgagtcgctgcagctgtgatacgagacggagaaaaaatctttgcggtacagcgcggatatggtgaatttaaaggaggatgggaatttccgggtgggaaaatcgaagccggtgaaacatcccagcaagcattggtacgcgaaattacagaggagttgagtgccacgattgaagtaggtgatttgatcgaaacggtggaatatgattatccggattttcatctttcgatggattgcttctggtgcagtatccttcatggaaatttagtactgctggaggccgaggacgcaagatggctttccgccggggagctttattcggtggactggctgccggcggatctggggctgctgcagaagatcgagcaggcgctgaagtggtaataattcgacgatctctgaggagaatgatgaaagagcagaccactcacatcacatatggtaatatagaagcactgtaagctctttctgaaaaagccgaaataaagtttctgtaaaaaatcaccaaaggacacaaagaaatatgaactatacaataagaaaaatccgaaaggaagacgacgttgtcattgaaaatatcatccgcacatgtctgatcgagttcggcgcggcccgggagggcaccgcctgggcggatccggatctgggcaggttttcggagatttacaataccgaaggcaatcggtactgggtggcggaggatgaacggggaaaagtggtcggaggcgtcggcatcggcgctctgaagggcgcggaggggatctgtgaacttcaaaaaatgtactgtctgccggaagcgagaggcacgggcgttgcccgtgaactcatggatgaggcgctgaaatacgcggaacgtttttacggtcagtgttacctcgagactctcgacaacatgaccgcagcccagaagttttatgaatcctgcggctttcgcaggatcgaagagccggtggttcagacggagcattttctctgcgacgtcagatatatcaggaatatctgaggcctctgccgaaagacgagaaaccggagagcgccccacgaaaactttcgtggggcgctctccggttttttcaatctgatccgctctgagacagcacatggtgcgggctcttatttttcaccggatcggcccggtctgagagaagacgcggagctctttcctgttctttatcggatcattcctgcctgagagagcatatggtaggttttctgttttttcgagcccgctgtccactgagcagaggtttttgacgttcttcaattcattgtttttttagtcattttatgatgtgccggtggatgttcttatcggtctgtcagcgcggcgattgcggcagatccgataatcttctcgccttcagatccgccttatggtctcgatgacgctctgttttcgcagcttgcggctaaccagcccggtgatgaggacggtcgcggcgaggaccgccgcggcgtaggctgcgatgggcagaagtggcagttcataggggattggatacattttccggatgggataattgatcagataagtggcggcgacactgaccggtattccgatgatgatggctttcaggacgcagagaattccttcgagatagagcatttttctcaaatccctgccggtcatgccgatgctgacgaagacggcaaattccctggcccgcatcatgatattggcggacagcgtgctgatgacgttggtaaagccgatgagcagcaggattcctacaaagcagaaggaaagcacgagggccaggacgatcgcgatgttcatgatgcggatataatcctctgtcaggaatactctcgtggtgtatccgtcttccatgtattctgcattctccgacggaggaaaataatctttcagcagcgcggaggcgtagttcatgtaccccgcttcatccgcaggggtatgcatccagctgtatccgcgaaccaccgcgctttccacgatgaggcggaccggattggtgttcggataaaaaagctcttgaggaatatcctccttatataatatcccgccgatatggtacgggatgaggctgccgtcttctttttccagtgaaagctctgtgagctgactggtaaaggggacatagtctgtcgcgtgtccgttctcattgatgctgatgtggttcagcagtatggcggagcccagagggatgtcgtgcgtttcgcagagttttttgtagtgttcgtcatccagtacgatgatctctgcgtcaaaaatgaggtcgccctcttctgccagaccgcaggcttccacaaattccgcagtcagctgctccctgcggagagctgcgtcgtacatatcgtattcctgtcccataccgtagacgtcgtctccgtcgaattcttcgagtctttccgtgatctcctgtgctttgcggctgtcgatgggagcgggatagaatgtccggtattcctctgtgccgccgacaggctgccggattctcgctgactggtagtctgcggttacggagtgagtctgataagaatacatcatatccgacatatctcttacctgtccgctgatggatcccaccacagtgaacaggatcagaccgacagtcagagccgacaccgtggctctgaaattttttctgttgtaggacagattccgttccgccaggaaaccttcggctccgaagattctgccggagagcgttctctcagctgatctttgggctttgtgagatcggcgggacccgggagaatttttccggttttccgaagaagctgctcggatgctttccgccgcgctttcggcggcggcttttttcgccggtatccgggccgctgcaaagacggtgatggcagcaatcagagcggacagtgccagcgccgggggcgacaggacaaagggcagttcgaagtgaatttttgtcagcatgatgtcggtgagcgcattcagctcgccgagataggaatttgtcaggcgaatggcagctgccgtaaggagcacgccggtcagcagaccgggaggtattgcggcgcaggacagaaaagcgccttcatataaaatggatttccggatctgtgcgccggtggctccgacgcatttgagcatgccgaattcagcggtccggtctgcggcgctggcgcggaatacgttggaaatgacgatcaccgccatgagcagtatgatcagtcccaggacggccgcggggatcagaagcaggctgaaataggcggaacggtaagtgccgaaatccccgccgagaaaagaggtgagcatttcatatccgctgacagcgagactgcagacgcaggttaaaagcgccgtcgctaaaaggatggccgcggctgcccagaaggttcgttttttattgtttttcagctgggagagggacagctgcgcaatgacattcatcggccgcctccttcgcttaccttggaggatttcagtctctcgtccgagaggatgcgtccgtcggaaatcgtgagaatccggtctgccttcagcgcaattctttcatcgtgggtgatgagcagaagcgtctgtctgtattttttgttggccgcctggagcagatccatgatttcaccgccggaccggctgtccagattgccggtgggctcgtctgccagaataaatgccggatcattgatcagagctcttccgatcgatacccgctgctgctgccctcccgagagctggccgggcagatgatcccggcggttttccagtcctgtcacggacaggagttgattcagtttttccatatcgggccgtcgtttgtccagcagccgggggagcatgatgttttcctcagcagtgagagaggggatcaggttgtaaaactgaaatatcatgccgatatttctgcgcctgaaaacagcccgctggttttcatccatctgatagatgtcttttccatcgatgctcaccgttccgccggtagggcggtcgatgccgccgatcaggttcatcagcgtggattttccggaaccggaagcgccgatgatggcgataaattctcctttttctgcctgaaagctcacgtgatcgagggccgtcacctctgtgtcgccgctgccgtagactttcgtcagattttcaacctttaagactgccaatgatctcttctcctttcttccattctccattgactttttatttccagagtgaaagatcattttccgcagcggtaattctgaaacgatcattctcagatggcgtccgtgaaatccgcggaaaatgatcccgggatcagaaagaggatcctctcggactgcaggcaaagatgcggtttactttccgatgcgcatggttctttgctgtacagttttaacttattttatcagtccaaaatgacagtccggtgactgcggccttttccgaagtgacagttttgtcactgaaaaaatttcagcgtgaaagcggcgccttttcccctgccgcctccgtcgacatcgatagtgccgttttggctgcgcaggacggaataggccagagagagcccgattccgtaaccccggctgccccgggcgttgtcgaagcgggtaaatactctggatatcatttcttttggaatgccttctcctgcgtctgtaacggaaatccaccggtagacgggattggcgccgcacgcgatccggatgacggaatgttcgggggaatgctccgatgcgttttttatgatgttagtcaacgcttccgcggtccatcgccggtcgcagaggaattcgacttcgccttccgaaaccagtgtctgatctttgacgtccaggaggatcgacagaggttcctccgcagcctgaatcagatcggcggaggagacgggtttcttttcaaaagagatacagcccgcgtctaacttggcaagcttcagaagaccgctgaccagccagtccatatgattgaggctgtttttgatattctctgtaaattctttccttttatcaggcggggcgtcttccagcagatctgccatgatcatcatagaggctaccggcgttttgatctgatgggagatatcttccatgtattttacgaattctgaatgctgctgctttagagctgtgattctttccctctgcatcgccgacagcgtgtggatgtcgtttttcaggatgctgaagcagccctctttattgtcgcggatatccgcgtcctttccgtcgatgatcttccggatgttctccgagagttctttaatctccttattccgaaccggcacgatatcccatccccctcactgtttcgatcgaaaccgcgtctttcagcttgtctctgagacgcttgacatataccgtcagcgtgttgtcttccacaaagctgccgccttcgtcccagatgctttcgagaatctgactccggctcaggagaactcctctgttggaggcgaagatcagcagcagacgatattccagcggagtcagctccaccggttctcccgacgcgtaaactctgcctgaccgggtatcgatgcgcacgccgccgattcgaagatcggaagctttggtctccggttctctttccgagagcgtcctcttcactctggccagcagctcccgcacgcggaaaggtttgatcacgtaatccgccgctccctgatcaaaggcgcgtacgattttttcttcctcgtcgacgaccgtcagaaaaatcaccgcagtctgttttgtatcgattttatcgatgatatcggaaccgctgccgtcggcaagctgcatatccagaatcgccagcggaaaggaatgcaggcgcagcgcgtttaccgcgtcgcgtacgccggtgcagtgggtcacctgatatccctgctgctccagggcgtagatgattccggatgcgatcatccggtcgtcttcgacgaataaaatttttttcattgatgtctcctccgtataacctgacgtccgttttctctgataaaaggttttgctcttttgattatactacgctgcggcagacggtacaattttcttccccgtctgtcgtcttgttctgttatttgatctttgatataatttatttatatgcacaattaatatacgcaattaaatcacagtaatttttatgttatgcaggaaagaagacagcatatggacgaagaaataagaaatacggtcagagacatcgcagaagcgctggccagattgaatatgcagaatgctgagatcattgaaaatcagcgcatgcccggtccttctgagcacaggggaggcggcttttcgccgcttcacctgaagttattgcaagagagcgattttttgccggagttttcggatctgattcgggagatcaaccggagtatctgcgcgggcaggacaggcgggacggaagaatcgaatgtctcggaaaaggagcgaaaggtttcgaaagttttccgaaacgcatctgctgtgagagaggagctgcaagctccggaaatttcttccgcagggcctgtctgcggagctgctctgaatgtttcggaagtctgccgcgaagatcctgttcccggatctgtctgtctgcgggatcgtccgtgccggatgcgggatgcggaaatcgcatgttctcccgcatctgttttttgtccgaaaacagaaattctcaaaggaatcgatgtcatgcgcctgctgagcgatatctactattccagtttttatctcgatatctgcagcggagagtatcaggttatccgcctcgctccctggctgatttcttcgatcccggagcgggggaattttgacgcggtctttgcggcggtagcccgtcatctgattctgcctcagtacagggaagagtttcagagaaaattctgtatcgaatacatacgggaaaatctgaatcggtaaaagtccaactttgtcttcgattatcaggtgatgcgggacaaaggcgccagctggtgccggatttcggcagtgctcagcgacgagacgaagggtggtatgtcgaatcacgtactcattttgcttcaggacgtgacggagcagaaaaaaatcgagcaggaagaggatcattcccgggtgacttatcgcagcgggctggaggagacgctggaactggccaggacgggactttggaccatcgagatggaagagggctgcgagccgcggatgtatgcgggcaacagcatgaaaaaactgctgggagtaaaaagtgatatttcgccggaagagtgctatcgggcgtggtatgacaggatcgagccgggatatgaagaagcggtgcaggcgagcgtggatgagatgctttcttccggccgctccgaggtggcttatccctggaatcatccgactcagggacagacttatgtgcggtgcggcggcgttcacgataagagttttgaatacccgggattccgtctcaaaggttatcatcaggatatcacacagacggtggcgatcaacaagcagcaggaaaaggagctggagagggcgaatatcattctcaagcgtcagctgaaggtgactcagtccctgggcagcatttatgaatttatctattatctcaatctgaaagacgataccttttcggtgatcagtgatcagagcagtatccggcagttcatgacggaggagagttttgccagtcagaaactgatgaccgccgtaagagcgctgatctctgagggagactggaatatcgtcagagagtttttggatttcggaaccctcgaccggagaatggaggatcgggagatcgtcagtatggaatttctttccgaagaacggatctggtaccgcgccagttttatctccgcacatcgcgggcgggacggaagtctcattcaggttctctttgtgattcagctgatcgatgaggagaagaggaaagaactggacgccaaccgggcggtccgggaggcgtataaagcggcgcagtatgcgaattctgcaaagacgaattttctttcgcatatgtctcacgatatccgtacgccgatgaacgcgattatcgggatgacggctatcgccgggacacatctggacaatccggcgagggtgcgggactgcctcggtaaaatttccgtctccagccggcatctgctgaatctcattaatgatgtgctcgatatgagcaaaatcgagtccggaaagatggccttcaacgaagaggaaatccgcctgccgcggctcatcgacaatctgctcgagatggtccgtccttcggtgaacgcaaaaaaacaccgtctttttgtccacgtacaggatctgcagcatgaagatgtcctgggggacagtctgcgcatacagcagatcttcacaaatatcatgagcaatgcggtgaaatatacgccggagggcggaagaattgaattttacatccgtgaaaaatcctgccgccagcagaatgtaggatgttatgaatttatcttcaaggacagcggtatcggtatgtcggaggaatttatagagcatctcttcgagccttttcagcgtgcggaagatgtgcgcatgaacagcgaacagggcaccggtctgggaatggccatcacgagaaccatcgttcagatgatggaaggcgacatccgggtagagagccgggtcggtgagggaagtactttcacagtcacaatctttctgaaacttcagaacacgcaggacgtctctaccgaagaactggccggactgcccgttctcgtggccgacgacgatgagatttcctgtgagagcacctgtcttcttctcagcgatatcggtatccggggcgagtatgtgatgtcgggagaagaagctgtccggcgtgtggtggaagcacatgcggcgcaggatgatttcttcgctgtgatcatcgactggaaaatgccagagatggatggaatacagacgacgagaaagatccgcagtgcggtgggggacgacgtacctatcatcgtattctcagcctatgactggacggagatcgaacaggaagcccgcatggccggggtggatgcgtttatcagtaaaccgctttttaagtcccgtctgaccagtctgtttaagagcctggtcagcggtgaggaagaaccgtcggaaaagccgttgaatctgctgagcgaaagtgacttttcgggaaagcgggtacttctggtagaagataatgatctcaatcaggagatcgctcaggaaattctcaaaatgacgggtctcaccgtagagatcgcggagaacggaaaagaagcggttcgtctgttctcggaaatgccggaaaactattatgatatgattctgatggatattcagatgcctctgatggacgggtatgaggctgcagaggctctgcggtcgatggatcgcaaagatgctcagaatgttccgatcatcgcgatgacggcgaacgcctttgcggacgatgtgctggcggcaaaaaatgcggggatggacgagcatatcgctaagccgctggatatgctgcggctgcaggagcttcttgaagactatctgaaccggtagaagtatttcctgccgtcgggccgcggcgcagggggaaaaagaaaggaaccaggatgaatatacagatcttcggtacgaagaagtgttatgatacgaaaaaggcgcagcgttattttaaagagagaggcgtccggtttcaatttatcgatatgaaagaaaaagggatgagccgcggcgagttttccagcgtgtgcagagccgcgggcgggcttgcgaatctcatcgatccggactgtaaggaccgggcgcttctgacgctgatcaactgcacgccggatcacctgaaggagagcaaaattctggaaaatcaggaagtgatccgcacaccggtagtcagaaacggccgggaagcttctgtcgggtattgtccggaagtctggaagaattgggagtgagaacaaaatgatgattcagagagcgattttacatattctcgatttttattcagacgtcagcgttttttcggaagcggagatcgatctttccgatgaagcggccgccggttatatttcgaagcaaatggagaaactgcagaataatccttccggacgaaggggcggattttctccggacagcgaattcctggcggatctgcggaaataccggtccgaagagctgagctttgcggaattttccgcacagacagcgagaattctgcaccgctacttgtcacttgcaggagaagagcgtcccgtggacgtgcttttcgccgatttctcggaggaggacagtcgttttgtggggtttttgctgctgaataacgacgaagcctatatgcaccgggcggtcagcggagacgggcaggtgaaagctgagatcgcgcgtcatcacgcaatcctgccgaaaccgtcgcagaagacggattcctatgcgctgatcaggctggattcggaagagattttctttgccgacagaaagcggagtatcggcggtgaggaccgatttgtgttgccggagcttctgctgaagtgtacttcagcggtctccggacgggaggcgatcaaaactctgcaggaagtcgcggctgctgtcgcggaaaaacacggcgagaattccgcggtggctgtatccaaggtcaagaattttctgatagaaaatgcggagatctccggaactctcgcgccgcagcggttggtccgggaagttttcgggacttccgaagaaaagcagcgggaatttcttcaggaaatcggggaaaaagagattccagaatcggtgccgattcctcgaaaggcggcggtgagcgcaggcagaaaacagaaaatccgtacggacacgggcatcgaaatctccgttcccgcggaatatctcgaaaatccggattttattgagtttgtcaaccacccggatggaacgctgtcgattcagttgaaaaatatcgggcggattgtgaatcggtaaagagtggatcatatattggcttatgcgaattttctgaaagagaaaagaatcgaaaaactaaccgagaaaagggcgttttttgaaacagccccttttgattttaagaaggcagagagacgtcgggaattcagcggagcagaggagatgacatcagccgaggctgcactcaaagagaaacgtatcacatttgctgccggcggcgatctctttttgaaaggaagaataggttttgattttctcaaatccgatttctcgtaaatatctttccatttctccaaatttgtaaagatgtgtctgaaaatccatcgtttctctctgcaaaagttccgtgccgtcatataattcatagattcccggagaaaattgtgtctgactcgaaacgtcgtaaa

SEQ ID NO: 601 - DNA, 9421 bp, Unknown
  16S sequences of unknown bacteria
aattgcagtatcaggaaaaggtggcgtagggaaaacaaccctttgtggattgttgattcaatatttatgtgaaaatggaaaacatccggttttagctgtagatgcagatgcaaatgcgaatttgaatgaagtgctcggcgttgaaccggagattacactcggagaactgagagaagagattgaacgtgcaccgagcagagcaatcaaggccatgagcacaaactgtacaagacgtccgccgctcatgggaataaaatgcaggcacaaaagaacgacggcaatcatgggaataagcccgagaatcacctttgccaccgtcttgacaagggagaaatatttcagcccgtattttttcttaagaagaatgaacacggcggcaatggaaacggtgtaaccgagcatacttgagaaaccagcaccccaataggccggcaggccgagaaagtggcaaaggtagataaagggcacatcgcaggcggcatttataagaagtccgccgacacttgtaaagcatacgacctttgcaagccctatgctttggagacacatgctcgcaaccatgctgacgctttcgaaaattctcaaaaacggaagcaatctcataagggtcggaccgaaacggctttcgccgtaaaacacatagtaaagcggatgagaaagaagacacattcccacagccatgggaacggcaagcacgagaattgttcctaccgcctggttaaactttcggttaacgccctgtcggtcgtttttaacgaaggagtcgaccatgtggggaatcatgctggatgtaagtcccattgcgagagaggttataagcacgcagattttcggcccccaggtggcgattatgctcgcgataacctcgctgtcggccgcagaatattcatcgagagaggaaagcccggttataacaagcttcatatcggtgatgtcatatatatttgaggaaattgcaacgataatgagaggaatacaaatccgtgcaatttttttaagcgtctcttttgtggaaacctgcgtatcgtttacaacatcgccctcggcaggaaggaaggcgcttctgttggctttcattttaaaggaaagatagaaataggccgcgagagctcccgcaagggcaccggtcagcgccacgcacacgcccaccgtctgactttgattaagaacgataacggcaacataagagcccacaagaataacaaagactctcacaaactgctcgatgacctgacttgtggaagacggagcaatataggcgtgcccctgaagataccctctgcgtatgctcaaaaaaggaaccacaagcaggcagaaggaaaccgttcgaatggcggcggtgacatcgtcgccttgagcatctgaaccgaggaaaaaccgaccgataaagggggccgttgcaaaaagcagtataaaagcaagcaaggagataataaaaacggtgtttctcgccgttttgtgagccttttcctttgcggcaaacattttaagcgagttgtattcgcttatgatgatactgatagccgtgggaatacccgatgtggatattgttagaaaaagattatagatgttataggcgcaggaataaaccacgcctccccgttctccgattatggcgtaaaagggaatcgaatagaaggctccaatcagctttgacagaataatggcaaaatatgcaatcagcgtaccttccacaaagctgttgcgtttgattttatttttcatataaggttcctctctcaagaatttgttcagtcaattatatgaaacgttcatataattgtaacacaacgtgtccgattaagcaactgcaaattaaatgacgcaaaatcggatattttgcggaaaaaggtcttgacaagtatgggctttgggtatattataattaaaatctttaagcttgtaccgtgatgcaggaaagagaagcaacagcatatttacggaatttttgcggtctgaaggctttttgggttttcggatctttttttatgtcaaaaaaggagctgacggcttgaaaattcacgcaatagtgcttgacgaacaggcgctctcccgcgcccttgtgagaatatctcaccaaattgccgaaaagaaccacggatgcgacaacattgtttttgtcggcataaaaacgcgaggagtgcccatcgcaaatcgcatggcacaaaatatcgaaggctttgaaggcaaaaaaattcccgtcggaacgctcgacatcaccctttatcgtgatgatttaagcagggtcagtagcgacccggtggttaaccgtaccgacatttcctttgacattgtggataagacggtcattcttgtggatgacgtgcttttcacgggcagaacggcaagagccgctatggatgcggtcatgtccatcggacgtcccgccgccattcagcttgccgtacttgtcgacaggggccaccgcgagcttcccatacgggccgattttgtcggaaaaaacattccaacctcaaaatccgaggtggtttcggtcaagcttgacgaaaccgacggagagacgggagtttttattctcggagattagtaaaaaaggcgaaagccttaaatataggaggaaaattatgaaactgatttacgacgtaaacgatcggccgaaattcggccaactgttggtgttctcgctccagcagctgctcgccattatggcggcaaccattgccgtgcccaacatcatcggaaacggcctgaccccttccgccgctcttttcggcgcaggcgtcggaacaattgtttatcttctttttaccaaatttaaaagccccgtgttcctcggttcttcctttgcctttatcggatccatgggttctgcctttgcaggcggcgtttccatggctctcggctacctcggactgattctcggcgccgtgttcgcaggccttgtttatgtgcttctcgccataatcgtaaaggttgcgggggtaaaatggatttccaaaatcatgccccccgtcgtcatcggacccaccgttgcaatcatcggcctttcgcttgccggaaacgctatcggcgacctgaccggcggagcccagtttgacgccgccacctcgtcctatgtaatgaacgaaaaaacaggcctttccattgtctgcggtcttataactttgcttgtcatcatgctttgctcaatctacggcaaaaagatgatgaaactcgttccctttgttataggtattgttgccggatatgccgttgccgccgtatttaccgcaatcggaaacagcaccggaaacgaggccatgcagctcatcaattttgctcctatcgccgacaacttcaaaaacatcgacctttctacctttgtgtcggttcctaacttcaccttcctcaccgcattcagcggtttcggcgagctctccggctcctacatcgcaacccttgccgtggcatatgtgcccgttgcattcgttgtttttgccgaacacattgccgaccacaaaaacctttccaccatcatcgagcgcgaacttcttgaggaccccggtctttcccgcaccctcctcggcgacggcgtgggctccatggccggcgctctcttcggcggctgccccaacaccacctacggcgagtcggtaggctgtgtcgcaatcaccaagaacgcatcggtcgtttccattctcggcgccgcaattcttgccatcatcatctccttcttcactccctttgtgctcttcctctcctctattccctcctgcgtaatgggcggcgtgtgcgtagcgctttacggatttatagccgtatcgggtcttaaaatgcttcagaaggttgatcttgacgaaaacagcaatctctttaccgcttcggtcatccttatcgccggtatcggtaactttgctctcaccttcggaaaaatcaccctcaagaccgttgcctgcgcgcttattctcggaataatcgtaaatcttatcggcaaaaaggccaagaaggaaaacgaaaccgaagatgttctttaaactttagaacataatttaagaggttcgaagaaaatcttcgaacctctttttaaatgcaatgatttgaattattcgccgacctcaacggtgacctctgcagtcacaccgccgaaaagcttgacggtggcgctgtattcgccgtagtttttaatatcggttgaaagggaaatctttttcttgtcgatgttgcagccgaaatccttctttattgcctcggcaatttccgaagttgtgaccgaaccgaaaagacgtccgtttgaaccgcccttggccgaaatatgtacctttttaccgccgattttggaggcaatgtctcttgcctcttcgtcggcctttttctttttaaaggcggccgatgcctcgcggtttttgagctcattcatggcctgggcgtttgcttccaccgcaagaccgcggggaaaaagaaaatttcttgcgtatccgtccgacacctcgtgaagctcgcccgccttaccggtgccttttatatctttactgagcactaccttcataattttgacctcttttctttatttttcgtgctttgaaatggcttccaaaagcattttttccgctgtatccgtgtcgcaatcgcgaagctgagccgccgacatggtgtggtgtccgccgcctcccagttcctccataataacctgaacatttacggctccgagtgaacgtgccgaaatgttgacggtgtcgggagatttgtatataacaaaggacgcgtcgacattttcaatattaagcagctcatcggcagcctgagacgccgcaacacgcgaaccaccgtcggcggtatccaccgaaatggcgcaacggccgaaccgcttggccgatgccacgatttttgaacgttccttataaacgtccatggaatcggcaaaaagctttttaacctccacggggtcggcgtcccttccccgcagataggccgacgcctcaaaggttcttactccggtcctcagcacaaagtttcttgtgtcaagcataattccggcaaaaagcgcctcggcctcgggcttttcgataatatcgtcgcccatatactgcaaaagctcgcaaaccatttcacaagccgacgacgcatagggttcatgatagaaaataaccgcatcgtcgataaagtcaacatttttgcgatggtggtcgatgacaaccttggtagagcaaacagaaaacaaatcgggagcgtctataaagtcctttcggtgggtgtcaaccacgataacaaggcttttcttggttataaggctcatggccttttcgccgcttataataacgcccttgtcatattttttatcaactcggtcgataagctgttttgcaagatgctgctcacgattgagcacaatatatcccttgggtcctattgtgtgaacggccttccaaagtcctatggaagcgccgagactgtcaaggtcaccgtatttgtgccccacgataaaaacgcagtcgcttccccttataagctctttaagggcggcagcaatgactctcgtcttgacctttgttcgcttttccacgcccttgctgcttattccgccgaagaattcgaaattgttgagacgcttgaccgcggtctgatctccgccgcgcccctgtgccatttcgagagcctgtctggcgctcaattcgcagtccttaaggtttttgtctccccttccgacacctatggaaagggtcgcgtttttatcgccgtgcacctttaaatttctaaccttgtcaagcacgtcgaatttttcggccttcataagtgcaaaaccgcgctcgtttaacacaaaaagatatgtgtgattgttgagctttttcataaagccgtcggtctttgaggcaaaggcctcgatttccctttcaatctgacctctgaccgaagcgcgctcgctttcggccaaattcaccgtcaattcgtcaaaggagtcgatcgacattatcatgaccaccgggcggcttgcgtcaaattcatcggcaatccttttaaggtcggtcacatcgacaaaataaagcgtgtcgaatttttccccgcccgcctcgtagcaggttttataaacggtatattttctgccgccgaaggaaacgtcggcgcggtcggaaacggaaatggccgatcgaacggtctcggggaagatctcgtcgggaagatcgcccaaaacatcctttcccttgagcacgtcggtgcggaaacgcttgttataccacacgattttgttgccctttaaaagcaaaaccggcatggtgaaattggtgaaaagatctgaatctggagttttcagcttttcgaccgttcccgaatagaagctgaagaaatatgagcttaagcggtttttgcaaaagtaaactataccggcgcacaaaagcataacccctgcggaaacaaacagacaaactatgtttcccgaaaggatgtatactgcggcggtttgtgccaaaagaaccgcaaagaaaattgttataacagtattaaaggtggctgttgaacggtcactatgagtgtttttcctcacaaaacagacctcccgctgatcagatttgcattataaccggaagaatcatcggacttctccgggttttctgatataaaaatctcgaaagcgaatcccgaacctcgtttttaatcgagctccaatcggtaatgttgttgtcataacagtagtcaagagatctgttgaccacattgcgagcattgtcaagcagctgttcgctttctctgacataaacaaagcctcttgaaatgagctcgggacccgaaagaatatctccgctctccttgtccatggttatggcgacgatgataattccgtcctccgaaaggtgcttacggtctcggagcacaatgcttccgacatcacccacgccgagaccgtcgacaaagaccttgcccgacggaacctcgtcggtgatttttatgcttttctttgtaagctctataacctttccgatgtcggaaataactatattttccttgggtatacccatttgaacggcaagctgcgcgtttttacgcagatgcatctgctcgccgtgaacgggaataaagaatttgggatttatcattcccatcatcattttaagctcttcctggcaggcatgacccgacacatgaacgtcatacatacgctcatacacaacctcggcgccaagcttcataagctcgtttatgacaatgttgactgtcttttcgtttccgggaatgggattcgccgaaataacaataaggtcgtttggtcccaccgtaaccttgcggtggtcgccgaaagccatacgatgcagagccgacatggcctcgccctgagacccggtggtgattatgacaagcttgtcgtcggtataatttttaataaggtcaatgtcgataagcacgcccttagggattttaaggtagccgagttctgtggcgatggtcaccacgttaatcatgctccgccccgaaacggccacctttcttccgcattttacagcctcgtcaacgatctgctgaactcggtggatgttgctcgagaaggtcgcgacaactattcgcttgccgcctgcgtccttaaaaatatgcgaaaggcttgctcccacgattttttcgctcatggtaaaacccggtcgagtggcattggtggagtccataagcagcgcaagcacacctttttttccaagctcggaaaacttggcgaaatcaatcatttcaccgtctatgggagtactgtcgattttgaaatctcccgtgtggacaattgttccgacgggtgttttgaccgcaacggcaaccgaatcgggaatggaatgattgacatgaataaactcggttttaaagcagccgagagtcacggtgtccccgggcttcacaatgttaagctttgccttggaaagcaggccgtgttcctttaattttccctcgataagaccgaccgtcagttttgtggcataaatcgggcaattaagcaccttgagaagatacggaattcctccgatatggtcctcatgaccgtgggttatgacaagaccctttaccctatcggcatttttgaccacatagctgaaatccgggatgactatgtcgacgccgggcatttcgtcatcggggaaggtcataccgcagtcgataataaacatatcgttgccgtattcgtaaaccgtcatgtttttgccgatttcgtcaagaccgcccaaagaaatgatcttaagcggcggagtctttttgcctctcgacggagattttgaacggtgtccctgggcgtttctgcgtcctgccgaaaaattttgagatttttccgaacgcttgaccgtttccttcttttctgcggatttttcggtaaccgaagaacggctcgttctgccgtttttcttcggagcagaaggggccttgttattatttgattttgtcatagtaagtaaacatacctccaaaattttgttgttttatgtattggggcctcgtgcccctaatcctcaaataaattatactttatattactaccttttgcccgttttgtcaagtaaagtcggggctttaggcgatttccgcgcacggctttcggttttattattgacgcggcaaaaaattttaatcatacatctcgttttttaacgggatttatgctataataaattaaatatatgataaacggagaaaagcatgagtaaaaaacaggttgaggttttcaccgacggtgcctgttcgggcaatcccggaccgggcggctggggcgccgtgttgagatacaaacagcacgaaatcgagctttcgggcggagaatcggaaacgacaaataaccgtatggagttgaccgccgttataaaagcgctggagaaattaaacgagccctgtcttgtcacgttgacgaccgattccaaatatgtttcggacggaatatcaaagggctgggcaagatcatggcagaagaacggttggaaaaaagcggacaaaaagccggcacttaacagcgacctttggcaaagtctccttgagctttgcgacaggcatgaagtgaaaatcgtttgggtcaagggtcacgcgggccacccggaaaatgagcgctgcgacacacttgccacgggatatataaaaagaatgagggagcagcatgactgaaaaacagcgagcggcgcaatgcgttgaaattttaaaaaaggtttaccctgacgcgcgatgttctctcgactcaaaatccgcttttgagctccttgtggccacacgcctttcggctcagtgcaccgacgcgcgggtaaatatggtgactcctgccctttttaagcgcttccccacacccgaggaaatgagcaaaggaagctatgaagaggtcggcgaatacataaaatcctgcggtctttataaaaccaaagccaaaagccttgtggaaatgagcaaaatgatttgcgaaaaattcggcggcgaggttcccgcaacccttgaggatctcataacccttcccggtatcggccgaaaaaccgccaacctc

SEQ ID NO: 602 - DNA, 2076 bp, Unknown
  16S sequences of unknown bacteria
gggggggggggcgtttattagcaaaaaaaacaggttttatggaaattttttcaaatttttcagaaatgtaagaaaaagttatttacaaaatataaaaaatgctgtataataaaaatgaaaatacgcaggcgggaaaccacaggcgctttcgcggcttatgggaacgtcgattcgagggatactcttctaaaagaaaagaggaaccttatgaaacgggaaatcctttgcggctctatgaaagcgggcggtgttatgtaggataaaagtaaaacgagccgcgaaaaagccatgagtcttttgccgccgatttgacagcgtttgccgtatcttataaaagcaagccgtatctcataaaaacaaaaggtgtcggcgcgaatcgtttgcacatttttacgcgccgttttcacaaggctttgcggcggcataaaagtaatatgaaatctcactaacgaaaggagcattttcgtgaaacccatggatttattggaggacttatccgagcttgtatacgtcaccgatccggaaacctacgagattctttttctcaatcgggtgggggagcgggttttcggcttaaaagacggagaaataaaggggaagaagtgttatcaggtccttcaagggagagatgcgccctgcgagttctgtaccacgtccaagctccaaaaagatagcttttacacctgggagaagtataatcccatcaccaagcggacgtatatgctcaaagacaagttgattcgctgggacgacggcaaatggaagcgcatcgaaatcgcttttgacgttacgacctatcggattcagcaggatcaactgaacgagcgtctggaaacggaaaaggaattgctgctctgcgtgcaggatttaagctcctcgacgctgtttatcgacgcgatggagcgctccatgcgccgcctgggcggttttttgcagtgcgatcgcatctatgtgttcgagttcgacggggacaggatgagcaacacgcacgaatggtgcgcccccggcgcggagccggtgaaggcgacgctgcaaaatctgccccgaagcatggtgcgccgctgggaaatcctgttttcaaacaatcagaacgtcatcattcacaacctcgaaaccctgcgggaaacggatcccgaggaatacgacgctctgcacagacaaaatatccatagcttagtcgccgctccgctgtttgcggaaaacgagctgatcggctatttcggcgtggataatcccccgcccgccctcatcaataaaatacaatttctgttcagtaccctttcctatttatatgccaataccattatgcggcaccgcatttacgaaaagatgcggcatatgagctatttcgattccttgaccgagctttataaccgcaattcctacattcacgacttgaagaagctgcaagcggccgtgccgcgcgtcttgggcgtggtgttcgtggacatcaacggactcaaaggcatcaacgacacatacgggcacgagcgcggcgacgaagtgctgcggtttgtcagcgggaaattttccaaggcgttcggggaatataaacgctatcggctgggcggggacgagttcctcaccctttgcccggatatttcgcaggcggaatttcaaaagcgcatcgcggcgttccacgacgagatctttttaaacggtcggctggcggcggcgatcggcttcaattggagcgactgcgtcaccgatttaaacgagatcatcggtcgggcggacaaaagtatgtataaggacaaagaggaatattattgctgcgcgctcccgcaggaaaagtgacgggaaatgcagcaaacaacgcctcgggcggctttccgaacaggaacgccgctctttttttgtgacaagctcttcccaaagcggggataaaaggaggggaagcggttagcgataaaggaagcgagcgccaaatagccgctgaaaggacatggaaattaacgccgcatggaaagggcttcgcaagggacgggcggaatcgaattttttgctttcctgcggtgatgagaaattttttgccgccgcgtcggttttggtcgggcgcattcttatacggcgggc

SEQ ID NO: 603 - DNA, 4264 bp, Unknown
  16S sequences of unknown bacteria
ccccttcaaacgcgagcccagcgtagcggtaagtgagagtcaaaatcttcgattttgttactcgaacttatacagcgttgtcgcgtttgagcgtgtgtcaaaaatacttttttgacacactcagatgctgcggcgtctttgcggcgcgcaggccaagccttcgtgataatcgcacttttggcactgggtcatgtcgtgcgcttcctcttctttataatagccgccagcccattggcagatgctctgcaaaatcgggataacagagcgtcctttttccgacagggcgtattccacccggggcgggatctcgtcataggacctgcgctggatcatatcgtctgccaggagctccttcagcgccgccgccaggacagcgtctgtgatattgcccatctgcttgcgcagcgcgctgtagcgcagtgtcccctgccccgccaggacgcagaggatacgggatttccacttgccgccgaacagcgccataccatattccagcgggcagcggatatccttttccaattttctctcataggccatatgctgcccccctttctgtaggaccgccgggcaaagcccggcaaaagcgggcacggacgctgctgcatccgtgccccgcaatgtaccgacggttttcctagccttacaggaccttcttgttctccgggcccggagtcgtcacgatcacctgctcgggggtgatgacgattgcgcccttggccgtcattttgccgtggaacagcttcgcagccagcgccttgaaggtatcgacaacaggcccttccgtcacatatgcggcagtacccttgacctgatagccttccgaggtcgacgcgtcataagccgagacagcgatcttgccgttgtccagaacgttgcgcatcgtcgtctccaggaagacgtcgccaacgaccagcttgccgtcctccgtgacatccttgaagcccaccggcaccgcattcgggacaccagccgcacaggtcgcgaccgtccaggtgttattcttcagtaccttcacaacattttcattcagcattggaaaaacctcctatccaatttttgctttctaggattagtataggaagtttgctctcgatccgcaagatattatcaaaataatgagttacttataaattgcatagtggcctgctcccgcccgctcacaggtctgtaatatcacgaataccgtcgtcttcctcctcgaccgaccggcagtcgcgcgcaatctcctcggcgctgtgggaagagacatattcaataaagctctggacaatggcgcggtctgtatcatcccgcagggattccagcttggataggtcctccggctgatagcgggcggcaatgagccgcacctgcgcaggccccgccgggtcatcgggcgtgtagagcatataatgcgccttggtaatatccgaataaaaggtgaaaagcaccgtacactggcacggtgcgccgtcaatctccatcgtaaaggtgatatcctgctgcatggcggcctcctgttcccctgcaccgggcgtcgatgcgtcctggggggtcctgtgttaatattttaattcatttttgaatattgtaccacagcgcggcggcccacgcaaccaaaatccctcgaccggcgcattttccgcaaaatctgccgcaaaaacctgggttttttcccgtccatcggttgatttttcccgcggcgacggatataattgaatattgcaaatggaaaaatacacagagaaattctggagggcgtttggctatgatgaaaaatactgaaaagactatggacaaaatcgtcgcgctttgtaaaggccgcggctttatcttctccggctccgaaatttacggcggcctggccaacacctgggattacggccccctgggtgtggagctgaaaaacaatgtcaagaaggcatggtggaagaaattcgtgcaggagaacccgtacaacgtcgggcaagactccgccattttgatgaacccgcagacctgggtcgcctccggtcacctgggcggcttctctgacccactgatggactgcaagtcctgcaaggagcgcttccgcgccgataagctgatcgaagacttctgccagggtgaaaacatcaccctgccgaagcccatcgacgccttcagccagcaggaaatggcagacttcatcgaggaaaagcagattccctgccccacctgcggcaagcatgattttacggacatccgccagttcaacctgatgttcaagaccttccagggtgtcacggaggacgcgaagaacaccgtctatctgcgcccggaaacggcccagggcatcttcgtcaatttcaacaacattcagcggacgacccgccggaagctgcccttcggcgtttgccagatcggcaaatccttccgcaacgagatcaccccgggcaacttcaccttccgcacccgcgagtttgagcagatggagctggaattcttctgcgaaccggggacggacctggaatggtttgcctactggcgttccttctgccgcgattggctgacaggcctgcatatgcaggaggaaaacctgcgcctgcgagaccatgacccagaggagctctgcttctactccaaggccacgacggactttgaattcctcttccccttcggctggggcgagctctggggcgtcgcagaccgcacggattacgacctgagccagcaccagaagacctccggggtcgatatgacctactacgaccaggccaagaacgagcactatatcccctatgtcatcgagccctcccttggcgcagaccgggtggtcctggccttcctggtggacgcttacgacgaagaggtcgtcgggcaggataagaagggcaatgacgatgtccgtgtcgtcctgcatctgcatccggccctggctccgttcaaggcggcggtgctgcccctgagcaagaagctctccggcaaggcggaggagatctaccatatgctccagaaggacttcatggtcgactttgacgatgccggctccatcggcaagcgctatcgccgggaggacgagatcggcaccccctactgcatcaccgtcgattttgagaccgttggcgacccggaaaagggcgtcgaggcggacaacgcagtgaccatccgcgaccgcgacacgatggagcaggtgcgcgtccccatctcccggctgcgggattggctggccgaaaagctggcctactaagcggaacttctaagatagcttccgtcgggcagatgtaaccgcatctgcccggcagtttgtccctgcggcttttttcgcaagcagaaagaaggtaacaacttggtaaaagacctgacccgtgggaatccccgcaccgagctgatcaaattctcgctgccgcttctgggcagtattctgtttcagcagctctataacatcgctgacagccttgtcgccggaaaatttattggggacgaagcgctggccgccgtcggcaacgcctatgagatcaccctggtctatctggcgttcgcctttggctgcaacatcggctgctccgtcatcctggcacagatgttcggcgccaagcaatttcgggacctgaaaactgccgtctcgacgacgtatctcgcctccggcgccctctgtgcccttctgatgctgctgggcttcaccctctcacccagcctgatgcagctcatccgcacaccggccgatatcctggaggactcgcagctttacctgaacatctataccggcgggctgtttttcctcttctactataatatctccaccggtattttctccgccctgggcgactcccgcacgccatttgttttcctggtagcctcgtctctgacaaatatcgccatggacatctggttcgtcgccgggctccatatgggcgtggccggtgtggcctgggcgacatttctctgccaaggcgtcagctgcgtgttggcggtcatcacggttctgcgccggatccggcagctgccctgcgaagaaaagcctgcgctgttctccggccccatcctgctgcgaatcactcgcatcgccatccccagcacactgcagcagagctttgtctctgtcggcaatatcttcatccaggggatggtcaacagctttggcacgacggtcatcgccgcctactccgccgccatcaagctcaataacttcgccatcaccggcttcagtgccctgggcacggcaatgtccaatttcacggcgcagaacatcggggccggaaagctggaccgcatccgccaggggacgaaaagcggcatcggcatctccatcctcacggggatcgcc

SEQ ID NO: 604 - DNA, 28768 bp, Unknown
  16S sequences of unknown bacteria
tcggctggaaaaactcctttgatttacccgcgctttacctgcaattttcccattttttgcaaacgatatttattcacaaaacggatctattatctttgtttatatgcacaaaataaaatattttaagaataaatataaaattttgtcccttgttgccgggtgaaactttttatccttccccgctcgtcataaccatagctataagtataatctttctcatcttctttctccttatttagcgtatgcgtaatcgtttctttcaacgttgttccttttctatagacgttttccgtaacgatatttattaatggagataaattattgcttgcctgcaaaatgcttgtttttgtctttatacgacctaattcgtcgaacacataatccacgatgtttccatactcggtttgccaatttgaatacagatgacttaatgttctcgttatttgcggattcatcagcactttcggatcatcggttatctgtgttatcgtcttataaaatgcttcatctacggcagtatatgtcacctcattgttcccggtcattttcacggcaaaatcatttgttgccatctgtgaatagtcgtccgtcgtgtatcccgtgcaattatttcggtcgtcgtaagtataaaaatagtatcgttgttcgcacgaatccctcagccacgttactgccgccgcacctttgctctcgattatatccggctgctctacatcaccctgccgcgcaaaagacgcagattccgacagttcgtttcctctttgtaagtttattgtgaccgttcgaccatagttatccaattttatttctgttttatccgcacttcctcctcgatactgccactccgttactgtatttgccgcataatctattctcctcgacgtcaactcttgagagcttgtcccctcaaccagatagctcgctgcgaggttgccgaacttgtcgtattcaaacttatatccgtatcctgtcgaatcttccgtcggaaatactttccacagtcttccgttttcatcatatttcagactgttttgtccgcccacatcgttttcgataccggcatcgttttctacgccgtctaatctgcctttactattatcgtagtgatatgtagtagtcaacatatttagagccgtctccgcgtttccgttatacttcacctgcgtaacatttccgaaaaagtcatagcaggtttccgtttgactgacggcactggtttccgtcgttttttcggccgccgtcgtgatttcataaataagcttttctgtagtttttgggtgctgaataatttttttacagagaactccgtcagcgtcgtattcatataccgtttccgttttgtattcgtcccgctctcttcgtatcttgcctttatagtccacataagtcgaagtgcaggatttcgttccaccctttacggcttccgtaacatcgtcaaaatctatagttactgtatttttctcaacgattatttcatctaaaatctgtttcatttaaaaattttttgtagttaaacaatcttatttcctccaatataaatgaatatttgtcaatgcatgcttttgccctggcatattatagcctcttttccattagaaagcaatagtttgtcggaagtttttaaattcctcgcttccacgaagccaatgcctaacacatagaacgggtgtccgccagtacagacgatctcctctccttccacaaaaacatgatacctccctccgtttttcccttttcgcttcggcttagtttagcatagcccggcgacgtaagtcaacggggaaatctttttttattattttcattcttctattggtcaagcctcttgcttggccttttttcttttattttcataaaaagatttctggttgcggggcccctctcccgcaccgttgacttccggattaaactatatttcaatttttccttatcccctccgagctatgcttcttcgcctgcgccgaaaaggctaaactctactcggaggtttttatttatgaaaatgcttgttgcttctctctcactcggtaaattcaaaaatgaagccgaactcttttctccccccatttccgacgataacgttatcctcatggggcagatgattgcactccaggtctttcgtaacgtcttaatgttcgactataaggttgtagaaaaactttataacggccttatcaaagacttacatcattctaccgaactcaattatgtcatttccgacggctatgattacggtcagattgctatttgctttcttcttcaattcaaaggcagaaacattaacgaactttatggcaacgatagaaacggtaagcccatttccattaaaactgcttgctatcgtcatgttgactctcatcttatgaaatttcgcagaaaaaacgctcaacaacgacaaatcgatttctctaacaacaaagaaatgctcgtcgatcccatcgattgtttcgacaatccaaccgttgattactccaaggcggacgctattttacagacaatgcaattatccgatatcgaactcaaagtgttaaactgttatctcaacggcatgaaacaggctcaggtcatttcttctctcggcattcaacgaggctccgtcaattacagaaaagcttgtatccgtcaaaaatatcaattgtatttcggtacctatcatagttctgcttattcttacaactgacctttttatttctctttcataaaacttttcttgcccggacagcttttgtccgggctaaggttcataataccttctgtattagcgaaaatcaggtatatctaaacgcgtttacgcttcccgacggggaagctgacccaaattttcctaaaggaggttcatgaccgacaacgaattaaatttaactgcttcttatatcaccgctcttgcttctgagcacaaccctaacgaaaaaattaaaatcttgctttccggcctgttgtcaacctttcgacaagaggctgattttcccatgcaacaaacagaaaactctgtttcctccattattactttctcgcttaaggagatctccaacatgcctaaatctttcaaaaaacaatttattgccaatggccttatcgctcacgttctcaaacgcaaaaccagcaaacacgctttttcctatgaaatccgttacagaaaaaacggataccatatttatgttacctcttactccttggaaatagctaaagaaaagtttttatccgccgtttcttccgataatattgaaaaataccgtaaacaaccaaaaagagttgctctcaattcttttctgttcgtcaccaacgaatggcttaagttcagaaaaaccaatcttaatcccgttactcttaaaaattacgaaagctactgtaaacgtttcttattcccctcgctcggcgggctgcctatttcctctatcaagaccattgacatcagtaatatcatggctaccgtccaagggcgggtttatgaagatttgcgcgtcgttctcaattccgttttcaagtatgctcttgccaacagtcttatctccaataaccccatgctccttatcccctttaagaaagccgaacgaaataacaggagagccttaacgaacgatgaacttaaaaagctttttgaacgcttgaatcttcccgaatttaaggactacaaacaaactttcctcattcttttattcttcggccttcgcccctgtgagttagccgacgcccgcttcgaggaggatttccttatcgccagaaacgccaaacgcaaggccggcaaaatagaatacaagaaaatccctatctgtaaccaggcaagagagttgctcgatctatccgctcccatcaaagctttacatagaaccgacgttctcaaccgtattttcaaacgcatcatgaacgacgatgacgtcactcaatattatctccgtcataccttcgctaccgtctgccagcaatacgtccgtcccgacatcgtagatatctggatgggtgattcttccgaaagacttgtcggcagagtttatacccacttctcagatgatttcatgctcaaacaaatgcaaaacgttgtttttgatttctgaaaattatatatattgcataaacgccgcaaccgcgaaacattcttggttacggcttttattttgcttgattttacaacgagtttaatcgaaaaactccgccaaaaactccgccaatctgcggcttattatcgattaaatcaaaaattctatacatttcttatgcaaaacaagcacaaaaaaagcagattaccgagtttttattcgacaatctgcatatttggtgccgcaaggcatttcaaatccgaacctacaggcgtacattcgagctccgaaaggtacaccgtctttgttccgtccttataattaaacgcaaacgttatcttatcgtcatacagatatatcgcattgataaacccgtctatcagccgttctttcctgtcctttgtcgttatatccagcttcttaaatttctctatcccaaaacggatttggtctttcgtaaggaaaggcttttttattgcataacaccttcaaaacgtgcgtccggactattggtatcgttagtaccaagattaatgaccacaatatccgcatcgaattcggtaaagtcatatttttccattgacacaggcgcatccaaatacaccttatcaaacacatccatcattttaaggtgcgaatgttgtacaggtaaaacggcagggattcccgaataagaaatcatacttgtttcggcatccaacgcttcggccacaatcgtggcgtacgtgtaactgctatcctcatcccacatgtattccgaattggcgcccaaattgccgtagccgccagtaatggaatcaccataaaattcaatctttaaatcgggtttttccttaggcgttaaaaaggtaccgtccgtatgtacgccgcgcaacgccgccgtcattaacccttgttccgtcatctttaccacctttacggtatgtatgccttgcggtaaatccttggccagcactacgtcgtcgtattttacgtcaccgtccgccgcctgtccttcgttatgcgaaaatgtaacggcttcgccgcgcacgccgtctacatatacgcgtaatgcgcccacaccctccatctgcttatttaaatgcacattcaaatccacgctaagctgtgtgcctataaagctgacgtcaaatcccgctgctgtattgtaaaaacacattgcattttcttttacaaaggaacgcccgtaataattgacctgcgttttatcggtaacgtccaaatcatcgttcttttgcatcacgtacaccttaacggttgcttgttcttcggcgtctttgccgtgcgcaacagtaatttcagtgtatccgagtcctaccgccgtaacggtattgtcgcttaccgtagctaccgatgtatcagccgaccgatacgaaattctcatccctgttgcttcaatgtttgcactcttgtatgcgtcgtcatccaaaaccaataccatttctcgggtgcttacggtaaacggcgttgtatcactgcatgccgtaatagaaccgatacaagttgctccaagcaatgcagacaaaagtaaggatttaatactttttttcataccaaccattcatctcctttatcaagttcaaaacctctttaccgcgcgtagtttccgacgaaaagctatgctctatggtaccttctaccaaattgaaattccaaaacagcgacagttgtacatcagcattgaaaatcgatcgcgctatattgcgataataggtaatgtcactctctaaatcgctaccccattcgccgataaagtaggcttttttcatctgtttggcagtggtggtaatgtaagcaaaatattcgtctattataacaatgagagaatttctctaaaactaaaaggaatgagccctgtacagtacagagctcattcgcaaatttaatatttttttgtctaaactttggggggcacttcaaccactctaatccccacgcggtggaacatattttccgtatcgtcgggatcgctttcggcggtaacgccgagatcggtgattttccagcctttcgctttcaaatgcgccaccaccgcttctttcagcggataccccgcgaaatccgcgcccactaccaagtatttatcttttacggtcttcattttttcacctctgttttagcttcttttttataaaaatcgattatgaaccgagtattgctttcaatttcgtgcggcgaagaataagaactttctttatattcggaagaatagaccataaatttttcaggatacgctctgccgtacatgtcgataccgcctgtattcccgaacgaatgcggatgatgatcggcgccaagttttacataaaagataaagggtttatcgcgagccgcgcaatatccgatcatcctttgcgaattttcggaatacgtcaccgtggtatcgtcagtcccagcaattaaaagagtaggtatattcaatttaaaatactcgccaagcctccccacggggtaacaaccatagttttcaaattcttcctccgacttaaatccatattccttcataacctgttcgtgtaaatcaatttcaccgaacttgggatcggttctgggccagctgcgtaaatcgagcacgggcgcatcgagataaaccgattttacccgttgaggatacgccataacgaagttgaaggcataaagtccgccacgcgaaaaaccgataagatgacactttttatcaagaaacgaatatctttttataagctcgcgataaaacccgtccataagtttaatcgcttgaggacttccgtatttatcgcttatttcataataaacgcgcgtataacccagcaggtaaagatcttgttcggctttatcaaacgcatgaaaaaattcggttttccaaagccattcgccgtttgcgttttcaggaattaaaaccgttgcccggtaacctgccactataaagaactcttctctttcagtcataatcccagctccgtaatatcaaattttcagatgtttggatttctgtttttttaacttgtttgctttttatttcaaaaatacagtcggaggtatttgttaaaaaaataaattcttcagtatttttgatttccgcaacatacgaatttttcggcagatccgaaaactcgttgttttcaacagatattcttttgtgaacgtaaacaggtttatcccgaactacaacctgcggattaaccgaaatcaccggcacattgtcctcccccaagcttccgtatccgcatgcgatgactcgattgttgacaaatgaaacatccgtcgtatatcccgactcgaaccagaaattgcagtcgtcttctatacacaacacgtttccgcccgttttataaaataaattattttcgattacagccttttttcgggtggtacacaatataccgcgccccatcgaagggccgaatttattattttttatcaatacttccggcgtcatcgtggcgttttcgacgtaatctccgacccgtgcctgaagctcttcgtcagccgtgagtaaaaattcaagttcgcttattatgctgaccgattttaccgttacgccgccatacggaagcagggtaagccgatctataaaatctatacggtcaccccgtttgaaaggacaaaagccgtagctatgcaattcgacaaaaccgacccgcagcgtattgtattcgatttcttcgattttgagatgcgtgccgtgaacattgataaaatcgtcgtgcccgtcggaacaaacacagccttcgacggttatttttccgcaacaatttgaaacgtgaaaaaaatccgcattactcgcagtcgtcctacccgccgagggggttatgtttatattacgaaaagtcaccgtgtcgcataattgcgccaaaagtccaagcccgtgcatagctcttatcgtaactttttcaaacaatacgtttttgcaatttacaaatgcgcctcctatttgatcgcgtacggtatttctcgtctgaaccgtacatccgacgggaaaaaacgccttctcctccttaagagtgactttcagcaatccgccgcccagatcggccacggaggaaaattcgggaacgcacggaaatttacattcggaatcccgccccatcacgcgcacgcgttcggtttccggatctttatacatcgagatgctcatataatcgcggtagtcgaacgcccacagatatttaccgtcgcggcccctttctccgtgccatataatgcgcgcgcctactatatcaaacaaactgtcttttgctatcgatataatatatccgccgtcaacctttttcaaaacagtaaactcgctcatcgtcggcctggcataatctatcgtcatatttttcacgacgagattttcgcaacgatcgaaaatcagcggagtcattattccgtgaacaactattttacacccgttgccgtcgatgcagacgtttttcttctttttaagaaaaatcgccacgggatgcgcgccgcgaggattttcttcagccgaagccgtattgctgaaatgatacccttcgacgcacctgcagcagtccgaccaaaaatgatattcgcccgattccaaaaccacggacgaatcgttttgaacggaagcgataattttctctaaagcctttcccgtcatagttctctcgtcaacagatctcatcgagaataaaacgggcaagcaatctgtgtcccgcttcgtttatatgagtaccgtcaaaaatatactttcgtttgtctgcggcgtttgccggatcgacgggtaattttccgccgtctatgacgatttcgccgtattttttcgcaatcgagacgagagcctttctgtaatcgtcgagcacgaatcccgccctgttaggtttattctgatccaacctcggcaacggcaaaagcacaaaaacgtcggaatcgggagaacgggccttcaactttccgaggcaaaaatcagccgcgccgaaaaaagtcattccgtcctcttcatccgcgtcgccgagcggaacgtcagtgccgtaatcattcgttccgagcgcgacgaaaatagcgtcgccgagctcgcatttttccacagtgttataaaacgacgcttccgtcatgatccgagaggccttgctgtaagaaatgccgtttgttccgtaatttataaaattttccgcttcaagctctttcgaaacgatctcgggataagcgggacttgcgatgcacatcggtgtctgcgccccctcttcggtataagtgcctttggttatggaatcgccgtaaaaaacaatttttttatactttttcattatttattcttcaatcagacagtttttttccatgcaatcaaacagtatatctgcaaacaatccgtgcatttttctggcgggatgattaagtctgttgcacaaaagcatcgtggtatctataccgtatcgatcgagctttttccatgcgccataagcgtccgcgtaataaaagccgtacttttccgttttctctttgagcttttccgcataggcatcgagtacgccgccgttttgacattcggcgagatcttccgccgttttgatatgtatctcgggcgtatcgggcgcaacgtatttgttcaccatgttcgacgacattaccaatgtggtgatccctgcctttttgaacctgtcaaacaaaaattcgaggtgttttccgtaccaatctacgtcgcggcgagatatatcattgagcataaagcaaaatatcagaatatccgggttatgagcgaaaacgtcgcggtctgcgcgcgcgatcccctcgataagcccatcgccgctgactcccgaatttatcagttcgaaccgcgtattcgcatagcgtgttttcaatttttcaataagcttttcgccgtaacaggacgaagaatctactatcagttcatatgccccgttttccttcaaaatttcgaagcacccctgtgttacactatcgccaaagcatacaatttttttattcattttccttttccgtttaccttttaactcccgcaacgggcgcaagctacaactcgtccttttcgggaagcctgccgaacgccgcaaaatctatcagtcccaccttcaatccgttttttctcggaaaaattttaagacggactttttcacataaagtcatatcgaaagttttgtaatccacgttcagctcctctccctcagccgacgcatccaccaaaacgaaagaccttccctcgcatatcccttcaaagatatatctgacgggcgcgggctttttcccgtttttatagtctaaatttacgtcgcgccagaaaagccttaccgcgccgacaaggaatttccccgacaaatcacattcgataacgggcgcggaatcatcgtccgcaggctgccaaaacgaaaatacgttttcgtcggtagcgtaaacgccttcccgtccgggcgaaaaactcgtaacttcgggacggacccaaccggtaagagattttaaccccgcgtcgaatttttcacgcgaatcgggagcggagaaattcagtccttttatccggtcgcaggcgggcgaatattgcggagtatcggtaacgccgcaaggcatatacagttctccgttttcgtctatcgccaccctgtccatccctatccgacgttcgtaacggtgcgcaaaaggcgtagctatcgtataaaatatccaaagagaatcgtccgggcctatctctaccgagccgtgtcccgcgcttgaaacgattccgccgcgcggcgcgatcgccagaggatttctcttttggctttgaaatcctgaaacgggtgactcgtcggaataataaaccgccatacaataattgggatgacaggtatcgggagatgcgtaaatcatataatatctgccgcgatatttaagcaaatgcggaccttctatccagccgaaacgggtattctgcgaatgcgcgccctgccgttcccaaggcttgttttcaggatccatcgtaacgatcgtaaccggtccctttatcaccttgcaaggattctctcggtcgagttcgtaccctacgatcatcgtaacaggttcgcttccgcctttccaatcgaacgcatataaataaattctgccgtcatcgtccgcaaatatgcacggatcgcaaggagtaaaccttttgccgtcgggcatttcaaactcacccaattcccgaaatacgccaaggggcgagtcggaaacatataaaggcgaataccatgcagtcagcagaaatttatctttccacctcgtgatgcacgggctgtatttcggacaatacggttcggtgcggacgtgcttccagttttcaaaatcggaagtaacccaagccatgccgtagctcgggtaaagataccacttcccgtcacaataaaaaacggtcggatcgcttatcgatctgtaatcggcgcactttaccgaatcaggtttattttcgtgactgaacattcctcgctcgaagggataccaatcgtcctttcctcgcggaatatcgggaagagacatgggattgcaataagtatgtttggcctgatctttgtcgaatttcatagttttattccaatatctgcgcgatacgcttcgcaagttcctttttttccggcggatgaatccccgcgctcgaacacacgtccttcgatacgacgagctttgcgcctcgaattatttccgccgcctttttttgcgctttttggatccctcgccagccgtcatctttccggccgtcgaaatccgctatttgcacgagaataaaaggcatattctcatcgccgagatccttgcgccaactgtcggcgagaaatttcagttcgtcggcgtaaatttcgctttctttcaccgtcgtattgctttcgccttgataccaaatgacgccgtttaccgcatacggctttatttgtccgaacgtctttcggtaaagcatcgaacgagcgttccatatatcatagtcgaaatggtcgggatgcatctcctcgcgtttcaagtcaaaccgtccgttctcaaacgccgtttccggcaaccaactttgaattaccgaggctccctcgtaacagtttatcattcccaccgccgcgtcgctcttttttctcagctcccgcccgatgaaaaaggagagcgccgtccaatcgggaatgcaatctcttcggcagggaatccaaccgtcggaggcacggaatcggtctatgtccccgtcgtaaaaaagaatgtgatcggcaaaaaagcttctcaaaagcttgtcgtccgcagcgtccgaccaatcgtcgagacattcttttgtcttgaacattacgttagactgccccgcaataagataaactttacctatgtacacgtttctcgcaacggctttttcttcgccgcaggaagcttctatcgtaaagggcccgccgcaaggcatgggcggaaattccgccgaaaagacgcccttttcggggtacgccgcacgcttcgtgccatggaacgaaacaattgtttcgccgtcgctttcgccgtatatcttaaacggttttccgaaaggaataaccgcgccgtccgaaaaaattttgttaagtttcactgcctatttcccttaaatccgctttttcgaccgtatattggctttcgggcggaagttcgattttgacgcgcgccttaagccgaatgtcgcgcgacgaagagcctatttgaatttcgtaatcgccgttttccacgtaccattcgtccaacgccgcactgtaaaaagcaaacgcatcggcttcgagccttatcgttatcctttcctttttgcctgcctctatcaacttctttacaaagcctttaagctctttctcggggcgcgacaccgacgaaacgatatctttgacgtaaacttgcaccacctcttttccgcttacagacgaaagattctccacgtcgaacgaaagcataaaactcgtttcgcccgccttttgcaccacgagatccgaatagacgaagtttgcgtacgacaaaccgtatccgaaagggaataacacttccgttccgtctcggtcgtatcttcgataccccacaaaaattccgtcttcatatcggtcgtaatatccgttcggctcgtagggatacgctacggtatcggctatcgaaagcgggaaggtctccgcaagtttaccgctcggacaaactttacccgtcaaaatatccgcgacggcaagattgaccgtctctccgcaaaaccccgcatagaccacggcgtttacgctgtgtatccacggactcatgtctattgcgccgcccgcataaacgaccaccgttacgtttttgttgactttcccgaccatctttatggcgttttcctgtacctcggacagccgaagagtaatgcggtccgccccctctctgtttttgcgctcgtcttcccctacgcacaaaaccactcgatccgccgccgcggcgctttccaacaaacatttttcggcaaacattccgtcatcggaaaaatgttgtctgaaccccgttttcgctcccgtacgctcgcagatgagtcgggcaagcggctcggatttgaaggtggtgcgtactttcgacgatcctcctccgccatacggcggatcggacgaaaaaccacccgccacgtaaacgctttttcggggatcaagaggcagcgcgccctcgtttttcaaaaggactatgctttccctcgcaacggacaacgcccgttcccttctctcggcgacggagaatcggactttccgtttttctttcttcgccttttgaaccttttcaagcagccgtagaagattgtctgccgaaaaatttatctcggcgtcggtaatcagtcccctttcgtacgccgttttaagttcgccgtaagctcgctcgtcaaaggccatgcggagatcgagcgtggcttttaatgctttgtagctgttatgtaccgcgccccaatcggaaacgatcactccggaaaacccgagacgttttcgaagcaaatccttcaaaatctttttgttctcggacgcatatatcccgttgacgggattatacgagcacatcacaagccacggctcggcttcaagcgctatttcaaagggacggacgtaaatttcccgcaaagtcctctcgtcggcttcggaagaaataaactcccggtcgtactcgctgttattgcaacaaaaatgttttatgcacgcgcctacgccgttttcctgcaaaccgcgtatatatgctttcgcaagaatccccgacagatacggatcttcggaaaaatattcgaaatttcttccgcaaagcggcgttctttttatgtttacccccggcgcaagcaaaatatccacgcccttttcggcacattcgtcggctatggttgccgaatcggtaaaaaccgtctcttcgctccaagaattcgcaagcgcggagatacagggcatggctatactttcttccgtgtgttctccgtcgcattttcgcaagccgttcggcccgtccgacatgaaaaccgaatcaagctttccgtttgcgtcataggtttgccaaaagtcctttcccgtcaaaagactgagtttttcttcaaaagtcaaatggttaatatcgtaattcatagctctaatttatattggtttgaatagttcttttatagtctttggggcttacgcctgtttttttcttaaacactttgctgaaataatagggatcgggaaagcccactttgttggccacctcgttgacggcaaaattatgcaaaagcaaatccttcgccttttctatccttatatcgagaagatactctacgggagtaacgcccgtttcttccttgaatatttttcgataataattcatcgtatagccataatcttttacaacttcgttcaagtctatctttaacctgtaattaacggaagcgtaatcgatgaatctgtttacagcatcccgataaacgccctctttgtccggttgaccgcaaaaacgggcaagtattttcaacatatacgcccgaaggatcaaatcctccgattcgcttcttcccctcgaatacccgcaacgataaaagttgagcattttttgaagatctcccagcatatcgtcggaaagcatgccttcaaacaatgcataatttttcaacacgtgcgcgttttttcccgtttcatctacgtatcgggggtcgggttctactttttctatccacgggcgacaatatttaagatacatatcttctatttcccagttttttcgctttttttcgaaaaaaaagtcgaaatgcacaatgaaatacaagcatagatcttccgcattgtcgtcgatatattcaagaatggaaacgaacggaggcaacaaaacacaatcgccggacgataaaattatatccgagtcgtcaatcttaaatttcaactcgcccttgatcatgccgacaagctgataatcgtataattttctgagcggacaacagtgcgtctccccctcgttgatgattattttgttgacgtgccgcacaaacggggtaatctccgataaaacgtccgcttcggttaaaaagtctttaagattttgcatatatattctccaaagtaaaatttatagacgtttcccccaattttccgtccgcgcgtccttcattttaatacgatgagctgcccgcttgcaaaccattcgtcgaattttttacttttatattcgcccgttaagtgctctatatccctttgttcgttgttcgttatgcatacaaacgcgccgctttcgttctcgaattccgatacgattaagctcgcgccgtattcgcccgtaaaagaaagctcctctatcacgccgtttacgtattctttataatcggcataaacctttcccttatgataaaccctttttaatctcgcaccgataaaattatcggcataatatttcaaaaacattctgttctcgtcggaaaggatataaaacaagggggttttttcaaaaaagagattaatcggcgcctgtctgtaagaggaatctttatctctttcgtaaataaaaaaccacaatatgccgtttactccatgggaaaccgcggtatatatctgccatcttatatcgtcgatatcaggagttctgtatcgccaatgtcctaccgaaagcaacgtcgtccataacgggacgcccgctttttcggcggctcttttaaacgccgagaggtttttgaaatactcgtttatatccttttccccgaaatgatattcgcactgagaataacaatcgtagcaaagacaaaacaatcccgtttcctttaccgtgtccgcaagcagatcgacatattccccatgcgtaattccttcccattccggcccgttttcgtcaaacaacggaagaaaatttataaacgcggtcgagaccgaattgacgattttcaccgcatttttcatatcctcccattcgtataaatgcggctcgtctcccacgctgaacgcaaaaaacgcaggatgcgccccgaagtctttcaccgcgtttaacaccgcttttttatacgcttctccgccgtgttcggtatagtataaccaacaggtgcgcttgtcgcacacaatcatcttgattccctgctcgtaggctgcgtccaacgatttcaatatgtattctttatcctcttcacttttgcagacgctgctcatcgccacgttcatccccagggtcttccaatcctccgcccccgcgcgaacgtccttgacgtagcctgcggcagtgtaattccaaaaacctacgggaaagaagtctttattgtttcttttcataaaattccgtttccgtaaaccggttgccgctttttacagcggcaaccctgtccgatatatctttttaatttgtttttacgccatagaattttccgaaggtaaccgcttcggcaagaatcctgtactctcctgctttccaaaataaaccgtgcacgtccgtatcggcgacccagaacgcaagcgaacgcccttcggcaagggtgtattccaccgtataagtcacgccctgctcaaacgtatagcccgaagtgtaatcgatatagccgttcccgtccgatatttttaaccactcgacgggcatcgtctgggaagccgccgatccccacgtcgatttatatacgcccgggccgatcacggtagcgtactcgggatttaccccccaacccgccgacgcgctgtcggtaatcgtaaagaatttgccgctttcgttaaaggtaacggtaaatactactttatcgtaaccgacatagtcctcgaaagaaacgtacatgccctgcttatactcttcgtgaaaaatattcatcgaagagttcagaagcgttttcgcctctttccccacggtgagcgtgaacgtcgccgtcttttcccccaccgtcagggttatcacggcaacgccctcgcccacggcggttacgacgccgttatcgacggtggcgacctcggcgttgtccgaagtccacgcaagagataacccgtccgcgtttttaacggtgggaacgagggttaccttttgtccgacggtaacgctctctgcgctcttatcgagcgacaccgagacctccggtgcctcggaccataagccgtaaaaatctccgaacgttatatgctccaaagcgtcggaataataattcgtcgcagaccaaaatatcccgtgcacgtcggtggaagccacccaaaaactcaagtggcggctatcgtctatggaatattccacggtgtacttaacgcccttgataaaggtataaccggaggtgtagtcgatataattgccctcggcatctttaatcttaaatacgtcggtggaaatattcggatattccgccgagccccaaacctttttataagtgcccggtcctataatcgtagcgcaatcgggggataccgcccagccacactcgacgccgtcggtaacggtgagataactgttgtcgtcggcaaaagtaatcgtaaaagagagtccgtcgtagcctgcgtatttatctaggacgagaagggcgccctgacggaaatcttcatggaacgctgcccattcgggcgttatagcgtttttctgaaccacgctgacggtaaacaccgcgtcctccgcgccgcccgaggaaacgattattctcgtttttcctgcgccgacggctctgaccaaaccgtttgtcaccgtagcgacggaagaagaatcggtcgtccaggtcaaggaggcgtctctctcaaacgcgacaaacgcattaagctgtatctcttcgccgctgaacagcataccgtcggttttatcgatcaccacaaacggaacgggtttttccgcataaatgccctcaaacgacttgaattcgatgtaatcgagcaaatcggacttataataagatccgccgtttccccaccagtattcctctgtgtcaagaagggagtcggacacgaagaaatatacgccttccgttttggccagagcaagcactatcgtgtaggtttcgccgacctcccagcttacgccctcgccgccgagcctgccgagcgctttgccgtttttatcaagaacggtaagctcggaggcgtcaaagccgggggaggcccagttccatgcattgaaaccgctgtaactgtcttttcctattctcacgccgttggactgttgtccccagactccggtaagaatatgtaaatatttgaaatcgtctttcaccctgaaggtaattttcaaactttccgccgtatcgtattcgggactatcgggcgtatatctggccgcgtaagtcaacgcgggttgttcgtaaaactcttttgccgtaaaagcatacgtattttccgaaattaccctgatcgcgcactcgacggattccacgccgttgtaagaggcggtgacgacggcaaatccggaagcttttgcatagaccgcaccgtccgcgccgatttctacaaccgaaggattgctcgaaacgagcgtagctttgacttcgccgtcgagatttctcacaaaagcggtcaaatctattttttcgttcgctacggcgaggagagaagtatcgctcagctcgatgaaagcgggcgctttatcgccgtattcggtcgggagatacgcttcggtttcgtaatatcttatattatcgatataaaccacgtcgtcggtctttgttacgccgaactctatcgcaacgggagaattgctttccacattcagttcttccagcagttttccgtattctacgctcaccgtaacccactgtcccgctttgaggacatgcaaaagcttaccgtcggaaacaagcgaaagccagtcgagtttttcaaaatcggttttgccgataaccacgttcgtttccgtttttccgtagtttatggcaaaatacagctcttcggcattttcgacatataaatcgaacgtgagataatttcctttttctttgaggtttataatcgaatccgctctcgttctgccggtggacgacgctattacgagggtatttttcttatactcgtcgctgattcccgtcagccggtaagcggttttcacgccgccgacttcgccgctttctttttgataacggctttcgtccgcattgtgataagacgcaaattcatcgttgttcgcctgaacgtatccgcccttttcaacgtacgcaagcgccccgtcttcgggtataaacgtatcgtcgagataatatcggatgttcgtcagatacgaggtcagatacgaagcgttcaacgcgaggtaaaaatcgttattcgcggcggcgtcgatcatgattctttctctgagatcgtaaacgatcgtcatccactttccggttacaaatttattggtaatctttccgtcggatattactttcaaaccgtccacgtcgaaatattcgtcgagcggagcgtagaaagtatcgttcgagcctcctacgggagccaaaaacctcgcgtcggcggtaacgaacagatcgtacgcgaaatatctgtaaccgtattctttataaacatctatacaggaaagcgcggctttgccgttggttatcctttggctccaatagccttgcccctcgatgcttacgtcgcccgtaacatatttgaacaggccttcctttcttcctcctatcgcctcgtcgccgttatatgcttcgtaaacggttccgtaagccgaaccggtattgttaaaaatttcttcaacgtagtttggcaaaacgataacggtaaaattcaccgtgttgtctccgcttttggcggtaacctctgtcgttcctacggaaacggctttcacggtattgccgtcgaattccacgatccccgctttctccgcaagatattccacttcgggattttctactttctcgcctttaacgactacgtttacgggaatttccaagtaagaaagccccgaatctttcgcattgtaaatggtaaactcgtcgttttctccttcaagctctataaacgaataaggttttacggtaaggacaaccgttttttcaagttgaatgcccttatattctcccttgacggaaagttgagtctgtcccacttctagagcggtgactttaagcccgtcgcacgttgcgacagagggatcttccacggtcgcggtaaaatcggcgtcaacttctataatttctccgttatacgaaacggcgggagttatcgtcgtttcgacgctttcatacgtttccacgtcatcgagcgcgacgcgcggccgagcgcccgaatccgttaccgtaacgttcaaggtaaccagatatcggtcgtttgtgccttttacttcggctgtcccctcgcccgtcgcggaaagtttgtcgccttttatctcgaccactttgtcgttcgaggtcgtccattcgaactcggaaaattttccgctttcaagttcgatcgttttttcgtcgtaacggtcgagccagacggaaagcgtttcttcctttttgccggccgaaacgctgcatgcaataaacccgacggctaccgcgcacagcattaccacggataacagcagtcgcaaaagtgattgtctcttcatttttctccttctccttaatcttttattttccgaatgcgccgatatagtttatccggctcacgtcggcgcctccgaaatcatatctgttcattttatcaaaccttttgccgccggacaaaacggcttccaccgaagtcgcaaattttttcgcattttctattccgtcttcggcctttacgctttgcagcaacggatcgacggtaagcgtcccgaccgcggcgacgtaatcgaaaatattgtcgttgaaattataaaacagattgttttccacaaaaaggttctgctcgccgtcggtgttttggcaatgatcgaaagagaaaggaatatttctttgattgcgcagatagcacaagttattcgaaaacgtccaattgcggccgggaattcccgaataaaacccgtttacgtcggtgagcttttcgttggccgcttcgcctttaagcactacggtgttgtttactattttaagatttttcagcacgtcgctgaacgtaaaaaccgcgcaatcgttatcggcgaaaacgttgtttcttaccgtcacgttttcccatatcgccttaaactccattacgggaagatgaaattcgtcgtcgagtacgagattgccgttttcgtcatacaccggcatttcctgaccgttggagcaaagcaatattccgccgccctcgttatggtgcgcgtaattgtactgaaaaagaacattgcagttgcccatatcgatatcaaatccctgtccgtcgcccgcgccgtttgccttatgcgtataagcgctttcgttgaactgcataacgaaatttttacaggagtgtatccaaagcgccacgttataatatcctcctcggccgagatactgagcgttatggcagacgttgctttgcataaatccgccgtccactccgagtacgaccattccgtcgcctcccgtataagagaccttattgtttatcacgttaaaatttttactgcaataccagccgtcctcgtcgcttttataatcgtttacgccccagtcgattcccggtcggcgcacccagttggaggtaacgaacaatgcgtcgcgcgaaactctctctatggagttggaatctacccaaacgttttcgaaccaactgggccccaccgctttggccgtccccgcttcaaaatatatcgcagagcaggaataggtgtatttatttgtcgggcagacgtcggctacgtttacggacgataaatccacgtcctcgggcttaagcccttttccctgcatagaagcgggcagccccgcctcgaaatcaaagtttatatcatgcagccagttgtcgtaaaggaccacgttttccaacgcccccgcttttacggtatgaacgtaaattccgcgttctccgtttacggaggtacattcaagcgaacttatgcggacattgcccgccgtaacttcaacgcaattgggcgccgcgctgaaccttgcgtatttttcctgctcggtcgcatcgtaaacggaaataatcagcggcttttcttccgtcgcctcaaacttttccgccttcaaaacggtatcataggagctgcctgctttaaacaaaatcgccgaaggagaagcttcgtttacctttgctataacgcgggccgccgcgcccgccgtccgcttgggagactgcttgctcaatccgtcgttatcgtcgtcgcccgcttcggaatcgaaataatacacggtatatccctgcatatcgatgtccgaatacttaggatattggggaatctcttcgtaaacggtattgacgtccggcttcgaagggacgctgtccgacgacaaagaattatccgcagggctgcacccgacggtaaaaagaaatgccgcgacgcataatatttcaactatttttttaattttcatatcagttacctcatttactcgttttcggctgtttaagtatcaaaaaaggcgccggaagaatcaaagccgacaacagaccgtaaagcggaaattccgcagagtttatttcgactattctttttgtggaataaaacaatcccaaatagaagaacaccgcgcacgccgcaatgggaatataggttatttctttaatatattttacctgttcttcgatgaatcttccctcgcttgcctcgcccaataaaacagcgacaagtgcaaccgccgcaaaaatcaatgccgtttgtccccattttttgacgggaaccatgacgattttgaatccccgcgtatattcctgaacataaaagaacgcgacgaacgggataagattcagccaccagtattttttccccttccttttcgccaaaacggccactcccgcagagtagtattctatcaccgataaaaccacaatcaaccacggcattttaacccctcgcagccttcatcaccttgtatgcgtcggtaataaaatcgacataagttcttcctccgctttcgaaataaacccggcgttcggtttcaaaagtatccgcgggatcggtttgcccggtccatgcgggaaccacgcaacgtccgtatattccgacgatcgaagtattgtacgcctgcgtaatttttgcgtttgtaggccacatataatttaccacgtcgtttttgacgtagttatcgggatttgccgcaatctcgagccatttgctttcttcttccgaatatcccttatataccagatttgaaatattttgattctccacaaaagtaagaattccagaataaggcgactttaccagatattcgtcttttccttcgggataagaataggtaccgtcgccgttatttacccaatgtttgccttctattccgtacctgcaaagattatagttctcgggatttttatacacccagttcaaaaacttgattattttcattgcgtttttagagctttttacgatacaggccgcaaaggtcgcctccgtattggtcataaatccttttttatcggaggtttcgtcgcggacgagcggacctatcaccgtaaattccgcgtttttatttgcgcttttgcactttcttgcgacagaaatcaaatgctttacagacggatcgagtatgaacactcccgttttttcgcctataaaattgatctctccttgttcgacaagaatgctcgagctttccggggaaataatcccctccttcgcccattcgtattcgagctcgaggatatctttatactcgtcggtcgcatatccgggaaggatttcgccgttgcgttcgccgtaagtgaaataccccgtatcgctgaaagcgcctaaaataactttttctatatcccacggcgcgcccgttatcacgtgaccgaggttatacttttgcttcatcgccttgcacatatcggtaaacgtgcgcaaactatctatcaaaacataatttacgccgtctttgaactcggttttcgctttttccgcgtcgtcggtatatccgcaagtctccatccaatcctttctgatcagcataccgaatttatacgggcttatcgccgacggaatccccaccacttttttatctatcgtggtaagactgtcaagcgggttgcctttgatatacttcaacacgttcggaccgtaatcgtataaatcgtcgtatatatcatagaataaatcctgcgaaacgaaatagtcgtctatccccgagccgccgcgagtgtgcgatatggcgatatccacctgcgcgcctgcggccagatcggagttaagcttcgtcttcattccgtcggcaagatgggaaattctgaaatccagccagacgcccgtgtcggcgtgatacttttcttctatatagtcgataacgtcgtcttcctcgctgcccgcagtccaggaaaactcgctcgaaccgcccgtataaattactatcttcgtttcgttctcgcgcttgccgcccgcatcatccgaacttcccgagccgtctccccctccgcaggcagcggccgatacagccatcagcgcggctgaaagcacacaaacgagtttgtttagattttttttgaacatatagtcctcctcgtacggcaaagccgtcttaatttttttcgttagcctttaacggcgccttcggtcattcccttgatataatacttatgcagcacgggggacagacacacaagcggaagcaccgctataacgaccgcggcgtttctcgccgatataagcggcgcatcgacgatcgaccctcctcccaagcttccgtacaacgattgcatgtctgtaagtatttgccttaaaacatattgtatcgtccaccacttggtattcgacgaaccgaaataaagcaacgtgtccagccaattgttccacctgtccacaaacataatcatgccgatcgttagcatcatcggaacggcgagcggtataattatttttataagaatctgaaactgatttgctccgtccagctcccccgcctcattcaaagaagtcgggatgccgtaaaaatagtttcttaaaagcagaacgttgcttattcttaccgcgcaaggaaaaatgagcgcccaaacggtatcgtatattttgattccgcgtatgacgagatagagcggaatcattccgccgccgaaaaacatgggaatcataaaaaagatattgagcgcttttcttcccgcaagatcctttttcgctaaaacgtacgccgcacccgtacagagagctaccgacagagccgcgtttgaaaaagatacgattaaagaactgattatcgacttgaaaaacacgtcgctcatctgaaagagaaaggcatatccctcgaaagagaagcctctgaaccaaagcgaaatacctttggacataagctgaccgttatcgctcaaagacgaacacgctattatccaaaacggcatgacgaaagaaaagccgagcaaaatcataatgcaggcgtttattacgtcgaaaatcctgagctttcttttgtttctaatcttcgtcataatatcccctcgttttctgtctttttaacgacagaattgactataaacaccatgatcagccctacgactccctgaacgaggcccagcgccgtagcctgagcaaaactgccgccgcccgttatattggctatcattgaggaacctataacgtctgtattgccgagcgacgccgagccgttcgtcattgccaaaatctgatcggcattgtcggaaagaacggacgccgcatccataagcacctgcatcgctatcacgttcgctatacccggaaaggtaaccaccatagcctgctgccaccttccgcctccgtctatcagacacgcgtcgtataattcgccgtctatagaccccatcgcggacatatatatcaaagtcgaccagcccatgcctttccatagcgacgaaagagcaagtatccaccaccagggctcctcctccgtataccaggatacgggttttccgccgaacgctaccagcatcttgttgataagaccttcatcggcagaaaacaagttgtacgcaattccgctcaccgccacccaagaaatgaaatacgggatataagccaccgtctgtatagcgcttctgcccgcacgatttttaatttcgcgtataagcaatgcaaacagcaaaatcagcggaaaattagtaagtattctgataatcgaaatatagagcgtatttctcaaaagacggtaagttgaagtgttcgcaaggaaaaacatatcgcggaaagccttgaatcctacccattcgctcccgcttacgccctcaagaattttataatcctgaaacgcgattacaattccaaacataggcgcgtagttgaacaccaaaacgaaaatcacagcaggcagaacgataagatacataagtttgttctttttcacgctcgcccaagtccttccgcgaaagaacgaacggactccgacaacaaagtcgctcctcgtttttttcggggcggcgttgcatttttcggaggtcggcagcgcgcaagcgcaaacggtctccgtttcggccgaaagctttttttctttttccgactgcttgcatcgttttccctttttggaaaaacaaacgaacaaagcgatcaatgcacctgtcagcgcagcgcccgcgacaatcatcgccgccatcgcaacgggcgatggtccgcgatcaaacgcgacatacccgtacattattttaatgtcggcgtcttttatggccgttatttcaccgctttcgtcctttttcagaatatcgccttttattacagtcggctttacgacgatttttccgttttcaacggaaattccgttccccgcataataacgaatttttcccggaacgctcatcgtaatcgacgatatatctcccattgtaagatcggtagccaccagcctgaaaaggaacaaatctgtatcgccgcccgacttttccccctcttgcgcgaacttttcaaacgcaatcgtttcccccttttcgtttctcggcaaaacttcgtcttttccttcgtgttctctgcttatatcgacgcttccgcggtcatttccgaaccataccgaagaagaataacgccaactaccgttcgcccagctttctataagccgtctcctctcgctgccctccgaaaaaaaatctgaaagcgcggcaaaatcgaaatcgcccggaccttttaccttatcgatacgccgaagctttaccgaaacgacatattcttttgcttttttttcgatatttttcaaaacaatcacatcgtcgtctccggaaatcagattatatccgacgatgtaattttcaacggaggttttcacctcttcataagaaagatcactttttatatttaccgctacatcacttttcatgtcgtagctgaaatttatcccgcccgttacggtagatccgcccaaacaaagagaagatacgatgacaaaaaacagcacggaaaaaatcttcaacagctttattttcatctaaatactctcccaaatactccctattgaatttttcttactttgtttttcaggaaattcaaacgccaacaacttatagatattatcttatcctgaaaataaatcgactcattttcgctaatttgttatagtaatttgttgtatatattatagcatcgccaacagtcaaagtccattgacaaatcaattaaaaaaaatggaaaattcaactattatatctgaatacaactttgacttttgaaacgtataaactccaatttaatcatatcttttcctgaaatccaccagttcaaaaatttttacaaatttttaattgtatggaaaaaagacatgcaaacacgaagaaataatgggcgcaaacgtcggaaatgtttacttttgtctctatgcctaatttgcttttatcatagaagcgccccatgtatgcaattacttaaaccgtgaaaacataaaaaatacgttcgttaaacacatgatccctctatttttcagtttttatctcgccgatatatactcgcaaaacgggaatttatcattttgttttcatcgtctaatctttcgacaaacattcaagcaacataacccaaaaatgtaatttctctttttctcgatattttgagtgaatagctttatttcgagagatactttattttttgaaaatcaaaccaaacatttgtttgtaaaacattgctaaagcctttcttttgcctcttagaaaagaattttattcttttttggtacattcctcatcttatctcttttatccaccttaaatcgaaaatttcgtattcgctatttttcatttctccaaaagctttatctcatagctcaaattcttccgttaaagtataaaaaatctctaaaaagttggggttttttaagtttggcgtgtgcttgtctttgatacaagtcggcggctttgctgtcgggcggcggctggcgccgcccgacacccccgcgcttcgcgctcgggcgccgaagacaagcacacgcgagactgcggaataactaaaaatgagttacataaaagtaccaaagcttgaataaa

SEQ ID NO: 605 - DNA, 6148 bp, Unknown
  16S sequences of unknown bacteria
tttcataatagatgtccttttccacctccgggatttggccaccttgcccgtacagaaaagactttcctgttccttcggcccaaatttcagaaaaagtattgacatactgccttatccgtgctaacatgctcacaattgaattacatatcttttggggctatgcctcatacacaatggtagaggcgcaaaaaacatcagtatctgttcagatttcccggtctggccaccgctgagcaggagaaagggttttttgccgaagatgcagattccggcccgggaatttgtatctgggctggcggagaatatccgccggactgtcacagcaatgtggagtgctatcatcttttccaattttattagattaggtgccgatgcctctgccataatgcttcttctatggaagcattgtggcttttgccttttatggccacattaagattgcattgtgattcaagaacccacacggatgtgcaaaccaaaattgaaaaaattggaaggaagtaagacaatgatgaaaaagaaactgtttgccctgagctgcgctgcactgatgaccatgtctctggccgcctgcggctcccctgccggaaccccctcctctgaaggttctgccgacgaaaacaatgcctcctccggcgtggaagacggcgttctgacggtagctatggagtgcgcctatgcaccctataactggacccagaacgatgattccaatggcgctgtgccgatttccaacgtgtctggttcttatgccaacggctatgatgtaatgattgcaaaacaaatctgcgaggccaatgggtgggagctggaaatcattcagaccgactggggttctctggtgcccggcgtacagagcggaacctatgacgccgtgatcgccggtcagtccatgactgccgagcgcagcgaacaggtggattttgccggtccctattactatgccaccatggtctgcgtcaccaaggcagacagccccaacgccaacgcctcttccatcgatgagctgagcggtaccgctactgcccaggagtccacaatctggtataatgcgtgcctgccgcagatcaaaggcgcagatatccagaccgcggcagagagtgctcctgccatgctgatggctctggaaactggcacggtggatttcgtctgcactgatatgcccacggctcaaggcgccgtacgggcctatcctgatctcaagattctggacttctctggaactgacggcgattttcagttcaccgatgaagagcgtgccgaaaatgtaaacatcggtgtttctgtgaaaaaaggcaacaccgagctcaaagatgcgatcgacagcatcctgtccactatgacagctgatgatttcaatgcgctgatggacgaggctattgccatccagcccttgagcgagtaagcgtttctatggactgcggccgaggcgagggatcccgctccctcgcctttgcccctgttttgcggtgccgaaaagcgttccgcttgttttcggcatcggaaaacagggccatgcgccctgttcttataataaaaaaacgttcgtacattttccagacagagaatcttgaaaggagcatcttcgtatgctgcaaattttccttcagcaatgctcgcagctgggcacagacatttccacagtctggcagtcctatggcgggcaatatctcgccggcatgggcgctacgctgcgtctggcacttctggctacgctgatcggctgtatcattggctttttctgcggtatcctgaataccattccccattccaaaaacgacaacattgttaagcggttcatactgggtttgatccgcgccatcatccgggtctatgtggaagtgttccgcggaacccccatgatccttcaggccgtatttatttattacggactgccctattttaccggcacgctggtcaaatggcccgatatctttgtcgccgcgctgtttgtcgtatccatcaacaccggcgcctacatggccgagtcggtccgcggcggtttcctctccattgatcccggccagacagaaggcgccaaagcgatcggtatgacgcatgtccaaaccatgctctatgtgatcattccccaggcgctccgtattttgctgccgcagatcggcaacaatctgatcataaacattaaagacacctctgtgatgtttatcatcggctttggcgaactgttctctgtccaccgtggcgtagtcggccaaaattacctctatttcccttctgccgccatcgaaatggttgcttaccttaccatgaccctgatcgcctccattatactgcgttggattgaaaaacgcatggcgggcaagcgggactatgtgctggtgaaaaccggcagccgcaacgctgctgccggcaactacaattatcccgttaagggcagccccttagacgagcacagcaaagagcacgcccagcatgtccatcagacgcatcaggcacagatccagcatgatctgaaatatggccgaaacagaggggagcgctgaacatgagcgaaaacaaaattcttgaaatccgacacctttccaaagacttcggcagccacaaggtgctgcgggacattgatttcctggtacatcccggcgacgtgaccagcatcatcggcgcctccggctccggtaaatccacacttctgcgctgcattaacctgttggagacacctaccagcggcgaaatcctcttccacggtgagaatattatggcgtgtcgcggcggcgcccctgcctaccgcgccaaagtcggcatggtgttccagtcctttaatctgtttgacaacatgtcagtattgcgtaactgcatggtgggacaaaccaaggtgctcaaaaaaagcaaggccgaagcagaagaaaatgccatgcgctatttgaaaaaggtaggtatggatccctatatcaacgcccggccccgccagctctccggcgggcagaaacagcgtgtagccatcgcccgtgccctggctatggacccggaagtgctgctgttcgatgaacccacttctgcactggatccggaaatggtaggtgaggttctttccgtcatgcgggatcttgcttccgaaggcataaccatgctggtagtaacccatgaaatggcttttgcccgggacgtttccaatcatgtagtctttatgtgcgacggcgtgatcggtgaaaaaggtactcctgcagatgtgtttgagcatccttcaaatccccggatgatcgaatttttgtcccgtttccgcaatgcctgatacagttttgccccctgtgtttcagcagggggcttccttttttgtgtgctgtgcgttatactgctttgagaaaggtggaatgaggcttatgctgcgccgcattgctctgctgtgcctgctgccgctgctgctgtgcagcgcctgcggggaacctgtaccggaagagttttcctccctggaagaatcttctgcacctcagcggatcacaactatttatcccacatggagcacggacgatatttataccgccggagacattgttgttcacaacggcggctactaccgcgccctttggtggagccagggcaacgaacccaccgcagacacagagcgggacgaatggcagtacctgggcgaagtacctgtcaccggcgcctattttaatgatgtccccgacagcacatggtacgccgaagccattaacacgttggcggaggccggcattgtcaccggcgcaggcagcgggaacaatttctaccccagccgccccatcacccgcgcgcagttctccgtattgctctgccgcgcattgggaattgaaccgatagaaagcagcgattcttttacagacgccgccgatgcctggtatacgccatatctggccgctctgaaacagcgcggtattgcgcagggaggcgacgacaatctgtttcgtccggagcagcccatcacccggcaggaactgtgttgcctgatctacaatgccagcgatggctttgccgaagatcccgacaccgccctggctccttacagcgatcgggaaatggtcgcttcctgggccgtccaggctttgtcttggtgtgtagagcgcggaattgtggagggcaacggcagaaagctcctgcccgacgctactgcttcccgcgccgaagctgcgcaaatcatctacaacctgctccaacgggcacaatcgtaaacaacaaaaacagccggcagttctcgctgtcggctatttttttagaaaggaaaaaagattttttaaggaccttttaggattgcgctgcaccacttgtacgccgtacccacgctgctatactgtttgtggcatggagcggaaggaagtggaacctatgagtatatttcatctcaaatgcattgcgctggtgtgcatggttttggatcacatcggtttttatttcgaagccgcaccgccctggctgggctgtatcggccgcatttcgtatccgctgtttctgttctgcatggtctggggctatcattacaccaggaatcggaagctccaccttctgcgcctgtatcttctcagcatcggcatgacaattttcagctacaccctggacacgctgtttcccaccccaaacggatatggaaaccataatatttttttatctctgttccttgtgtgtctactcatcagcaccatcgaagggttccagcgcaatcgtaaacacggcttttttctgctgggtgtcatcgccgccgcacaggtcttttatttcctgctccccaacatcctccctttcacccgacagctgaaaggcgatttgctgacagggatcgtcccgaatctggcgctgaacgaatatggaccggcttttattgccctgggcgtcgccctgtattttctgcgggaaaaaaccgagctgctgtccgtggtatacattctgttcagcatcagccagtttagcagcgaaatgatcaacggcggcccggttacccagtggatgatgctgttcgccctcccgctgatgctgcgttacaacggcaaaaaaggcccgggcctgaaatattttttctatttcttttacccggcacacaccttctttcttttctacttggctaatttcgtatttgtataacggcatacatataaaaatgctacagcgtataaaaaacgcggcaggtaatgatcctgccgcgttgatcgttttaatcgtcctgttccctttcatattgcagcaccgcaccggtagatgcgtcgatttcgtaaccatactctatgccaccggatttgaattccacctcataatgggggatgcggtcatccagttcagattccacagacagatcgtatacgtctttggccgaaatacccgcatgctggagtgccgcagtctttgccgcctcgataccgatgtggttggccgccgcaccagcatcgccggatgaagccgtgtcctcctgatcctgttccacactgaggatcgcacccgttgcgccgttgatctcgtattcatactccgtgcggttgcagaaaaactccactttatattccagcacgccgtcgtcccaatccgtttccacacgcagtcccgaaacctggctttcgctgactccggcgtgcttgagggccgcctctttggctgcggcacttccgatgtcttttccttgcgttgccgtaccgcctgcagaggtgccatcgttccccgtggtctgctgcatcccctctgttttgtatttcacaattgcgccggtagatgcatccacatcacaatcatgctccactccctgaacagcaaactccacttcgtagaccatgacgccgtcttcatagtcaaagtccacttccagagcgctgacttgattctccgaaacgccggcgtgccggaatgcagctgttttggccgcttctgcgccgatataggcgctgtcgctggcctttccgctggtctgcaccgtttccggcagcaccatactcgtattggacgccagcaaattcagctcattgacgctcaggcccgccaacgcagcaaatgtcaaatggtcactgctctgtaccagcgtctcaatcagctgagccttgcccaaggaaataccatattcatccgcctgctgacgcagcgcttcgttttcctccacgctttgggtcagaatcgcggcattgagggatgccgcatccaaaatcgcttccacctctgtagtcagctcctgctgcag

SEQ ID NO: 606 - DNA, 23281 bp, Unknown
  16S sequences of unknown bacteria
gccggacggccatactgtttttgccggattgcaccgaaccagcctcctctgtggcgctgggccaggattgcaaagcggctcctgccgggtgatggtttatcacacccggagcaccggggcagagcagtgcataaagccttcagcgagttttgggtgcagcgtcacgctctctcaatccctcagtcggcgttcgccgacagctccctttgcacaagggagccgtctttgctgcttagtacacaaccggcctgcgttctgttgctcagcgcgggagcgcagtatggctgtccgggcaccggacccgcatagatatgtgacaggaggggatatctatggagcgtgcggggctgtatctgcggctgagccgggaggacggagaaggggagagcgggagcatcgaaagccagcgtctgctgctgcgggactactgccgcagccatcatctgacagtggtttcggaatatgtcgacgacggctattccgggctgagtttccatcgccccggctttgagcaaatgctgggggacattgaaaaaggcctgctggataccgtcctcaccaaagacctgtcccggctggggcgggactacatcctcaccggccactacctggaacggtacttcccggaaaaaggagtgcggtacatcgccctgggggacaacatcgacaccggagcgggccaggacgacctgacccccttccgggcggtggtcaacgacctctatgcccgggacatctcccggaaggtgcgggccgctctggacgcccggaagcgggccggggtctttatcggcgctcgtgccccctatggctatgaaaaagaagaaggcagactgcgtgtagatccacagcagggggagtgggtgcaaagaattttcgcctggtgcctcatgggagacagctgccctcagattgcccggaagctggggcaggccgggtgcccttcccccacggggaagggggagtggagcggggccatggtgcggcgcatcctcacaaaccccacctacaaaggggacctgacccagaaccgcagccggaaaatcagctgcaaggtggaaaaaagccggacggtgcccaaggaagggtgggtgatctgccccggggcctgcccccctctggtgggggaggaggactttgcccgggtgcaggaaaaaatggaagggagcaggcggcaaaaagaccccctggcctccttcctccgctgcgccagatgcggcagccccatgggcatcaccggagacggcaagcgccgctatctcgtctgccgggggcgaaaaaaaggggagtgcaccctgcctttgatcccctgggacaaggccatggaagaaacccgggcggctttgcgccgggccggagcagaggttgattttcagcggccattcccatgccctggggccctcatcggggaagatggggtggcgcttttgggggactatggggggaatcggcccgtttgagggcgagaaattgtccctttccacaaaaaaggccccttttgcgaaattcctgttgaacttatggcaaaaagaaagtaaaatagaggtagttattgcaatcgggagagagagggtgcaggctgctatgaaaaagtattttgccattctgatgggcgaaatccaggggccttgtgcgcccacattttcccgggtgcagggatgaaaagctgtggagttttcgccgcggcttttttcttttcaaaaatccaccttcggagaaaggaagttttcccatggaaaaaaataaagtagccattatcatgggcagcgacagtgacctgcctgtggtggaaaaaaccatccacacgctgaaagacctgggcatcccctttgaggcccatgtgatgagtgcccaccgtaccccggaagaggcctgcaccttcgcccgggaagccgccggcaagggctttggcgtcatcatcgccgccgccggcaaggccgcccatctggccggtgtgctggccgggcatacacccctgcccgtcatcggcatccccatgaagagctccaccatggatggtctggattcccttttgtccaccgtgcagatgccctccggcgtgccggtggctactgttgccatcgatggggcggaaaacgccggactgctggccgcccagatgctggccatctctgatgacagcctgttccgtaagctccaggaaaagaaagagcagatgcggcagaaggtcatggaaaaagacaaaaagctccaggaaaagctccagggctaacaaaaccggatacacaggatacgaggaggaagtttatcatggaaaagcgcgagcagctctacgaaggaaaggccaagaaggtttttgcaacagacgaccccgaaaaactgatcgtctcctataaggacgacgccaccgccttcaacggcgaaaagaagggcaccatccacggcaaaggcgttatcaacaaccggatgagcaatcatctgatgcgccgcctggaaaaggaaggggttcccacccactatgtggaagagctctccggcaccgataccgtggtgaaaaaggtaaatattgtgcccctggaagttatcatccgcaacatctccgccggttcctttgccaagcggtacggcgtggaggagggcatcgtctttgacgctcccaccatcgagttctcctataaaaatgacgacctgggcgatcccctgatcaactcctaccatgccctggccctgaagctggccacccgcgaagagatcgagaccatcaaaacttatgccttcaaggtcaacgaccttctccgcggcttcatgaaggagatcggcatcgatctggtggacttcaaactggagttcggcagactctcggacggcaccatcgtcctggccgacgagatcagccccgacacctgccgcctgtgggacgaaaagacccatgaaaagctggacaaggaccgcttccgccgggatctgggcggcgtggaagacgcctaccaggaagtgatgaagcgcctgatgggcgaataagcggaaaatgacggaggaggaaagtcttatgcaggaaaagctccacgaggaatgcggcgtttttggtatttacgataacgacaacctggatgtggtcacatccacttatctggccctgtatgccttgcagcaccggggccaggaaagctgcggcattgccgtcaacgacgacggcgtcatccgcagttaccgggatctgggtctggtcaccgatgtgttcaagccccaggtgctggaaaaactgggcgccggcaaaatggctatcggccactgtctctatggcaccgccgaaagcgacaagcgggaaaatgcccagcccatgaccatccgccatgtgaaaggccagatggccatcgccaacaacggcgtggtgctcaatgcctatgagctgcggcagaagctggagctccagggcgccattttccattccaccagcgatgcagagctgatcgcccacatgatcacccgggagcggctcaccgccggttccatcgaagaggccatctgcaacgccatggacaagctgtatggcgtgtattccatgctggtcatgtcccccaaaaagctcatcggcgtgcgggaccccctgggtatgcgccccctgagcatcggcaagtgcgaaaacagctatgtgctggcttccgaaaccgccgctctggacagcatgggcgcccatttcgtccgggatgtgaagcccggcgagatcgttatcatcgacgaaaacggcctgcgcagcatcgaaaagcactgcggcaaaaagagccatctgtgcgtctttgagttcgtctatttcgcccggcccgactcggtgatcgaaggcaccagcgtccatctggcccggcagaagatgggcgaattcctggcaaaagagcatccggtggaggccgacctggtgatgggcgtgcccgacagcggcaacgacgccgccctgggctatgccaacgcctccggcatcccctatggcatcggtttgatcaaaaacaagtacatcggccgtacctttatcctcaacacccagaagcagcgggaaaatgccgtgcgcatcaagctcaatgccatcgccgacatcgtccggggaaagcggattgtgctggtggacgactccatcgtccggggcactacctccgcccgcatcgtgggcatgctgcgggaagccggggccaaagaagtgcatatgcgcatttcctccccgcccttccgttatccctgctacttcggcaccgacatcgactcgccggagcggctgattgccaacaacatgaccatccccgagatcggcaagaagatcggggtggattccctgggcttcctcagcctccagaacatcgtcaaggtggcggaaaactccgactgccagttctgcaccggctgcttcagcggcgaatatcccctgaatgtggaaaacgctggcaaggtctccaagtttgaccggaagatcagcgaaaacaacgattgagaggacggaacatgaagagttttagcgacagctataaggccgccggcgtggatgtgacggcgggatacaaagcagtggagctgatgaaggagcacaccaagcggaccatgatccccggcgtgctctccggcctgggcggcttcggcggcctgttcggcctggatgtaagcggcatgaaagaaccggtgctggtttccggcaccgacggcgtgggcaccaagatccgcctggcccagctgatgggaaggcacgacaccatcggcatcgactgcgtggccatgtgcgtcaacgacatcgtctgcgccggcgccaagcccctgtttttcctggattacatcgcctgcggcaagaatgtgccggagaagatcgcctccatcgtttccggcgtggccgagggctgcgtccgttcgggctgcgccctcatcggcggcgagaccgccgagcaccccggcgtcatgcctgacgacgactacgacctggcgggctttaccgtgggcgtggtggacaaggagaagatcctggaccaaagcaatgtaaaggaaggggacgccatcatcgccctgccttccagcggcattcacagtaacggcttttccctgatccggaaggtgttcgatctggaagggaagggggacttctattcccccgagctgggtggcaacctgtttgaaaccctgctcacccccacaaacctctatgtgaagccggtgctccatctgatggaccgggtgccggtgcactctgtgtgccacatcaccggcggcggcttctatgagaatatcccccgcgctctgccccagggcctgagcgccaagatcgaaaagaagaatgtgcgtgtgctgcccatctttgacctgatcgcaaaagaggggaatgtgtctgagcacgatatgttcaacacctacaacatgggcgtgggtatgtgctgcatcctgccttctgacaaggcggacgaagccatccgggtgctgaaagaaatgggccaggatgcctatgtgctgggcgaagtggtgaaaagcgacgagggcgtgattctgtggtaaagatcggcgtgctggtttccggcggcggcaccaatttgcaggccctgctggatgcccagaagcggggagagattccggatggggagatcagtctggtgatcgccagccggaaaaaggcctacgctctggaacgggcccagatggcgggggttcccgccctggccctgccccgccgggactatgaaacgacggcggactatgacgcggcgctgctcacggccttgcagcaggccggggtggagctggtggtgctggccggcttcctctgcgtgctgggggagaagatgctgcgtggctatgaggggcgcatcgtcaatgtgcacccctctctgatcccggccttctgcggcgacggcttctatggcctccatgtccacgaagctgccctccggaggggagtgaaggtcaccggggccacagtgcatctggtgaacgaagtgaccgacggcggccccatcctgctgcaaaaggcggtggaggtgctggaaggcgacacccccgaaagtttgcagaagcgggtgatggagcaggccgaatgggtgcttttgccccaggccgtttccatgctctgccagaagatcgaaaaggagaaacagcaatgaatatttacgccaaagagtccctctttgacaagctgaaagacaatacctaccccggccggggcattgtgctgggcgtcacccctgacgggaagcactcggtggccgcctatttcatcatgggccgcagcgcaaacagccgcaaccgggtgttctgcaaggaacccgacggcatccgcacagaggcctacgatccttccaagctggaggaccccagcctgatcatctatcatccggtgcgccagatgggccgtggcctgatcgtgacaaacggcgatcagaccgacaccatccgggactttctggaaaaaggactgcccatggagcaggccctgcgtacccgggagtttgagccggacggccccaactggaccccccggatttccggtcttttaagccccgacggcagctgcaaaatgtccatcctgaaaagcgtggacgaaaatggctcgggctgcgtgcgccagacctttgaatatcccaatgtgcccggcctgggcttctttctccacacctatgtgcgggacggaaaccccatccccaccttccagggtgagccggagcgggtggaaatgctggacgacatggatgctttcacccaggagctgtgggagagcctgaacgaacagaacaaaatctccctttatgtgcgctatacctgcctcacgacaggggaataccgtgagcgcatcatcaacaaacgccaataaacaaaaggagtccgaaccctatgaacgagctggaactgaaatacggctgcaaccccaaccagaagccctcccgcatctatcgggccgatggcggggaactgcccatcaaggtgctttgcggaaagccgggctatatcaatttcctggatgcctttaattcctggcagctggtgcgggagctgaaaatggccaccggcctgccctcggccgcttccttcaagcatgtgtccccggcgggcgccgccgtgggcctgcccctgagcgaaaccgaccggaaaatctattttgtgcccatggaaaaagagctcagccccatcgcctgcgcctatatccgggcccggggcgccgaccggctctgttcctatggggactgggcggccctcagcgacatctgcgacgccgacaccgcccgctatatcaagcaggaggtctccgacggcgtcatcgccccgggctatacccccgaggctctggaaatcctcagccagaaaaagggcggcaaatacaatgtggtgcagatcgaccccgactatgtgcctcagaaaaccgagcacaaggatgtgttcggcattacctttgagcaggggagaaacgatctgattattaacgaagagatgctccagaacatcgtcaccaagaatcgcgaactgccggagagcgccaagattgacatgatcgtggccctgattacactgaaatacacccagtccaactctgtatgcttcgtgaaaaacggccaggccatcggcgtgggcgccggacagcagagccgcatccactgcacccgcctggccgggcagaaggccgacaactggtatctccgccagcatcccaagaccctggggctgcagttcgtggacaagatccgccgccccgaccgggacaatgccatcgatatttacctctccgatgaatacgaggacatcctccaggagggcgtgtggcagcagaccttcaaggctaagcccgagcccttgacagcagaggaaaagaaagcctggatcgccacccaaaccggcgtcaccgtgggttccgatgccttcttccccttcggggacaatgtggagcgggccagaaagagcggcgtttcctacatcgtggagccgggcggctccatccgggacgatcatgtgatcgaaacggcggacaaatacggcatggtcatggccttcaccggcctgcggctgttccatcattgatagaaaaggggagtgcgacatgatgaaccttctggtgatcggcggcggcggacgggagcacgccatcatcaaaaagctccgggaaaacaaacaggtgaagaagatctatgctctgccgggcaacggcggcatcggtgaggacgcccagtgcgtccccatcaaggccaccgatgtggagggcgtgctggaatttgccaaaagccacaaggtggattttgcggcggtgatccctgacgatcctctggccctgggactggcggacaagctgcgggagatgggcatccccaccttcggccccaccgctcaggcggcggaaatcgaaagcagcaaggtctttgccaaaaacctgatgcagaaataccacatccccacagcggattaccaggtatttgaccaggcggaaaaggccatggagtatatcaccggcaaaaacaaatacccggtggtcatcaaggccgacggtctggccctgggcaagggcgtcatcatcgcccaggatgcccaggcggccaaggaagccgtggaagccattatgaacgagaagatcttcggcaaaagcggcgaccatgtgatcgtggaggaatttttgcaggggccggaagtttccgtcctctccttcaccgacggggaaactctccggcccatggtcacctccatggaccacaagcgggcctatgacggggacgaaggccccaacaccggcggtatgggcgccgtggcccccaacccctattacaccaaagaagtggccgaaagatgcatggaggaaatcttcctgcccaccatccgggccatgaagcaggaggggagacccttccagggctgtctgtatttcggcctgatgctcacagaggacggccccaaggtcatcgagtacaactgccgtttcggcgatcccgaaacccaggtggtgctgccccttctgaaaaccgacctgctcaccatcttccaggcggtgatggaaggcaagctgagtgagcagaaggtggaatttctggacaaggccgcctgctgcgtcattctggcttccgggggctatcccaagaattattacaccggcctgcccatctccggcatcggggaggcggagcagatggaggatgtgtcggtctatcacgccggcaccaaaatggaggacggcaagctgctcaccgccggaggccgggtgctgggcgtcaccgctttggcaaatgatctgcccggagccatggaaaaggcctatgaagccgccgggaagatccattttgacaatatgcattaccgccgggatatcggccggcgggcgctttccatgaggggggaataaccatggccgtttatcgagtttatgtggaaaaaaagccgggctttgaccaggaagcccgccatgtgctggaggagctgcaagggctgctgggcctgacgggcctcaccggcctgcggctcttcaaccgctacgatgtggagggcatcgggagggagctgttcgatcagtgcatcgacaccgtcttttccgagccccaggtggacaccgcctatgaaaccctgccggagctgagcggccccgtgctggcaacagaatatctgcccggtcagtatgaccagcgggccgactcctgcgcccagtgcatccagttcgtctcccagggggagcggcccgccgtgcgcaccgcccgcctctatgctctggaaggggagatttcccagcaggagctggaaaaggtggaaaagtacctgatcaacccggtggaaagccgcaaggccacgctggacacctttgacaccttgcaggtgcagtatcccgccccccagatggtggagaccatggaaggcttcaccaggctggaggacgaggggctaaaagagtttatcgcaaaatacggccttgccatggacctgggggacatccgcttctgccgggattatttccgcacagagggaagagagcccaccatcaccgaaatccgcatgatcgacacctattggtcggatcactgccgtcataccaccttctccaccatcatcgatgatgtggagatcaaagatgcgggagcaaaagagagctacgggatgtatgagggcctgcgggagatcgtctaccagaaccggagcaaaaagcccgtcactttgatggacctggccaccatcggggccaagtacctgaaaaagatgggcaagctgcccgagatcgacgagtcggaagagatcaacgcctgctccatcaaggtaaaggtggagaccgaggacggcagcgaagactgggtgctcatgttcaaaaacgagacccacaaccatcccaccgagatcgagccctttggcggggccgctacctgcatcggcggcgccatccgcgaccccctgtctggccgcagctatgtgtaccaggccatgcgtgtcaccggtgcagccgatcccctgaggcccatggaggaaaccctgcccggcaagctgccccagcggaagatcgtccagacggcggcggccggttacagctcctatggcaaccagatcggtctggccaccggcctggtccatgaattctaccaccccggctatgtggcaaagcgcatggaaatcggcgctgtggtgggtgcggctccggcggagaacatccggcgtgagcgtccggctcccggggatgtgatcgtcctgctgggcggccgcaccggccgtgacggctgcggcggcgccaccggttcctccaaggcccacaccgtggagtccctggagacctgcggggccgaggtgcagaagggcaacgcccccgaagagcggaaaatccagcgtctgttccgcaacaaggatgtcaccgccatgatcaagcggtgcaatgacttcggcgcaggcggcgtgtcggtggccatcggcgagctggccgacggcctggatgtggatctggacaaggtgcccaagaagtacgagggcctggacggcaccgagctggctatctccgaaagccaggagcgtatggcggtggtcatcgccaaggaggacgaggcccgcttcctggaagaggcggggaaggaaaacctggaggccacggtggtggccgtggtcacccaggagccccgtctgcggatgcactggcagggtaagaccattgtagacctgtcccgggcgtttctttcgtccaatggcgccgaaaagcacatcaatgtggtgatcgaagcgccggaagagctgaaagaggaaaccacagagcccaccgccgaaaactacaaaaaggtgctgggacggctcaatgtgtgctcccagaagggcctggtgcagcggtttgacagcaccatcggagggggcaccgtgctcatgccctttggcggcaggcggcagatgacccccacccaggtgatggcggccaagctgccggtactgggcaaagagaccaagacctgctcggtgatggcctatggcttcgatcccttcctcagcgaaaagagcccctatcggggcgcttatcaggctgtggtggaatcggtgtgcaagctgtcggcagccggtgcttcctataaggattgctacctgactttccaggagtattttgagaagatgggccaggacccctcccgctggggcaagcccatggccgctttgctgggcgctctgctggcccagaagcagctggaggccggcgccatcggcggcaaggacagtatgtccggctcctttgataaaatcgatgtgccccccaccctggtgagcttcgccattgctcccgcctgcactgatcgggtgatctcccccgagttcaagcagccgggaagccgtgtggtgctgctgggggttccccagaacaaggaggggctgtttgaagaagaggacctgcgccataccctggagcaggtggaagagctgatcgcccagggcctggtgcgcagtgcctatgtgccctccttcggcggcgtgggcgctgccgtggccgtgatggccttcggcaacggcctgggctttgcctttgacaagggctttgagggtgtgttcgacacccgccggggcgcgtttgtgctggagctcagcgagaatgctcccatggtgggcactctggtgggccacacccagatgaaggccagcatcgctttgccctccggggaagaagtggagctttccgctctggaagaggcctggaaggccactctggagccggtgttccccgaaaagaccaaggaagagggaagtgtgcccgccttccgctttgagacggaaaaccgcaaggccccggctgtgaaggtggcgaaaccccgggtgctcatcccggtgttccccggcaccaactgcgaatatgacaccgcccgggccttccagaaggctggggccgagccggaaatcctggtgctgcgcaacctgaccgcttcccagctgacccagtcggtggagcggatggtgaaggccatggcggagagccagatcatcgccattcccggcggcttctccggcggcgacgagccggaaggctccgccaagttcatcaccgccttcttccgcaatccccaggtgaccgaaggggtgcacaagctgctgaaagagcgggacggcctgatgatcggcatctgcaacggcttccaggccctgatcaagctggggctggtgccctatggcgagatccgccgcaccactgccgaggatgccaccctgacctacaatgtgatcggccgccaccagtccggtctggtgcgcaccgccgtttgctccaacctgtccccctggctgatgctcagtgaggtgggggatgtgcacaccatcgccatttcccacggcgaaggccgtctggtggctccccagagcctgctggataccctggcggcaaagggacagatcgccacccagtatgtggatctggaagggaagcccaccatggatgtggcttataaccccaacggttccttctgcgccatcgaggccatcacctctcccgacggacgggtgctgggcaagatgggccacaccgagcgtttcggcgacaatctgtataagaatgtgcccggccacaaggaccagaagctgttcgaaggcgctgtgaagtattattctttgtagcggagtgcctccgcggccgttcctctctttgcccaggcaaatacaaccggcaaaggcaaagagagtatgggtgtccggccaccggaccgctgccgcgctgggcaatcgaaccaggaataaagcaaaaaaagacctcccgacagggaggtcttttttgttgtgtgctttgccaggactgcactctggctgcttccggcggagccggagcaccgagggtcacagcgcatcaagccggggaggcccagtgcctgggcaggcaagcggtgcttccgcaccgggcaacagagcgaaggttggttggaatagcccggcttcacaatcccccctgcatggctttgccatgctgtcccccctttgcacaaggggggctgcggagtgcctccgctcccatactgcgctgccgcgctgggcaatcgaaccagggccggttgtgtccacttggcaaggattgcacgctggcccctaccggtgttggctcgccagcaccggagcacaggagcaaacaacgcatacagccttcagcgagttttgggtccagcgtcacgctgggtccggccaccggaccgctgccgcgctgggcaatcgaaccaggtataaagcagaaaaagacctcccgagagggaggtcttttttggtgagcactgggccaggactgcactctggctgcttccggcggagccggagcaccgagggttacagcgcatcaagccggggagggtatggccgtggcggctcgccactacaaaatttgggccaccaggtcggtgagggtggggaacaatgccaccaccacgatcatacgcagggtctgcatggcggccaccttggccggatcggctcccagctcggcggcgatgatggacatatcgctcaccccgccgggggccgaggcaaacagggaagtggtcaggcccagcttgccgaaccgggacaccgagaaccccacaatcaggttgatgcaggccagggccagcaccagtatcaccgcaggaagggccacctgccgtagtcccagcacctccgccatgcccatgcccgagccgatgatggccccgctgaaagtctgggtcacattgcggaaattcttgggcaactgtacccggtgaccggaaaaggtgagcaccatggcccccagcatggccccgatcatggccccggaggggatatccagagcgttgaacagcagtccgccgatgagccccgccaccgccagggccaggtattgctttttggaatagctctccttgggcagggcagaagggtccaccggggttacctccggttgggaaccgtggctggcggcccgcttgagcaaggcaggcataaaagcaatgacgaagatcaaccgcaccgtttgcaagatagccacctgtcctgcatcggcccccaggtcatcggccaccagggtcatttcctggatgcctcccggggccgcggccagaagggcggttttggggtccagctggctgacggcgctgatgccgatgcccacgcacagattgaggaaaatcaatccgaacaccatcatgatggtggcggggaggatggagcgcaggctgagcacatccttggcgctcatgcgggtgccgatatagaccccggccatgatgcggatatagggccggaagggatcgggcacattggcgcagtcccacagaatgttcatgatgagcacggcgatcatggcgccgatgatggtgccggcgggcaggcgcagtttgcggccgatgaagccgcccagagcggccacggccacggtgagcagaaaggttggcatagggcatcttcctcttttcccagtgagattgtttctgttatcagtatagcacagggccggggaaagggggcccaatcccggcaaatttggcaaaatagcaggaaatcatagcaatttacacaaattttacgggggcgtttccctgggtaaaaaatccagggggggctgatttttccgccctggagaaacagggggtactctgtcggaaagccccgggcctgccgggaacatacgcacccctcagcgccgcccgggccatccgggatacattgcacaccatttgggaggaggaaattggatgatgaaaaacaagaacatcggctttgggatcaccggctccttttgcaccttccaccggattctgccggtgatggaggagctggccaaagagaatcaggtctatccggtgctgtctccggcggcccgggagtgggatacccggtttttcaaggcgtccgagttccgggcggcggtggagggcatctgccagagggggagcatcaccacggtggtacaggccgagcccatcgggcccaaaaagatgtttgacatcatggtcatcgccccctgcaccggcaacaccctggcaaagctggccctgggcatcaccgataccccggtgctcatggcggccaaggcccatctgcgcaatggcaagcccctggtgctggcggtgtccaccaacgacgctttgggggccgcttcccggaacatcggggagctgctttgccgccgggatgtgtttttcgtgccctttgcccaggacgatccggtgaaaaagccccggagcatggtggccctgatggagcgcatccccgataccctggaaaaggccctggaaggggagcagatacaaccaatagtgccataacacccgctgcggcgggtgtcgccccaggcttcttcccagcggcgaaagccgctgggccagcgtgacgctggacccataactttctttgcctttgccggttgtgtttgccagggcagagaaagtatggccgtccggccaccggacttccccgacctttttccagcctcccggcggggcccgataggtgccaagtgccacagaaagagctgggaagattggttgaagcagggcaaagagagtatgactgtcagacgcttggccaggactgcaccttggccccttccgggtgatggtttatcacacccggagcagaaagccgggcaacgcatgatgccggagacaggaacgggagcggcgcaagccgccacccccctttgcacaaggggggcgtctttgcctgggtttgttcaaccggcccatataacaaaaagcctcccgagagggaggcttttttgttatgcacttggccaggattgcaaagcggccctttccggcggagccggagcaccgaagatggtaacgcatccagccggggagagtatgggtgcagcgtcacgctgcttaggacttgacgacgacgccttccttcataacgaagaggcagttctgcatggtcttcacatcctccatgggatcgcaggaccaggcgcacagatcggccaccttgcccttttccacgctgccctgggtcttgtccacgcccagcaccttggcgttggtcatggtagcggccaccagagccttgtgggggtccatgccgaaacgctggagcagctcgaactcatagccctgcttgccgtggtagttatagggagtggcggagtcggtgccgaaggtgatgggcacgcccttttccaggcactgacggaagccccattcgtgatgggacagggcctggttggccttttccaccatccacggggtcagacccatctccgggcccttgacgcagatgcgctcggcggcgatgatggtgggggtgaggtaggtgccgtgctccagcatcagctggatggcttcctcgtccaggatcatgccgtgctccacggtggtgacgccggcccggacggcggccttgatgccgttggtgccgtgggcatgggtggcggtgtggacgccatacagattggcgatctcgatgatggcggcgatctcatcgtcgcacagctgctgggcgcccagggtggtgcccttgctcatcacgccgccggtggacatgaatttcaggaaatccgcgccgttcttcaggttgaaacgggcggccttccgggcggagtcggggccgtcgatgatgggatgctcttcggcggtgcaggtgacgccgggggcatagtggctgtcggcatggccgccggtggagcccagggagtagccggagacaaacatccgggggccttcaaaatcgcctttgttgatggcgtcacgcagggccacgctgacaaaagcctggctgccgcagtcacggagagtggtgaagccggcatacaggtcctgctgcacgttcttcagggaatagagggtcagctcagcgggggtgtgatggagcaggtccatccggtcattgccttcgccgttcatgccgctgtggacatggaggtcggtgaggccgggggtgacgaatttgtccgaaaggtcgatcacttccatatccggctcctgggcaaactcccgcaggtcgatcacatcataaatggtcttatcctcgataatgaccactttgtcctccagaaccttgcagttctgcgtgtcgaagagcttgccgcatttgatagcccgtttcatggcgttcatcctccaatgcatctagttttttttcggggtatttccccactgaaaaacagtataacatattgaacgcgctttgaaaagtcccgtggcagcgtgacgctgcacccgttcctgtctccggtggggatgcgctgtcaggccttattgctccgggtgtgataaaccatcacccggtaggggccagtgtgcaatccttgccgagcggacacaaccggccctggttctgttgccgggcgcgggagcaccgcagccccccttgtggcggcgtggcgccgctgccatatcaggggggattgcaaagccaggcaaatgattcagctgggtgctgtgatcgggtgcgggagcaccgcttggccgtccggacaccggaccgggagcaccgcttggccgtcccgacacgggaccgggagcaccgcttgggagcggaggctcgccgtcaatccctcagtcggcgttcgccgacagctccctttgcacaagggaggtccggtggccggacggccatactgtctttgccttggctcgttgtgcttgcctgggaaaagagagtatgacagcccaggcatcgggcttgcccggtgcgggagcaccgcttgggagcggaggcactccgcctatttggggagcatgcggtagaggaggatcactggcggggcgcagagcagcaaaaggaaataaagggcgtgttcccgattgttttccaggtcatagacatccagcacccgcaggccggtgaaaagagtgagcagcacataaacaacgatcccggcccaaagccacacccgccaccaaagggcgtcggaaagagtccattccgaaagggtataggggaccaccggggcgcagaaaaggaggaggccgtacagcacaggggtgttgatcttatccatgagaaagcggaaccagggggcgtcactgagtttttgccggaagctctggaatttttctttcatgggaaaacctcctttctttctatgggtacagtataccatatcctggagaaagcgcaacaagaggtgcggataacagagcgaaggttggttgaatgcaatcggccaggactgcacgctggtcccttccgggtgatggtttatcacacccggagcaccggggcctgacagcgcatacagcctgggagagttttggccgtcccgacacgggaccgggagcgcagtctggccgtccggacaccggaccactccgccttgaaatggggagggaattttggtatactggagaaaacccgcagaaaatggggaaggggaggatttttttatgatcgctgccaacttgggaaaattcttttcttgggccaatgcctactgccggcaaagctgctggaaagacctggccctcatcaaattctgcctgtgcgccgcaggggtgcttgtgggactgtgcgtgcccccggaaaaacggaaaaaagccgccttgggtgcgctgctggttttcctcgttacttatgtgcccctgatgctccgcttcttccaggtggtgaaggaggaacaggcggccgaagaagaggacgaggacgactacctggattattgcgaaattgacgaagactaaaactgccgccgccgagcccaatgcccggcggcgcttttcaaaacaggggaaaggagccaggatatggccacagaacaggagctgaaagacattttgggcaaggcccagggggaagcgctggccgtgctgaaagaggtgcagcgggaagtggtgggcaaggatggcgccatcctgcgcatcctgctggccatgctggcccggggccatgtgctgctggaggacatccccggggtgggaaaaaccaccctggccatggccttctcccgggcgctgggcctgtcttataaaagaatgcagttcaaccccgatgtgatgccctcggacatcaccgggttttccatctatgaccaaaagacaggctccttccgctaccaggaaggggcggtgctctgcaacctctttctggccgacgagatcaaccgggccgggagccgcacccaggccgcactgctggaggccatggaggaaggggccgtgacggtggacggggtgacccggcccatccctcagccctttgccgtcatcgccacccagaaccccaccggctcggccgggacccagctgctccccgactcccagctggaccggttcatgctccgcttctccctgggctaccccagcttcgatgccgaagtggagctgctgcggcggaaaaacgaggggaacattcagcgggcccagcaggtgatggacgccgatgccttgcagcaggcccagaagcaggtacggcaggttttcatcagccaggaagtctatgactacatcgtccggctggtgggggctacccgcactgatcccggcctgcgccagggggccagcccccgggcctccatcgccctgacctacctggcccaggctgtggccttcctccaggggcgggattatgtggtgccccaggacgccgctctccttttccaggaggcggtggcccaccgtctgctgctcactcccgccggagaggcccggggcctgaacgccccaggggtgctggaggacatcctccagaaaacaccccggccccggctgcggtgatggtgctttgttggctgcgctacggaatggggctctgcggcgcagcgctattttatgtgctcttccccggctggctggggggctatgtgctggtgctcaccctgcttctgcccctgttcagcctggcccttagcctgcccaccgcccttttgctgcggggggaggttctgctgccgccggaagggggaagaagaggcacgccctgcccggtgcgggtgcatctgaaggccccctggggcctgcctttagcaagggtggcctttcagctggagtatcagaacctgttcagcggccagaagggccgggaaagccattccttccccctgatgagcggagaggaatgggtggaaagcgcctttacctcccggagcttcggcgtggtgcaatgccgtctccggtatttccggggttatgatctgctggggctgttccccatcttttcccggaaagggggagagggaacggtactgtgccatcccgcaaaggccgagggcctgggaatgcggggccaagacgccggcggcgaaggggacgagggcaaaagccccaccggcggggaagtgcggccttacaaaccgggggacagcctccgcagcattcactggaagaactcggcccggctgcaaaccttgctggtgcgctcggaggggggcggccgcgctggcgctgtggtggcctttgacctgcggggaacgccggaagggctgcaaaacaagctggaccgggcctttggcctgctcacagagctgctggggcaggagatcgcctgcctggccatggtgcgccagggtggaggagaggtgaaccgcttcccggtggaaaataaggaggatctccagaagctcttctggactttgggagaaaaaaagcccgctccggccccccaggaggccgaaagcccctttgagttgcccgaagggctgagtttctggctgggggatgaggaagaaggggaggtgcagccgtgaccaccagggaaaaagtgctggccggggtgtgggagaccctctgcgccctttgggggctgtttgcggccctgtattgcttcctggatctgctgcccatgggggtggggtttctccggatctatctccctgccgcctgggtgacccttttgatcctttgcctcctttggctgatgaaaaagccctggcgggggctattggcgctggccctgctgctcatggcttactgcctctatgacccggaaaaaatcatccagggcggcgcccaggtggggtgcagcctgagcgaagtctattcccagcacatcgatggggtcaaacagttttaccccctccaggatctgctggtttctgaggcccggcgggtggccgagcactttctcactgtgtgctttggcctggtgggagggctgctggcttttagtttccactaccggtggtttgttccggcctttctgcccttgggcggggtcattctggcccaggccctggtgctgcgcaccccacctctgtgggctctattttccatattattctttcttttgtggctggctttttgtgcccatcatgcccgctcccgggcggccttccgccagggagccctgctgctgcccggggtggcgctgctgttgtgcctggcctgggtgctctgtccccgggagggctaccagcgctccccacaggtggaaagcctgcgtttgcagctcaatcagctggcaaacggcaaccgggtgagcctgaatgtgctcatcccctttcaggggcagaagggccggagccagctgaacgacaccgggcggcttcagttcaccggggaaaccgccctgcgggtctattgcacccagccgcaaaagctctatctcaagggcttttccgccgaccggtacgaaggagaccggtgggcccagagctctgcgctggaatatgacgcccttctgggtcagctggagttttcccccttcaccctgacggcccaggccatgcgggccacctggcccgagaccgcctcctatgaggtgcaggtggagctggtggcgcccaatggcaattattactaccttccctatggcatggtgagtttgcagaatgagggagagagcctgacccgggtgaaggacagctacatgaattccatggggccggggacccagtatgccgtctccgccgtggccctgcccgactggagccagaaccagagcctgtctttgccccagagcctggcggtggccgaaagccaataccagcaatatgcccaggatacctgtctccaggtgccggaggagctggaggactggctgactgagctggcctattccatcgtctccccggaggatacgctggaaaccaaggtggacaagatttccgcctgggtgcggcaggccgcccggtatgatgccgctcccggcacggtgccccccgggaaggactatgtggagtacttcctcaccgagaacaaaaagggctactgcatgcactttgcctcggccggggtactgctgctgcgggcggcgggggttccggcccggtatgtggaggggtatgtggtaagcgagggggacatcacccccgagacctggctggcggtgcccgacagccaggcccacgcctgggccgaggtctatgtgcccttcctgggatttttgccggtggagatgaccccgggttatggcggggccattccccagcaggccgaagtggtgcccgaagagccggaggaggttccggaagagataccggaggaaacgccggaagaagtggaaccggcgccggaggaaattccggaggaaacagagccggaaacagaggagccggaagaagaacttccggaggaggaagcgaaacagagcagcccatggccccttgtgattctgttggggttggtgctggtttcagccgggggaggatggctttggttccggcccctgttgcagcggcggcgggagacccatggcagcagccggagccgggccgcggccatttaccgccgcatccaggcgctggaaaagtatgccccggcgccgccccgggccccggagcttgcggacaaggcccttttcagcaaaaacgggctgagcgagcaggagctggcggagttgcgggagatcgcagaccaaatgcagcggcagcgtgacgctgcactcaaactgcgcttccggtggcgagccgccacggccaaactgcgctcccgcaccaggcgatagaacgggggctggttgtgtcccccgcaggcaaagacggctcccttgtgcaaagggagctgtcggcgaacgccgactgagg

SEQ ID NO: 607 - DNA, 3843 bp, Unknown
  16S sequences of unknown bacteria
gtattttctgttacctttctccttaatcaaactgtttcccttgttgacatatacacgccgggggttccccaatgcggcgcacagcgccgcatatagtagcctcttttgtccatttgctatcctttaacggcctttttgacagactgcgaaaaacgcggcagcgtttttccctgacgacattacagcataaagtccctgccaaaaatacagacatcccggcattttcaggaaagcttcatgtttttatccaacggaatttctcttatttcccatccgataccgtaaccgtaccgtcggcggcgacctctatcgtcatgccgtcctgcacataggcgaggaattcctcccccagcccgtctacggtggggatgctgtggggggtccatacgtcggcgaggatcgcgcccgcggcggcgagggaatcaatcggcccggagaacaggagcgcggccggagccgctcccatcgcggcggcggtgtggatcaccagcccgccggtggtggagccgatggtctggggcagacagagcgcccggccggacagcaccttgttgtacaggtcggggttgttctgatcgctgcagaccgcttcggtctttttggcgagcaggcttttctgaaagctggcgagggtgttgaacccgccgtgggagaccaccgcctccgccttgacggcgcccggcacgaccacccggccctgaaataccttgttcatgttcttacctcgcttcctttccgccgctgatgattgccgcgatttcgtcctcggtgtaataccgcgcggaggtgtaggtccgcagtttgttggagcaggtaatcaccggcatggttttgcacatcgggttgttcatgtacatcagcggacagatataggacagccgcacgccggtagccagcagacgggcgtattccggcatcccccggaatttttccagcacgtcgggcgcggcggtcagcaccgttttgatcgtcaccttttgggaaccggcggccttcagcgcgttttccagccgtaccgtccacgctttcagctggctgatggaaagatgcggacagccgataaagcagagcttcggcttggcggccggatccttccagatcacgggatagcttgccttcacccgttccagctcggcgtcgtcgatcatataaacctgcgcgtcctcccggatcagggaatcacccagctccacggcttcgggggtcagcccctcgacatggtacagccccaccgcgccgttgctggcgctggccgcgcccatatccttgcagaaagccttcgcttcgtcgttcagctcgctcccgaggaagggggtcagcccgcggatatacggcacgtcctccatcaccttgaggccgatagctgagccgagcacctgcgcctccggcctgcgggaggttttcacttcgatcacccatttggccttccggccctcgtcggtggtcaggtcgaaattcggcaccttgccgaggatggcgccgaagatgtccataaacgcggagttgcggttgcaccgcgcccccagcaccgagttggcgtacaccacggcggaggattccgaccagctgaggatatcccctttcttcggggtgttccccacttcgtccatatagcaggcgcaggtaaaggcgttgtcgtttttcaggcccagctttttcagctgctcctcataggagtcctgccgggagtacatcacgccgaacacgattttctgcagcagattgcaggggacgttcgcatgatcgatcgggcgggggtccaccgtgaagggttccttggtgtgtaccccggcggcgatcagctcatccatcaggtcgaaggtcgccgacatcaccgagatgccgaaggaggtcaccagatgggcgggtccgctgatcgggatgaattgatccgccccgaaggtgtcgccgtacatggcgagggttttcatgattttcgccatgacctcgccctgactgccgttcaggatagcctgttcctccggtgtcagggtcatggcgggaatgtaatcgcacatgattccggtcctttccgggctttccggccggaccggccggaaagccgcttttcgatatgttcagaatggtcgaaacggggaacgcgggggattacaggctgagggcgagggcatacgccgaacgcaccgcctcgtgtaccttcccgacatggaagctgtcgccgatgttatagatttcatccgccgcgtgcagccgctgcgcttcgaagtacagcgtatcgtccggacggccgccggccgcgatcaccaccagatcggcgggcaggatttcttcccgttcctccacccggagcttcggggcgaggggattttctacgttttcgggaaggatgggatgccaagtcacataagggtcgggcacggtcggggagacgttgcgcatcacctttaccccgcctttttcaaaaccggtcacccgggtgcagttgagcagctttaccccagcggcgtgcagatgatggatcaggtatccccggttggcggtgcagaccttgttcatgatgaagggagtcatctccaccaccgtggcctcgcggccctgctcatatttcagccagtgggcggtttcgcagccgaccacgcccgcgccgaccaccacgacgttcttcgcgtcgcccagcagctccggcttcaccagcagctcggtcgcctgaacaatcttcgcggtttccgcgccgggaagggacagacggctttcggcggagccgaccgcaaatatgatcgcgtcgtattcctccgctttcagcgcttccgcgtcggcggcggtgtgggggcggaataccagcccgtaatcccgtgccgcccggtccacctgattttccagccagcggcggtaattctggatttcgtatttgatcttcggcttcccgccgggaatcagccgtccgccgatctctccgctcttttcaaacagggtgacggcgtggccgcgttcggcggcagtgacggccagcatcacgccggccggaccggcgccaaccacggcgatctttttccgcgtctccgccttgggcggcacggcgggataaatctcctcaaaggcggtgcggggattgaccgcgcactggggatgtccgccctccacaaattcgttgagacagccttcctggcagccgatgcagggcaggatgtccgccaccttccccgcgaacgccttgttcggccattggggatcggcgagcagcgggcggccgagcattaccatatcgcattgcccggcccgcagggcggattccgccagatcgggatacccgagtttgcccaccgccgccaccggaatttccatcccggcgttgcttttgatgttgtttttccggaaataatccctgacggtttttgccacgtcgaggaaacagccgggaggcatcgagccgggcggatggggcagccaccagttgtcatagcagccgaggtccacgtcgaacatatccacgcccgccttgaccagcgcccgcatatagccgagggtcatctccaccgtccggccgtttttaaacttccgcagggatttgttgtccatccggtcgccgtaggtctcgttcagcgcgagggaaagatcgatccggtacatgatggggaagcggtcccccacccggcggcggatctccttcaccatatccacgccgaaagcctgccagtcggcgaaatgccccagcttccggcggttgaaggccgggttggtcatctgctcgagcaggtagccctcatgtccgtggagatatacgccgtcgatgttggcggcgtgcgcgtcggcggccgcctgtccggcatttttgatgatctttttcagcctgtgccccgaaagcggcatacaggggacctgcgc

SEQ ID NO: 608 - DNA, 7711 bp, Unknown
  16S sequences of unknown bacteria
tattgtgacattatttatgtcataatctaaaagtcaccaaactgttggttaagcctttacaaaacagcttgaccctgcatcattcaccggcgcgatcgcttaaattccgctgatcattgcgtcgtatccttcgcctgatcgctgcgtgcgttcgcttgtccgcactgttctttcagcttgcggatcctgcggctgatcttctgctgtacgccatgattttccttttcgctcgcaatcaagtttttcagtctgtatgccaataagacgatctatgcatttgtattcatctgacatcctcctgaaatggcaaaaaaggtacgtctggcatatctttccctatccaggcgcacctgtcatcttgatctgactgggcggttcatccctccgccgtatcactgcggcgatcagtcctccgatgattacgattcgattgttttttctgcctctttcgcgtttcggctggcgaggcggccaaaagacaaagcaggcgtcaaatggcccgatgcttcctctggcgctttgctcgttttgcatacgtccaggatgatcttccgtatgccgttcgcagggtctcaacagcgcagaagccttttgtcttcatcccagttgataccagctgctgcacgcgctgtcaacatgaacgtcgatcctgcggacattttccaggtagatctcctcatcgatccctgatgtcgatctgccggccagcgagcgtcatggcacgccaaaacagagaccatctgtcccatccgaacattccggtctctgttatcatttatcctcagcagtttcccacatagacatgcggcagataggccgatgcgacctcccgaagacgatagatcaacgcgatatctgtggcggcgcgctcctgcatgcggtagtgcgggaagaagcgcgtcacatgaagcgggatctgcggatcgatggaagcgagccactctgcctctgccgccatttcctcctctgtatcgttttccccaggcacgatcagcgtggtcacttccacatgggtggatctggccgcacgtgcgatgaactcctgcacggtaggcaagtctccgcccagcctttgataatgcgctgccgtaaagcccttcaggtcgatgttcatcgcatcgatgtcgggaagcagcgcttccaatatctccagctgcacgctgccgttggtgacgacgacgttcttcatgccgcgcgcatgcacgatggcagcgcagtcacggacgaactcatggccgatcaacggctcattgtaggtatatgccacaccgatattgcctcgcttctgcatctcttcggccagatccgccagctgcagcggcgtcatctcgacatgatcggccgcctgttccccgcacatcgagatctcatgattctgacagaacgggcaggacagattgcagccgaagctgcctacggacaggatcttgcttccgggataaaactggcgcagcggctttttctcgatggggtccagcgccagcgccgtcacctttccatagttcacgctgacgatcctgccttgctcatttttccttgcgcggcagcggcccagctgtcccggcgcaagccggcagtgatgcatgcataccggacatgtcctgatctggttcaatgatgtctcaccacctcgaagcgcgcaagcgtgatcccttttgccttttccgcgatgcccgccttctctttggcgatgcgcacctgctcctgcaccgtatccaccccatccagatccggcaataacagcccgctgcgataaccgtcgctgacgatcacgccatagcgcttcacatccagctcatgcatggaagcgatcggttcaggcgccttgagcacatccacgctgtattccagcatatccagctcttcctcgcacaccggcatgaagcgcgggtcccgacaacaggcgctgatcgcattggcgatgatctcctgcgcgatatcttcttcctgcggagaagtcgtgccgatgcagccgcgcagctgtccttcctttttcagcgaaacgaatacaccagcgcactgccgcatttcctcgggcagatcgagcggacatgcacagcgcgtgccatgacgcacataatgctcgacgctgcgccgcgccagcttcacatatgcgtcctcctggcttttccgtcttgcggcctccgcgctctgcttctcctggtactgacacaggaaatcccgctgcggatcatcgccttcacaccgatagacgcagacgccgtaacctacgccgaacggtccttcataagacagctgacgtgcgctgatcttaacggcgtccaatgcgccggccatgatgacaaaggcgcggtgtccgcactctccggcttgcgcacagaaacgctcgctgaaggaaaacagttctccgaattccgcttttcccatgacagccatgatgcgctgatcatattctggtccttccgggcggaatccataaggcccctctgccttcagccgatgcgacagatcgccgctggcgatgaccgcgatcgtcctgcccagcttccgcgctgttttctggatgcactggcccagccggtaatgcatcgaaagcggcagaccagaaagaccgatgcgcacgatgggacaggtcacgccctgctggttcaagaaccacagcgggatcatcgtgccatgatccagccatcgccttcgctctcccagcgtccccgccgggatcccgttctcttcggccagtgccgacaaggtgcggacaaacgccgtatcatacgccgcgctgatcctgacctgcggcgccccaaattcccgaagattcccggaagcagaagcacccggagaaagatgaaagtagtccgcatacatgagcgcgtgcggagacaagatgaccagcgtatccggatgacaggcagccacctgcctcgcggcctcctgatatgcgctgatcgtcgatgagatggccttctcctcgccctttccgacctcagggatgatgagcggcggatgcggaaccatgacggcgatcttgactgacatgatgatccctcctttgttcatcgttattttatcacattcccgccgaagtgcgccgatcatcataaaagcctctctcagcgaagcgctgaaagaggcagatgactgtttaatgattatgatcacaccacgtctatgcgcccagcatctgggtcagttcctgcatagcgtcggtctcctgacggatcatctcctgaagatatcgttcctgctgtgcttgttccttcgcatagaccgagatctcctcagcgaaatccccgtcttcgctttcggccttttccagcagagaaacggtcgccggataagtctgggccaatacggagcccttgtctgtgccccagaacagattgcccggattgctttcttcctgcaatatcgccagggaggccgcattggtttccgtgctgaagctataatagccatattctgcaccgccgttgatcatccaggccagatccagcgcgccgctgccttcctcattgctcaatacgcccttttccaaggcggcgatgaccccttcgatcacatccacattgttctgatatgccacatgcttgatgacgatatccgaagtggagatgatgccgatgaactgttcctgcacgaagcggaaagcgtccagcgtcttggcgttcagcgccctgccgcgctcgcggatctcatccagcgtctgctgatccgccttttcatccagcgcgtcctgatactgcgcattgatggcggcgatctcttcctgatgtgccttcgcggcattgcgcagcgcatctaatgcgtcaagataaggctgtgcgtcttccccggcgagcgtggtgtccaatgcttcctgcagatcatcgcaagtcgcgttcagatccagcgccagcgccggcgtctgatccagatagatggccagtgcgccaaaggtgttcagattcgtctgcatgacctgagcgctgtaagtatcccgatcatccgccacggtgtgatatcgctgctggatccagcctttttccccttcctgcgtgcctgggatattgatgaaatacggcacgccggatgcgcggtaagacacgccgtcttccatcgtattggtatcgactgattccgcgctgatgccctcaggatagatcgcatcgaccggctccgcgagcaatccggacgtttccacgaacgtcttggtcagcgtggagaactcgggcacacagctgatctgcccctggctcatgccgtcatagaaggcaggcagctcaaaattgatcatggcgatcgtcttgccggcccattccggatgcgcgttgttgatcatctcccaggcgccggtcgtccagtcgaactgtgtgccggaagcgccccactcctccgcaccatgcgcgatgaagaggatgtcgttctctggctgatagccggaatcgaccatgcccttagccatggccaggacgagcccgacagcgcagctgtcatcctgaaagccgttgaaatacacatcgtaatgcccggacacgatgatctgctgctcatcgctgcgtcccttcagccggccgaccacattgtagctggtgccttgctcctcctgcagcacattgtccacgatgagcgtcgccgtctcattgccttcttccagcgctgctgcgatctgacggtactgatcggcactgatgctgacgcagggcatcacatcctcggcgcagacatcctgcatgttgatcatctcatccgagtatgtggcgtacccgcccgtgtcataagtgatgatggccgctgccccatgcagctcagcctcatgcagatactgatcgatccaggcctcgttccactgatccacgccggccagaacgatcttgccttccacatccttgccagcatagtctgccgcgccgccgctgccgacatcgacgagctcggccgtgatgccgtcttcatccgttccgttcgtcgcataggatgccggcatgatatcgatgtctgtcccctccagccgcaatgacgcgtcattgaactgccagcggtccaccgtgaccggcacctgttccacctcaaggccgatctcctccatctcatcggcgatataccgtgccgccgcatgctcggcgtctgagccagcggtgcggaatcccagctcgttggacagataagccggatcataggccagcgtttccgcgatctcataagcgtaacgctcatccaccgcatcgaggtaggccgtgacaagctctgcctgttccccctgcgccgtgatctgcgcctcgttttgctcacatgccgccagcggcatgagcagcagtgctgcccccagcagcttccacatcttgttcttcatctcttttcccctttcgtccaaacaaaaaggcatggtctgcacaccataccttgaaaacgaaagagatgcgttctgccagacaccgcgccgcagcctgttcatcactcttattgatccgttcacaagttgatgtgcgcataaaacgcatggtcaccaataaccaactcataaaacctgagcctttttgctcaatcaataaggcaacaacgttgccaatccgcacccgcggtacggtccccggctcttcgacgggttttcggcatttgacccggccgtccgtgtagccttgcgctttccgatcagaaagcgggtccagacgtgcatctgcactgatgttctgaaacgaacgcattttttatatcatgcatgcgatcccatgtcaatgatttttttcgatccgcgcttcttcatcggtcgcttccagcttcatgatgaccggacgcaggccgtcgttgcagctgcagatggcgacgcctggcttcctgatccagtctccgtaataaaacagtccctgatgggcgccatgcgccagcgcgaacacatactgatagatggctttccacgcttcatcgcaaaacccttccggcttggcatagtccgcataaaagacctgcccctttcgcatcaacgggcacgggccgagcccctctatgccatattcgcccgccagctcttcatccagcgtcgtttttaagatcgtgatcctgaccttgttcatcttcttcctcctccttctctgtcgctttgcgcaaaataacggctgaacgcgcggaaattatacagatccgggctgtgatcaagcacggcgaagctgatctgcgcaaaatgatcatccacgctgccgccagcctgaaacagacggatctcccgttcgaacagcgccgcgataagctgagcgtcattgccgaacgcgccgcagccgaatgcacccagcaccagcacgacatagccatggtatgccgcacacagcagcatccgatggatccgctgtgagaccatttccgcatattcagcctgcgtcagatcgcccagaccatactgtgccatcggcgcggcacaggtgagcactgagaccatcgctctttcctgcagcaggctgccatccgcgtcccggatgatctgcactttcggcgtaaggatcatcgcatcagagctaaacggcgagcatagtccgcaatgatacgcataataccggtgcgccgcttcgctctccagcgacagcagcagcgagctgttcaggcacagatcctcctcctgtgcgcgggcaccgcgccgcacgccgccgccaggctcgaacgggttggccaggttcaggacaaggatcttctcctgcggatatgcctgtcgcagccttctcgccagggcgaacgcatccatgttcacacagtcatagcggcagactgcccgctcatgtgcgcgttttccgatcatccgctccatccgttccagatcatccggcagaaacaccttcgcctcatcaaggcctttcacttgttcctgcgccaatatcgataatgtctcttccagcatcgcgatcctctggttcatgcacatcccctgcctttccacatcgatcataccgcacaggctcacgctggtaaagctgcttgacaccacaggagcatgtccgtccgcgtaaagcgcacgagcagcgcatccggcacatggaaaaagacgggctgatcgctcacctcatcactctcccttgttcttcctgttccaggcacagctttcctcatgcgcgtcgatgacaccgactgcctgcaagtacgcatagatgatcgtcgtgccgacgaacttcatgccgcgccgcttcagatcggcgctgatggcgtccgaaagcgcagaagaggatatcccgctttccacgatgacctctcccgctgtccatccccataagtaatcggcgaagctgccatagctgtcctggatatcccgaaagatccgggcattgttcacggctgccgcgatcttgcgccgattgcggatgatgccaggatcctgcatcagctgttcctgcttctctgcatcataggcgcagacctgttcgatgtcaaaatggtcgaacgcgcggcggaatgcctcccgcttattgagcacacattcccatgacagccccgcctgaaaagattccaggatgagcatctcaaacagccggtgatcgtcatgcaccgggacgccccactcttcatcatgataccgtacataccgcggattgtccggatcggcccagcagcagcgcggacgatgatcatgccattccttcttcatctgtgccatgctgtcaccccttcatgttccaaaagcgacgccttgatctcgatgcctccggcatagcccctcagcccgccgtccgtgcccagcacccggtggcaggggatgatgatggagatcgggttatggccgacggcgctgccgaca

SEQ ID NO: 609 - DNA, 32759 bp, Unknown
  16S sequences of unknown bacteria
tccttctcaagcacgattcactcaaaattcttgactgttcttgcgttctttcctttttctgtatcgttttcaaggttcgttgctctcaagcgagcttatacataataccacgtgctcgtttttctgtcaacactttttttgaaatttttttactttttttgcatcttttctcaaagcccttatttttcaatgggttcaggcatctcttactgcacttttttctgctcactctatctcctttttcctattgatcttttccgtgtctcagctttacctcttgttctctttccccttttccattctattcggctcatagtgttgctccccctcgttctgcgttgttagcactctttttaaacgagtgctaattttctattgcatttccctctccgctctgctacaatacctttcggaagcttacactgcttccaaacattgttcgcaatgatgttcctcgttatatggagtatacgcacctcaacgttatgccgtccctcctattataaataaggaacacccaccccataactatcacggaggcgtctactatgacccagcagcaaaaaggcaacatttccattcatgcacaaaacattatgcccatcatcaagcgttggctctattccgataaggacattttcgtccgcgaaatggtttccaacggctgtgatgccatcaccaaggaaaaaatgctccatcccgatcaggaatgcgactatcgtgttactgtcacgcttgacaaggaagcgaaagagatccgctttgccgataatggcatcggcatgactgccgaagaagtggaaaaatacatcaatcaggtggctttctccggcgcggaagaatttctgaagaactacgaaggggacaacaagggcggcatcattggtcacttcggtcttggcttctattccgcctttatggtggccgacaaggtcacaatcgacactctgtccgactccgaaggggccgaacccgttcgttggatcagcgaggacggcatggctttcaccatggagaccggcgaccgtaccgagcgcggcaccgttatcaccctgcacatttcggaggaagaatccgaatttctggaggagtaccgtctccgcgaagtgctccaccgatactgcggattcatggctactccggtctacttcgacattgtaaaggttgaagaacctgccgaagaaaaacccgccgcttccgaaaattcggaagaagacgaatcttctaagaccgacgaagcgcctaaaggcccggagctgatcaactccacccccgctctctggctcaagaatcccaaggactgcacccctgacgagtacaaatccttctatcatgatgtcttccacaccttcgacgatccgctgttttatgtccacctgaacgtcgattatcccttcaacctcaagggcatcctctatttccccaaactgaccaatgatttcggcacaaaggaaggtgagatcaaactcttcagcggtcaggtcttcgtggcggataacatcaaggaagtcatccctgagttcctgatgctgctcaagggcgtgatcgactgccccgatctgcctctgaacgtgagccgcagtttcctacagaacgacggctatgtcaagaagctctccgcctacatcacccgaaaggtagccgacaagctgaccggcctgttcaataccgagcgcgacaattatcagaagtactgggacgatatccatcccttcgtcaagtacggatgcatgagagacgccaagttcttcgagcaggtgaaggatacgctgctctttaagaccaccaagggcgaatatctgaccctggccgaatacctgagcaagaacgaaggcaaagtcggcaagaaggtcatctacaccaacgaccccacccgtcaggccgccagtgtcgctctgtacgataacgagggcgtggacgtggtcgtgatggattctctgatcgacctgaacttcgtcagcttcatggagtactccgccggagtggacggtctcagctttgctcgggtggatgcggacagcgaagccttccagaaggagcagacggaagaagaaaagaagcaaagcgaagaagacgccaagaagctggccgacctctttgccgacgccaccggccataaggatctgaccgtgaaactgaacgccctgaaggacgagtccctgcccgccatgctggtgcaggaagaacaaggccgccgtttctccgaaatgggccgcatttacggtcaggatttcaagctgcccgagcactacacgctggtgctgaacgcctccaacccggtggttcagtccctgattgccagcgaagacggcgaaaagcgtaccctgctggccgctcagctttttgatctggcccgcatgagcacccgtcccttggagaaagacgagatcacttctttcctgtcccgctccaataagctgctggaaatgctctgcaaataaatcgttctttccaatctccttttgcggggaggaagggttttgccccttcttcctcgtattcttttatgttgagtttttcccttgctgattttccccttcggattccgtttttccgccggggcctgaaaggagtctgtttccatgcaccagcgtctgatcgcttttctgctttgcctgctgctgttgttcccagcctgcgcgctggccgccgtcactccgcgggagatcgccccgctcagccccgacgaagtgcccgaaccctccgagggaatgcatcattatctgcttctctgcaccgatacctgggatggcgaccccaacaatctgggtaatacggacggcgtggtgctggtaacgctggatacggtccaacgccgtgtcatcttctgcacgctgacccgggaaatgctcattcgccgcccggacggagctatcggccgcttcacctacatcaccaaaaactatggtattgacgcgctgctgaacattgtcgccacccagttcggcatcaaggtcgatcagtacgccattttctgcatgaacaatattcaggatatcattgacgctctgggcggcgtgaccctgaccgtcaccgatgccgaggccgattatctcaaccgctaccgcatcgcccgggacgcgaccactcccagtatggcgaaggcgggcacctatcttttcagcggccatgccgccgtcatttatatgcgcatccgcaaggtcggcggcgacggcgacgcgggccgcacccgccgtatccgtaccgttcttaccacactgaccgagaaatacgccgacgcgacgctggacgacgccctccgcattctgggagtcgtctctgacagccttgttaccaccaacatgaagctggacgacatgctgaccgccgtaggctacgcactggagcttcgcggcgtcacgcccgagggctatcagctgccccccagcgattgtctttcccccatcacctacgtgggaatgcagacctatcaggtggactttgaccgctgccgccagtatatccacgatattttctaccccgcgcaataacacgcgcatttcatcattttccatagaaaggcttgtcccgcatgatccttatttccgttcaggagctccaaaagagcttcggtgttcacgaagttctccgcagcgttaccttcagcctgcaaaagggcgaaaaaatgggccttgtaggggttaacggctgcggtaagaccacccttatgcgcatgatcgccggggaaatgcagccggacggcggcactatccaccgcaacaaagacctgtgcgtcggctatctggcccagttggacgacattcccctgaccgataccgtttggggcgcgctgcttaaggtgttcgagcccatccgcgtcatggaacgccgcatggcggagatcgagaaactgctggaatccgccgaccccgaaacggctctgcgcctttccagcgagtaccagcgtctgaccgaaagctacaacgcccaacagggctacgcctacgagggggaaatgctccgggtgctgaacggtctcggtctgaagcccgaaatgcaccagcggcaggtctccaccctctccggcggcgaacgcacccgtctttcactggcgaagctgctgctgcaaaagcccgacatcatccttatggacgagcctaccaaccatctggatctggaggccatcgaatggctacaggactatctcaccgattataaaggctcccttttgcttatcagccacgaccgctattttctggatcacgtctgcaccaccatgggcgagctgctgggcggcaagatgatcaaattcaccggcaattacaccgagtacatgaagaagcgcaccgccgacttcgagacccgcatgaaggcttacgaacttcagcagaaggagattcagcgggagcaggccatcatcgagcgttaccgcagctttaaccgggaaaaaagcatcaaggccgccgaaagccgggaaaagcgtctggccaaggtggaacggctggaaaagcccgtggaagaacagcacgtccgtttttccttcgacgctcgccgtcgcagcggggaggaggcgctggaagttcgggagttgagcaaatcctttgaagggcagcccgtttttcagaacctatccttcaagctgcgcaccggcgaccgggtggcgctcatcggccccaacggcgtaggcaagagtaccctttttcgcatcctgacccaccagatcaaccccgatcatggcagcgtccgtttcggcaccaatatcgacatcggctattatgaccagcatcaacagaacctcaatccgcagaataccattctggacgaggtatggaacgctttccccaagttggagcagacccgcatccgcagtgcgctgggcctgttcctcttcaccggcgacgaggttttcgaaaaaattgaaaagctctccggcggcgaacggggccgggtagcgcttaccaagctgatgctcaagcaggacaaccttttgcttctggacgagcccaccaaccatctggatatggacagccgcgaagtgctggaagacgctctgcgggatttccccggcaccattctggctatcagccacgaccgttacttcatcaaccgttttgccgaaaaggtcatggtgatggaaaaagatggtgtcacagaatatctgggcaatttcgacgattatatcgaaaaacgggatcgtccccgtccccccgtttcctccttggaggacgaacccacccgcaccgcccagacccgggagaaaaagaagacccgccagcaaaacgcccttcttcgggagctgaaagcggcggtcgataaggctgaggcagctatcgagcagaacgagcgggaaatggcccgtctggaagccgagctcgcctgtcccgagacctataacgatttggaagccatgcgccgcctgaccgaaagttatcaggccgagcaggataagaccgaatccctctatgaggcgctggaagcggcggagaccgccctctccgaagcctctgaaaactgataaaccccgctcttccgaaatcggaagagcggggttttaggctagcgaaaaggctaataaatctccgtcgcctgtaaaatattctgcaccctgctccgctttgcacggcgaccaagccctgcgccgcgcctactcttggctacgcgcttcatgattttcaaccatttccagtgccagtcggccttctttggtcacaggattcgcggggctatagaaagacttcaccgctgccccatcttctcagcgtttcgcacccttgttgctgcctgccttgcatacgaaccccaaccgttgcctttagagctatatcaaccttctgtgttggcgaactatcgctacatccataacttcctctctccacccaaaaactcgagctaccgtctacccagcggactcacgcttagcgtcccacagagatagcacaaaacgactgcatcaataatcctcgcaacgcctgagtagcagcatttcctcctgcttatccaccttatggcaaacaacagcgccgctctttccctttcgaaagagcggcgctgtttctgtcgtttaatccagatcccattcgcagatgaagctgcagccggggtcgacctccgcatattcatagaagtggctgtcgttccacgtgccgtccaggtgcttgtagaagtacatgccataccgctctttggcgctgcggctgggttcgttccgatgccagttggtgtattcgaagggctctcccgtcacccagatccagtcgccggtacgcgcttcgtcagaaaggccgaaataggcggtcaaatagccgcaatcccgcataaaaccatacacgaagtcgttttcttcggcggtggtcagcgtcgccagatggccgcccagcagttcgcagaacacctgcgcctgccgccacttgggcacgcccttgaaaatctggtactggtgcttcgtcccgtcgggggcggtaaagatttccgacttatcggaagtcttgtcgtcccgaagctggagggcggtgatcggttccatctccggcatcaccataacagcggcattgctgaaatcccccaacgattcaaacagcgcgttggcctcgtccaagttccacaccatccgggcacattccgcctgaatgtagatcgcattgtttttcagcgtttccgctgcccgttccgcagcttctatgttgtccgccgcctcaaacccagcctgagcggcctgtagatcgcccgcttcttccagtgcggcagccgcatcggaaagaagctctttcgtcacagtagcctgcagtgcttccgctttttcggtgctgtcttcatactcgcccagcgcaagatacattgccagtgatgcagccggctcgtcactttctccggccttggcatattcggccaatcgccacgcctcctgcgctttttccgcctgctcggcactgtcctcataatcacccagtgccaggaaccagttggctgcggcagtataatccccatcgtgcgcataattctgcgccttcgtgtaagcgttacggcgggaaacttcccgcgcagtctcgtataccttctccgtagcgccctcatgatcgcccgacgcgataaagctgtcccgtgcctcggcccatttgccgttggcctccagttccaatcccttggcataggcctgttcttccgcttccgtttttagctgctcctgcagcttttcgtcggcagtctgcgcccgtttgcggctgtcgctgaacgagcccaacgactcaaagagcgcttttgcctcggcgtattcaccattcgaatacagctccttagcccgcagataatcgccgcgctgcagctgcgtcacgcagttgcttaaataggacttgctcttttcataattgcccagttcttcaaacagtgccttggcctgtgcatattccttctgattgtaaagagaaagggcctccttgtaggtcgtcgttttccacagccgcttgctgtcccccgccttggcccggctgtcagaaaagccgtccaacgcgctgaaggcctcataggccccggcataatcgcccgcttcatacagtgccagcgccgcgtcgtattgagtctgcagtgccgcgtcgtattgagtctgcagtgccgcgtcgtccgtgctttccgccagtgccgcgctcatcatcaacagtatggccagcaccaacgccatgatttgggaaatcgcctttttcatcgcttatttactccttcgccgtcactgctcgtccgtctgactcagcgtatccagcggaaacgtgcccagcgtgatcaggctggtgacggaacggtcgttcttttggttgtagtgccggtcagaattgaccaattcgcccataaagaccagcttgaccgagttgccgccgtccaaattcaacgcttcggagcagccaagctccttcatcttttcggccacccaaatcaggcccacgccgtcagagcgcttgttgcggccctccacagtcatcagcagataatgattcggctcgatcatgcccagcgcctgtctgggattggcgtactcgaacaccttgtcgatcacctgctggccgatctgcccctcgctgagcagcaccgggccgaagcaccacgtgtccgtcgccccctgcgccatcaattcttcgccgtcaatgctgcccgccagataagtcttcatgcttccatcggggtacagggcgatcaggtcgtaagaaggcagggtataatgaggctccttcaaggagtcgttggccagcagcacgccgttctggataatgatgcccggacggcgcttctggtagacccggaagccgtaaaaatcgtcgctgaaggccagaatgctattgatctgcttggcaaaatcctcggccatcataaaccggcggccgatctgttccgggttcgcgtgctgggtgacgaatttcacccccgggatcaccttgatctcggtttcgtaccataccagcttgcgtttgcgctctaccacgtcctgaaaacggcggatgttgatgaacatttgctgatccacatacgtccattcaccggcttcatcgtccatcaccagatagtaggacggatcggagtcttccggcaaaaagccctctgaggtcagctcgggcgcatcgtcccgcagcgcataaagggggctgaacgccgccttgtcctccttgtccgcagccggtgcgggctcctccgtcgcttccggcacggcaatcgcctcgggcgtttcttccgtcgccgccgtttcttccgccagcgccgccgttgccagcgacaaaatcatcaccaacgccgccgcacaggcaagcaggcgcttcaaaatttcgattccttttttcatcatacggcaagaccttccttttgcagactttggtcatcacgcaaaccacattgaatgattatagcatagcccacgtcccttaggcaaggaaaaaagccggttcagccaagggcctcacggctttgagatcgtacttctttcgcttttccacaaaaccccatatcaaaaggccagcccgccatttcagacgtgctggccttgttctgcagtttcaccgtcgcagcggtaaaattcaaattccgtatgtccgggtgctctgcattcatgtcttatccgatcagaccggcgagccgtggcgcccgtcgcgtcgcggcggtaaaacaccggtcaagcctcaatccctacgcccctgcgcgccaaaggcacaccgtccgggggtacagggcgaagtcctgccttactggagggtgcagcccttgtcaaactcgacggtgcccttgtagttcttcaggatgccggtgacggtgatctcatcgccttccttcagatccttcgcaccttcgccggtcagacggtagcactggatcaagtaatcttccagcccagccgctaccatgttcacggtgatgttctggtactcgtcgctccacgcggtaggaatagcgacgaccacgccggtaatggtggattcggaggtcatggcggtgtcttccgccagcgcataggcagcgatcacgttcttgacgctggccacgctgtccacgggaaccagcacgcagcccttgtcaaactcgatggtgcccttgtagttcttgatggtgccgaacacggcgatctcatcacccacggccagttccttcgcgccttcgccgaccagacgatagcactgaatgggctgctcgtccttgccgtcgcacacgatggtcacggtgatgttctgatactcgtcgctccacgcgctatcgatgctggaaataacgcccttcaatacgctgggcttggtcagcgcagcgccgtcttccagcgcataagccgcatccagcgtagcggcctggctcacgatctcgccgaagcccaccagcacgcagcccttgtcaaattccacggtgccctgataattcttcaggatgccctcgacagtgatctcgtcgccttccttcaggtctttcgcgccttcgccggtcagacggaagcactggataggctggtcggccagttcgcccacctgaatggtcacggtgatgttctgatactcatcgctccacgcggtatcaatggagatcaccttgccgaacaggcgctgggccttggtcatggcagcatcggtgtccagcgcataagcggcggccacgatgtccgcatagctcatgtccagcaccgcggcgggaaccatgcgctcatagggcacgtccagcgtgctgccgtcgggcgcggtcacagtggcggtcagggtgtagaccagatccttggggttcgtttcatcgatgtccaccagatacttgccgtcctcggccggggtgatctggatcgcgtcggtatctacggaccaggtcagcggataagccacgccatcgatcatcaactgggcgggaacttcgtagtcctcagccgtttgggtcagcttgtcgcggctcttgttcttgtaccagaaatccaaaagtcccttagcggaagccagattctcgtcctcggccatggcagcgcccacaaacagggtcgcgcacagcaccagcgcagtcagcagcgcaaaaaactttttcattttctttctccttgtcatgttcacgggtgaagaacgagcttctccggctggaaaaccagcaggtacgccccttcttcgccgcattggatcattcccttaacgtcgacctgatggtgaagataggcttctgcgggcagaagcgtttctgcgacattctgtgcggcaagcgttcgaatccgaaccgtttcgccgttctgccggcagtccagcagtaaggagacagtaccgtccttcgcagtcagcgtttcggcactttctactgtcaggccttgaagctccgcggaggagtcctccagcagcgttccatcctgcgccagttcagccgctgtcagcttctgatacgcaggggtctttccctcggccagcttgcgcagattgtccgggtcgtccggcctcatggcgcggtacttcacatccgtcacctgccatacgcccccggcttcgtagtactggaacgttcctgccacgcgggtctcattgcccacgtgcagggcgttcagcccgccgccgctgagatcgtagccgtagtagaccgccatgccgtagtaacggcctgtttccgggtccagcgcttcggcataaacacttccgccgtcattcagaatgatgttgccggtaaacgccacctttttccctgcgtattcctccgggtgttcccgcagttcccgaatcgtcagttcgattgcatcgccatagtagaaattcgggtcaggctgatcggagtacaggtttcgttttgcttccttcgcctgttcaagagccttagcgcaggtctggccgtatcggttccgggcaacgctgctgcccacggccagcccgttctgcaaaagctcgatgttcaggttacggtattgttccccttccgcaggcttgtaccacacccatatcagcgtccgctggccggtggagtccagctcccactccgccgtatccgattccagcaggatcgaaacggcggatgagagcttttcccgggtaaagtcggaggccgcctgcccgaagggttccacctttcccgtgcattctggcgtgttgaccgccagatagcggcctttcagcacgccgccggggaactgatcctccggcacggaaaagtgagtggtgtctccgtccacaaaggtacgcaccgttgcttccatcagccgcgtgccggtcttttcccccggctggtggcggacggcgtagtccgtctcgtccgccagcgccggaaggtagagcaagccaagcagtagcagaagcagaagtgttttcaagcaaaagcgcttagttggcgtattcacactcgtcgatggcttcttcgaaagccgtctcgatctgcgcgtccacgtcatcgccggtcagggtcaggcacttggacagcagagccgccacctgatcgcgggccgtggaggaacccacgaacgcgggagaagtgtagtaagcgtccgcctgttccagacagacctgcgtgctcagcgcggtcacatagtcgccgccgtccgcctgcgccaggaagtcggcatacgccgtgttttcagtgatggacttgatgacgggcacatagccggaggccatggagaattccgcctggaagtccacgctggtggtcaggaacttgacgaacagccaggacgcgatcacttcctgcggattgtccttcttgaagatgcacacgctggggccctgagagatcaccttgcggttgtcgttgttcacctgaggaatggtggcgatgcccacttcaaaggggtaggaaccgtccgcgttggcagcgggccgctggtgcttggcgccggcggaagaaccgatggacatataggagcgcacaccggtggtagcagtgaacaggccggaggtgtaagcgccatagagcttctgggtggtcagatagcccttgttgtaccattcgttgaacatcttgacgaaggcgcggttctgctcattgttgaacagatagtgctcgccggtggcgctggtatagggagagtcatactgttcacacatggtgatgaaccagttggcctcgctgtcatagcccagcgggatggattcggggtcgatctccttgatcttggcacagacctgctccatttcctcccaggtggtgggcacggcgataccgttggcctcgaagaaggtcttgtcatagtacagcacttcggtggacttggagaagggcatggtgtacatcagtccatccccgtactgacggccttcctcgtagtagccctcgatgaagtcggccttctgctcgtcggtcaggcccagaatttcggtggtgccgtcggcgcgggtcacttccaccttgctgtcgatcagctcatccagggtctgcacggccttggccaggttgtacagggccacgtggtcgggatagcagtacgccacgttgggctgcgcgcccacgctgatgtcggtcacgatctggtcgcgcacgtcgtcgtagctgccctgcgtggtatgttccacatgaatgttgggatagagcttgttgaactccgcaatgtaattggcggtcacttcctgcagcgcggtgccctgctgggtgcagaaggtgatggtcacttcgctgccgtcatagccttccgcaggcacttcaaagccagcggcgaaagccgtgctgcacagcatcatcagaaccagaagaatggggagcagttttttcatcttgttttcccttccttttctttcatgatgttcctttttatgtaacgggccttgcggccagtataccgaagctgggcgttatcccttgataccgctgcggctgacgccggtcatgatgtacttgcgcaggaacacgaacaccagaaacagcggggccgacaccagcgccacggcggccatctgcacgggatagttcacgtcgcccgtggtgtcggtaaaggcgcttctcaggccgttggtgatcagccgatgcgcgtcgtcgttggccaccagccggggccagatgtaggaattccatgcgcccatcatcttcaggatggtgatggagatcagcgtgggcagggacaggggcaccatgaccttccacaggtatttccagtccttggtgccgtccaccttggcggccagatacagctcgttggggatctgcaaaaagctctggcgcagcaggtagatgtagaacacgctcaccagaaacggcacgatcagaaccgtatacgtgttcttccacccaagggcggtgacggtgccgtaattggtgatggtgaacagttcgccggggatcatcatcgtggccagcagggccgcgaacagcagctccttgcccttgaactccagccgggcaaaggcgaacgccgtcaggatggtgatgaacagcgacaggatcgtggacaccagaccgacgatcatcgtgttcacgaacagccgtcccagattggcagtggtaaaggccgtcagatagttttccagcatcagcacccggggccagaaggtgggcacgctcatgcggtattcatccagcgttttcaccgaggagatcagcatccagtaaaagggaaacagcaccaccagcgccattacgatcaggaagaaatacaccccgaacagggaaagggcctttcctgtcttctgccggagaaactgggcacggtattttcgtgcgctcataacgtctttcttttccatacccgcacctctcagtaatggacacgtttcttgctgacccacaggttgatgagggtcaccacaagaataatgccgaaaaggatcaacgccgcggcgctggcgcgcccctgactgttgttgctcagggagtcgtaaatgaagcccaccatggtgttcagccgtccgccatcgttgggcgggcccatggtctcgccaaagatgcccacaatgctggtgtattccttgaagccgccgatgaagcccgtgatcaccacataggccagcatgggcgagaccagcggcacggtgatgcgggtaaagacccgccagcggggcgtgctgtccacccgggccgcttcgtagtactgcctgttgatggcctgcaggccgcccagcaggatcaaaatcttgaagggcagggcgttccagacgatgtagacgatcatcaccaccatattggcggtgtaggaggagccgtagttgatccagttgacgcggctgccgccgaagaactcgatgatgttgttgatgataccggcggtgacgacgatctcgttttccgtgccgtagaagctgcccacgatgttgaacatggcggcgaacaccatgccgatagcgatggagttggtcacatagggcagaaagaagatcgtctgcagcgccttctgcagcaccttgatggagttcagcgccacggcgatcagcagggccagaatggtggagatcggcaccgtccacaggcacaggagcaccgtattctgcaggcaggtcagaaacttacggtacttgatgaccttgacgaagttgccaagcccgaactcaaagctggcgccgctggccgctttcagaccgctgtacccttccagcagggacatgcgcaccgtgttgatgatgggccaaacggtgaaaatcagaagcagcacaatagccggggaaaggtacagccacgctttccattgatctttgctgttgaccatatcacttcacctcaaacgcaagccgtttttccgtctccttgtggaagacaaagagcttgtggggcttgacggaatagcggacaacttcgccgttcaggccgctgcggtcgtccgcgtcgatgatggagcgcacggacggcttgagcgacgcggcatgggtggagaccacgctcacatcccggcccatgacctccacgttgttcagttggcaggtcagggggccgttttcgtccagaatgaagccctcaggacggatgcccaccgtcacctcctgatcttccagcccgccgaccgtcagcacgcagtcgtcgccgataaagagcttcccgccctccacccggccggaaaacacgttgataggcggcgtgccaaggaagttggccacgaacaggttcgccgggtcgtcgtacacttcctggggcttgccgatctgctgcaccacgcccagcttcatcaccacgatcatgtcggagatggacatagcttcttcctgatcgtgagtgacgaacacggtggtgatgcccgtttccttctgaatgcggcgaatttcctctcgagtctgcagacgcagccgcgcgtccagattggacaggggttcgtccagcagcagcacccgaggcatcttcaccagcgcccgggcaatggccacgcgctgctgctgaccgccggaaagctcgctgggcttgcgatccagcagctcttcgatctgcaccagacgggccgcctcccgggctcggtccagcatctgctccttggacagcttatccgcgccggtcaggttctgcagcgggaaaaggatgttctgcaaaaccgtcatgtggggatacagggcgtaattctggaacaccagcccgatgccgcgcttttcggtggaaagctcggtcacatcgtcctcaccgaagaaaattttgccggaggtgggcttctgcagaccgctgatcatgtacagcgtggtgcttttgccgcagccggagggccccagcagaccgatcagcttgccgtcgggaatttcaaaattgaagttgttgacggcgaccacctcttcgccggattttttgttgcggctgggaaagattttcgtcagtttttcaagaacgattttcatgggcgtcccctttcttttgcgtgggttgatttttcggctcatgccaagggtcagatggttttttcggctactttttccgcagccagcttttccttgaaggcgatcatgtcctcccgggtgtcgaagatccgttggctgggcaggtccaccgtgaccgttcccgctagcagatcatgaatgggcgtatgggcgtaggtgaacaggaacaggcagccgttcaccagcgccagtcccagaatcagcagcgttcccggcagacccacgctgccgaaatacagcatcatcacaaccaatacggggatcatgatctccacggtgtacttgcccagaatggagcgcacaaacagttgcacacccccaagccgtaccccgtccgaccgcatgacgcccaggctgaaaatttttttgcccagcgtttgcccgtccttcagaaggaccggaatcagcacctcccagatcaggcaggccagcagaatgcccagcgacaccatcagaatggtcaaccgaatggtcatctggtaggcataagccgcttcctcatcctgccctacggctcggtaggcttcttccagctgctgccgttcttcctccgtcatgctgtcgtattgggacagcgacgtctgaaaatccacgccgtatttttcaccgtaggtttcgtaggcgcggttcagcgtatctacgtaccggtcgtaccccagaatcgaggagaaaagaaacgcaaacaaaaccgccagaatgcctaaaagaatcgcatcaaaaagaaacgcggagattcttttccacatcccggcacgttgaagactgactgccatgcttcggctcctttcgtcgtttgacggcaaaccttatttcttaaaccttatttcttattatatagattttttcttaaaaagccatacccaaacacgggagaaaatcgtatgttacgcgctcctttttcatttctggccgtaaaatgcaatgtgcttatttgtatccttcatttttcgaccaggaacaaaaaatgccgcaaaataatcagactgtcgaaaaaaaccgattgtccgccatagcccgcgaacggcgcttcgctggttcgcgttgaaaatgctgtggcataaggatcaggggctctgcccctaacccccggcaggaggcagtgcctcctgcgcctccactttttcaacagtctgaaaataatgaaaatgcttgcattttagacattaaaaactttctatgtgtcaaaacttttcttttcgatttatccgttcttaccgcagacgaatctccaccggccggcaaatttccagccggtcgggctccgtatgacaatccagcgccagcagatgcacgcccgcctgcgcggcctgccgcagcgcatcggcaaaagccggatgagtacgccggttgggttccatccagcgaacattctccgtctggatcacaaacaccgcccacgcctcgtagccctcctgaacgcatcgagccagcccttccaaatgctttacgccccgctctgtgggcgcgtccgggaagcgcatcacgccgtcgtcctccagcgtcacgccctttacctccgcaaaaagcctgtggcccggcgattccagataaaaatcgaaccgggaatccccatgagtcgtctcaggccggatcaccgaccacccccgcagaaaccgtcccgcccggacatattcgttgaatacccggttgggcgcgttggcgtccatgttcagtagccgttctcccttttctacggcaatcaaatcataggccgttttccgtgtgggcgacggctgatgctgcacatacacccggcagcccggaatcagcagttcccggcagcggcctgtgttcttcacgtggcagacttcgagtcttccgttcagctccacatgggcaatgaaacggtttggcctgtccacaaatatcgccggcaggatattttcgtagatcatgcctgcgacccctgatgcatagacgcgccgccccggctcatggcctcatgctccgcactgatctcccggtacagacggcaggaatcccactgaccgttggtctcggtcagcatggctttcagcggcaccggcgggattttcatctgccggaacgtctgcagaagctggttcatcagcatcggcgtaaagcccgccatcaccagcatttcgtcaggaaaggtttcttcgcagggaacattttccccgcctgtttccagtccgcacagggcgttcagcgtcaggccgtattcatcgggccgaacgtcccgcagcaggacccgcagccgcatggcggcaaagcgaattttcgacgctttttctcccgacagattatagcaaagcagcgtaggcttcatcgttctttcctcccaagccgaaaatgaggtttctcccctcatggagataccccatcttagcacgtttgaaaccacaaatcaaagcccggacaggttcgaccggcccgggctgaaaaacttgcttatttttcggtttccccaaagaacttttcttccagcatggcgcacagggtatggtaaatgggcagatggtattcctgcacgtcggcgggcgtatgggccggaacgatgatagcgcagtcgcacagctccttcagttgtccgccgctgccgccggtcaggccgatagtcgaaaggcccagcgctttggccaccccaacggccagcgccacgtttttggcgttaccgctggtgctgatgcccagaaccacgtcgccgggctttccgtatcctgccacctgctgagccgccgtcagcaggggttccagatcgttctgcacagcggtggacagcgctccgtgctgggtcaggtcgatggcgggcagcgcctgctgcagcagttcagccgtccccggcagcaggctttccgtttgagcggcgatcgcagcgcgtttttcttccgggaaaggccgcttcaggtaaaagcccttcatcagctcaccaacgatatgccccgcgtcggcacagctgccgccgttgcccacaatcagcagctttccgccccggctgtagcacccgcgcagcagcagataggcctccattactgagccgcgcagcccatccagcgccgggtaacggtggaacagccgctcatactgttccaacacgcggggttcccgctcgctggtttcttccatggggtccacgtcacagccgtacagtgccgccataatactggccagatcgcccagtgtctctcccgtctgggccggaacgacctgcaccccttccagcgaaaaagggatcgcctcccgcttcaattccgcttccatcgccggacgcagcaggtcttcgcagcgcacaaaaatgctgccgatgacgatcttttccgggttgagcgtgtccgtcaaaagggccagtcccttgcccaacatggttccgatatggtcaaagaaggctttcgcgtccgcgtctccggtccgggcataggccgccagcagcttcgcgtccgcttcttccgggccgtgtccgtccctgacccatgcgggggtgcgcccctcccgcaccattttttccgtcagggcgcgagcctgccgctgaatgcctccgccgctggtgaatccctcaaaggagcccgccttgccaaagcccaccgggccttccttttccagccgcagatggccaatctcgccgcccatatccgtgcagccccgaaggagctttccctcggcgatgatgccgccgcccataccggtgcccatggtcaggaagatcatatcgctgcatcctctgcccgcgcccaatttccattccaccagtgcgcaggcgttcgcatcgttctgcaggtagaccggtacgccgcagcgttcctccagcatggctttcaggggaatgttgacccagccgggcagattaggtgggcacagcaccgcgccccggcgggaatccagcggcccgccgcagctcacgcccacggcgttcaggtcggcgtaagtcaggccgtttttccgcaaaatttcgtccatggtttccgtcagctgggcatacaccggctcaaagccccgttccgactgcgtctcaaaacgcagcttgtccttcaaatggatgccgccgtccaccgtcgccagcagcacggcacatttggttcccccgatgtctaatcccatccaatagggtttcattttgcctttctcctcgtttcttttgtttctatttgccccggctctgcgggcgtttgtcccaaaaacttctctgaaagttttcttcctttccccctcaaactccttttccgattccatccaatatcctttcgtcttcttcagcatagcgccaaatgccgcttttgtcgtatcgaattttctgaaaaagattgcatttctttcgattttttatataatcaatttgacggcaggtacgaaaaaggccgaaagaagggagcgtgatcagtcatgccttttcccattgttccctatctttgggaggccagcgccgcccagccggtttccctgctgcagcggcggctcaccgaaccctatcccgcccacgggcacgactatttcgaattggaactggtcgtgtcgggcagcggacggcagtggctcaacggcgaagccctctccatggaaccgggctgcctgtatcttctttctcctgcggattatcaccgtttggagccgaacgcttctctggacgtgttcagtttccactttacgctcgaatacgctgcgcagctcggtttttcgctggtgcaggaggcgcggcatacccaaatttcatcggaagaaaccgcccagttcgccacccggttgtccccgctggcgaagccttctgccgcgaccgatctcttttaccaacaggaattactcattctcctgctcccgctgctgcttcgtctgctccgtcagggcgaagccatgcagctgcgcaagccggagcggcgctttcaggcggggctcaaatatgtgcaggctcatcataccgaccccgagcttcgtttggaggacgcagcccgggcctgcggtctgtccccctgctatttcagttcgctgttttccaaaacagtgggctgccgtttcacggattacgtgactgaatgccgtctgcgccattcatgcgcgctgctttccgcttcttccgttcccgtgaccgaagcggcctacgaagccggtttttcctccctgcctcactttttccgctgcttccaaaaacgcttcggcgtttctccgggagtctttcgaaaacagtctgcgccgcttccttccgacagtgcaaatttttcggttcttcccctgcccatccaaaatttttccaaggagggttccctgtgattcgtgagatcgtcaaagaccccatttttcttcaacagaagtctgcgcccgcctcggaggccgatgttccggtggggcttgacctgctggataccctccacgcccatcgagagacctgcgtgggccttgccgccaatatgatcggcgtcagccgacggatcatcgtttttgacgacggcggcaaaccctgtctgatgttcaacccggagatcgttcagtcctcctgcccttacgaagccgaggaaggctgcctttccctgatgggaacccgaaaggcccaacgcttccgtaagatcaaggtacgttatcaggacgagcgcttccgcgtccgctttcgaacgctggaaggctggacggcgcaaatcgcccagcacgagatcgaccactgcaacggcgtgctgatctgatttcgagccgactccccctttcttccattcgtttgtatttcctgtgttctggcttttcttccctaattgacactgcccctgcgccgtgctataatcacgccaatcttttcgaaggggaggatgaacggatgcttaccagtcgcattctgggaacagggaatatcccgtccttcttccgggttttccttcctccgggaagttcatcacgacgtaccgtttgatattcgcaagtctccgcaaatggttgcgctaaggctgcggactttctcaacggcttcgccaaagcaggcggggccgcttttccttttttcaggagaaattccgcgccgaattctggtcatcctatcctccgtaaagacagaaaaaggcaggtcgcaagcatggcaaagaaacgcatcatcgcaattctggggctggggcacgtaggtgcgcacgtcgcctattcgttggcggtgcagggcattgccgacgagctgatcctggtggatcagaacgaacagaaggtcgccagcgaggtgcaggatctccgggattccgtcgcctattttgagcaccgggtcaccgttcgtgccggagatttttccgatctgggcgaatgcgatctgatcgtcaacagcgtcggcaagatcgaactgctgcgcggcaatcatgaccgggtcacggaaatggacttcaccattcccgccgtccggggctttgcggacaagatccgtcaaagcggctttgacggggtggtcattaacatcaccaacccctgcgacatcgtgacccgggaactggccctgctgctggggctgcccaagggacgagtctttggcacgggcaccgggctgaacacctcccggatgctcagcgcgctggcccgtcagacagggctggatcataagtccatcacctgctatatgctcggtgagcacggcaatcagcagtttgccccgtggtcctgcgtcagcttccggggaatgtcgctggaggagtgggcgcgccgggacgagcgcttccgcttcgaccgggaagccttgacgaaggaagccattcacggcggctgggtaaccttctccggcaagtactgcacggaatatggcatcgccaccacagcggcccggatggcctccatcgtccttcacgatgaaaaggccgttatgcccgccagcatggagctgtgcggcgaatacggcgaaagcggcctgtttgcgggcgttccctgtgtactgggcgcaaacggcgtggagcaggtgatcgagctgcccctgaccgccgaagaaaaacataccttccaccagtgttgcgagggcattcgccagaacatggagcacctgaaagagctgtgatcccgtttccgcagtcgcctcaaattcattcaaaaggagccttgcgttatggaaatcaaaatcactcgttctcccgttcacggcattctccccgagcctgaaaagctgggcttcggcaactatttcaccgaccatatgttcctcatggactattccgaggacaggggctggcatgacgcgcgcatcgtgccctacggccccctgaccctgtcccccgcctccagcgtgctgcactacggcacggaggtttttgaagggctgaaggcttaccgtcgtcctgacggacgggtgcagctgttccgtccttgggaaaacgtagcccggctgaatcgctcctgtgaccggctggggctgccccagctgaacccggatgatgccctgcaagccatccgcacgctggtcacgctggaccagcgctgggtgcccactgcgccgggcacgtccctgtatatccgtcccttcctgttctccaacgacccaaagctggggctgcatggcgttcatgacgcgatgttcgtcatcattctttccccggtgggcagctattttgccagcggcctgaagccggtgaaaatcatggtggagaccgaagacgtgcgcgccgtccggggcggcaccggcgaagccaaatgcggcggcaattacggcgcggccaaccgggccggagagcgcgccacggccaagggtttctcgcaggttttgtggatggacgccatccatcacaaatacgtggaggaaggcggcggcatgaacgtcatgttcaagctgggcggcaaggtggtcacgcccatgctgaccggctccatcctgcggggcatcacccgtatgtcctgtctggaactgatgcgaagctggggtctgccggtggaagaacggctcatcagcatcgacgagctggcggaagccgccgatgcgggcacgctggaagaagcgtggtgcgtgggcaccgcggcggtcatctgccctatcggcgagctgtactacaacgacaagccgtatatcatcaaccattttgagatcggcgagacggcgcagcgcctgtacgacaacctgaccggcatccagtggggccgcctgcccgaccccttcggctggacggatctccttccgcaggaggaataaccccgtttcattccaatgccccggcattcgtcagaaaaacgaatgccggggcattttttatcgaaccaatttttccaccgtttccacgaaacggtctatttcttcctccgtgttgtaaatgcccacgctggcccggatcgcgccggtttccagtgttcccagccattgatggatggacggcgcacagtgcagccccgcccgcagggcgaagccttcctccgacagacggtcgcacacctcccccgcgtcccgtctcatgggcacaaaactcaccacgcccaccataggcgcgccatcgcttcccagcagccgcaatccccgaatttgcccaagaccctgacgcatccgccgggctaacccgcgttcgtattcctcgatctccgctctgtgccggaaggcaaaccgcgccccggccagcagcccggcaattcccggcagattgggcgtaccgctttcataacggtcaggcagcgactccggctgcaccatgctctcactttgggaacccgtgccgcccgccagcagcggccggggctgcatccccctccccagcgccagcaccccggtgccatgggggcccagcagtcccttgtgtcccggcagggcgatcatatccgcccccagttttttcagcgaaaccggcaggatccccgccgtctgagccgcgtccactagaacggggatacccatggggcgaagcgcgtccgccagttcccgcactggctggacaacgccggtcacattgctggcgtggttcaagacgcacagcgccgtttttggggtcgtcgcctgccgcagagcttccggcgaaagcagtccccggctgtccggctccgccacccgcacggtgatctcgccctgctgttccagccccttcagcacccgcatcacggcattgtgctccgcgtggctgcacagcacctcgtctccccggaaaagacttccccgaatggccagattcagcgcctccgtacacccggaggtaaaaacgatctgctccgctgccggggcttccagctcctccgccagtatttcccggcagtgttcgatcacccgcccgccgcaaagggacagcttgtgccccgaccgtcccgggttgccgcccagccgggaaagcgtgcccgccatggcccggacgaccatgggcggcttgggataggaggtggccgcgttatccagatagatcatcttttttcttcctcatttccgcctctcacacttgcgcgccccgcgccgtatactgtatgagaaggaaagggggaaatgaacctatgcaggaaacattcggcatcgcgtccttccgctcccggcagcaggtgatgaaatttgaagctgccctccgccgggcgggcgtacgcgtgcagatcatcaccacgccccgggacgtggccgttggctgcggcctgagcatccgctttgaattggaggatttttccgccgtggaggaggtctacaaccatacccgccccaccaatctgatcggcttttaccgggtggagcgtacagggcagggccgtccgggcgtatcggcgctctaacggcacaaggcagtgtttctcgttcccagtttacagttccgtatcagctgacggtctggcattttggggcagtaaaaagccgcggcatggctgccgcggcttttcattggatgcacttgttcactgctgcacgtacttctggatgaacgcgggcagttcttccacatcagcgctgatggaaagaacgaagtccacattgtggttcttgctgatggtctccagacgctcgaacagccattcagaggtggacagatccgccttgaagagcttcttgaacgcgtcgacgaaaaccagacccaaatcgaagttctgggacacgatgccgcacaggaaacccatgaacatctggtcgctggccagttcgtattcgccggcattgatgaaacgaacctcatgccggaggtcgtacatataacgcgcgtcgtcgtcgatgaagacgatatcgtgcttggaatctctgctggccacattagccatgtcaataatgcgcttggttttacccgagcctttctttccggcaatcacctgaatcaagggtaacgcctcctttacttttttccctgtccgtgagcgccgtccggcgctcccttccgtttctattatacatgattccccgtggaatagcaacttgcccgagcgcttttttcgtgaacaaacggaaaatcccgtcacgggcccggttccagcaggtcccgaagctcctgcatggacaggttgggcagctcccgtaccttggcctgagcgctttccgggtcaaaatggcatacgctctggtaatcgcatcggttgcaataggcctgtccgccgtcccgtaccgggcagatgtccgtcttgccgtccatcatttcctgcgccagcgccgcggccgtctgccgggcgtgctccatcagggcgttcatctggggcaaggtcagcgcctttgcgtccttgcgcagttcgccgcttttctgcaggacaggcggcagcacgaaggcctcctcgcctttgtccatagcttccagaatttccacatcacacagggtgatgccccgcagccggaacagcttgcgcatttcgccctccacggcctccgccgcgtcggtggcggtctccaccagcgggtcggccacgtagaaatagaacgccccggcgggcttggagccgggcagcgaagccgtacagacctccagatatagaagcagctgaagctgaagtccccaccaggtcttggccgcttccagcgcctgttccgacgatttatagtcgatcacccggaaatagaccgtcccctcatgatcccagcggtcgatccggtcgatccgcccccgcagcatgatctcccgcctattgggcaggcagagcacgatgggcggcaatcccttttccgtaccgaaggcggcttccgtccgatccagccggaaactgcccgccgccagatgccgggtgatgacctccgtggcgcggcagaccgcgtttttggcctgatcgtaccgggcgcggctgcggtcgccgtcccccatggggccactcatcagttcgtcgtacagcggcgcaatggcttcctccgtcatctgccgcacccgttccggcgagaccgccgggtagcccttctcccgccgggccagccgggaaaacccgtccagcgccgcgtgataaaaattgcccgtttcgatggggtctaccttccattcccgaagcacctgcggccgaagcccatagttcaggaaatgctggaaggggcatcccgcaaactgctccaaccggctgacggacagcgtttccccgccgtacagcgcccgggccgtctcaggggtgatgggctgcgcgctgccgtcgtaacgcagggcgcgcagcagccccagcgcggcaggcgcggtctcctggctccgcagcaacttccgcagcttttccgccatgtccggggtcagctcgctgccgccctttccgtccagatgggcccgcagctgcacgctcaactccgccaacgcctgcaccgccgattgaggcagactttcctccggctccggggattgggacagcgacggtaaaagccgcttttccaccgtatccagcaggttcagccgccgaagcgccttgccctccaccgacgtcttggcatagctcaaaaacagcagcttggagggcagcgtcatggcccgcttcaagtccagtttggcgaataggttccggctttcatccataacgcccagaaagcagccggtcttttcctgcgcgtcctgccgctcctccgggctcaacaggctttgtgtctctcgggtcagcacgccgtcgttcaggcccagcaggaatacggcctccatgttttccgacaaagcgtgacccagtacgcccacatggagcatttttcccgccggaggcagagccgccagcgagatcgcggaaaatccgcactccatccgggtggcgatgtgcttgagggggatcctctgccggtcgctcagccgcaccatctgatccatcaaagtcaatgtcgtctgccatacctgactgttctgccccgcccggacagccagtcctttttccagaagttcactttcttcctgctgcagccgctcgtacgcgcccacatctttcaaaaggccgaacaccgccgtcatggacgcagccgcgtcccgggcctgcaccagcccctcccgcatccgcagcaccggctccatcaagcgctgccggtagccttcgcagcgttcccgcagtccttcttctccccgggtaaaaggagccagccagcgcgccctgttgatgccgcaggtgaaggcgtaattttccaattcgcagctttcttcaaaggtaaggggcgaatagccgctcttagccatgcccagcacgtcccggttctgccatccgcccgccgccgctttcagggcgcacagcaggtaccggggcagcccatgggacagggcacttaatttttcatcggtgtaaaagggaatgccgctgtcccgcagggcggcggacacggcaaaggcatagccgccgtcgtccgggtacagcacggcgatcttttcgatatccatgcccccggccagcagccgaagcacctgacgtgtcatcagcgtggcttcctcgtaggggcttagcccggaggaaaggaacacgctgttctgctcttcttccatggcccggggacgcagcgtgaacagcccccgttccaggcagcggatcgcctccggcgcgtccagttcctttcgaggataggccacgaactccgtatccatccccgcctcccgcagcatttccgtaaagcggcccacgccctgccgaatgggcagaaacagctcgccgtcggccgcgtcctcatgctcccataaaagcgccacgctcaggttttcgcacaggggcgctgctgcggtcaaaagacgcatcatctggtcaggcagcgtatcgaagccatacacgtacacatacttttcccgcagaaaaccgctgtcctccagccgtcccgccacataacgaagctgatcctcgctgtcgctgaaccgtgcccgaagcacttcttcatactggccgtagatcagcgccagatcgcccagtttttcccgggagatcccggcgggcagccgctctgcgtactccgccagcgtctccggagtcatgccgccccgcttcaggtcggtgatcagcgccgctgttttttccacaaagccggtgcgcaggctcatggccccatagtagcccagcttatcttccagccgttccagcgcaaggctcaccgccatcctccgcccggcgctgttcagcggttcccgctgatcccgcccgccgctttccagcacccgttcataaaaccgggacggactcaaaatatcaatataaaaggtgccttccagctgcagctggcgaaaaatttcccgttcggtctgcagggtcagctgctcgggcaccagcagcaccacgcttttttcctgccggttcagccggcccagttcttcgatcagcggcgcaagcagccgatgcggccgggccgtcaggatgcgaaccttctccgccacaggcaaacctcctttcaaaaatcaaaagctctggcattccgccgttcttcatgatatgatagcaccacggaaaggaagggacaagccatgtcagatcccattgtgggcattgccaccgccgccggggaaggcggcatcgccatcgtccgcatcagcggagacggtgcggcggacttattccagcaggtgttccggcctgcgggcaagcgccgtccgccctatgaaagtcaccggttgatgtatggccacgcggtggacggcgccgaaatgatagacgaatgtatgggcgtggtcatgtacgcgccccacacctacacccgagaggacgtgtgcgagctgcacacccacgggggccgggtggcggcggcgctggtgatgaaggctctgatccgcttgggggcccggcccgccgaagcgggcgaatttacccgccgtgcctttatgaacggccgcatcgatctgtctcaggcagaggcggtgatgggggtgatctccgcccagtccgccgccgccctgcgggcgcaggaggcccagctggagggcggccccagccgttttatccgtcaggcgcaggaagaccttacccgcctgttggccgggctggaagcccacatcgactacccggacgagatcgacgaagccgaagcgctggacggtttgaccggcgggctgaacgccctgatcctccgtctggaaagcgccgtggacgagcgcggcgcccgcattcttcgggagggcctgcgggtagccctctgcggtcgccccaacgcgggcaaaagcacgctattcaacgcttttctgggtgaggatcgagccatcgtcaccagcattcccggcaccacccgggacgtgctggaagagagctttccgctggacggggtcaacgtgatcctgtccgacaccgccggtctgcgggacagtgacgacgaggtggagcgcatcggcgtggagcgggcccgcaaggcgctgaaccgtgcggacgccgcgctgctgttggtagacgcttcccagcgcctttccccggaggacgaagagcttcttcgccagcccattccctgcccctgcgccattctgctgaacaagcaggatgccggtgaaacggttcgtccggccgatctggcctctcttgccgcaggccgtcccattttcccgatctccgccctgaccggcgaaggacttgcccccgttcgggattttcttcgcggcttcctaagccagcccaaccagtggcagctggtgcaggagcggcacatggctctggcccgtcaggcgacggaccgtctccgtcaggctcaatccagcctttccaccggcgcacccctcgaccttgccgccatcgacctgcacgaagccctttatcttctgggccgcatcactggcgacagcgtagacgagcagcttctcgacgacatcttctcccgtttctgcgtcggcaaatagcagggcaggggcaggggtagtacccctgcaccccggactgcgcgcctatggcgcgcagggtactcgggggacatgcggcttggccgtgaaactaccgccgctcggcggaaggcctcgcggctcgccggtctggcagggcgatgccctgcaccctacaccgcgcccattgggcgtggggctattcgaacgacatgcagcttggccggtgttttaccgccgtggcacgacaggtgccacggctcgccggtttggtgtggtatactgtcagttggccggtacaagccgccgccccatggtttgcggtactccaccccgcgtagggtactcgttggaaagcagcttatctgcggagttaccgccgctcggcaacgggcctcatggctcgcgcaaggggtagtaccctttgaccccggactacgcgcctttggcgcgcaggggcatagtgagacacgcggcttggcttccttctaccgccgctcggcgacgggcctcgcggctcgcgagtctggtgtagtttccctgtcagttaaagcgaaaagaccgccattcggcaacaggcctcatggttcgcaaccaaaatccagcttgtttccaaaacaggctggactttttcgttacaaaacagcccaagccatgccgaagcctctcacctcacgctatttctgccccgctcccacccaagcggcggcggagcagcgcggcgataggcagcggagggaaaaaggcccgctcattttgacggcggaaaaaggcgagcacaggagcgcgcacgaacgttggtgttcgctagccaatgataatgcgcgcgacgttgcgagccccgccgacaaaatgggcaatcaagggctttttcccgtagtcgccgtgccgctggctttcttttgcacacttttctttcgccaccgaaagaaaagtgtgagcgccccatagggctgcaagccctgctcccgcgccgtagtcggcgcgtcaagcccgctggggtaataagtatgcgcctgctggcgcaccaaagggctttccgccgccctttggaaaccttcgggcaccgaaagttagagagaaacccataaaacagcaagtcccaatccgcgccagttgcggcgcgtcaatcccccgcaggggattttctgacggcaggcttatctcagaccgccacaagcagggggctttccgttcgccccctgcaccccttcaggtcatagtcgcagcaacaaactccttccgacagaaaatgacatctgtagccacaccaaaaggctttccgcagaacaaaccattccagcccgcactaccactgtgcgcttcactttttgttccccatagcccaaaatggccgcgccaaaagcgcggccaatagattattcttcttcaaacgcaacgctcagatgataattttcctccgccgcatcctcgaaaacccgcttcagccggggcagatattcctccatcttccccttgccgcgatgaggcagcaccactaccagcgaaagctcctccgtttcgctggtcaattcgtcatgcagcgcgtccaaattcgccccgt

SEQ ID NO: 610 - DNA, 2844 bp, Unknown
  16S sequences of unknown bacteria
ataaaaatgaaagccgctcccttgcctggggcggcttttgtgctgtattggggttccggttcatgcagcgcagggcagatcagcaggcggcttccagggcaggcgggtcacagtccggttcttcccgctccaggccaaagaaggccgcatagactgcctgggccgtgtcctcattgagccggaacactcctgcggcattgcgctgtcccagtgcgccgttggtgagcagggcaaagccggtccgggtctccgggtcgtagaacagcccgcagatggaaccataggcgttcccctgatgccccaccatgcgccggtccggcagcagatggtcggtgatctgggtccccagtccccggcacagctcattgggatagcttccctcggcaagctcccgttcatactgcggggtctgcatggcaaggcggtactcctcactgagcaccactgcctctccctccccgggacagcctgccatgatcgcccccagccgggccagatcctccgccgtaatgaacagatccccatgtcccagggcatagagctcgcccagcggaagcacggtatatttggcactcatgccggtccactccaccatgcggacggtgcactccccgttctgatagatattggcgacccgctccgggtgtgtgagctgggaataggaataggccgcgtccatacccatgggctcaaaaacctgttcccgggtatagtccagaaaacgctcgccggtcacggcttccatcaccccgctcaccagccccaggccgaagttggtatagcagtactgtgtccccggctttgctccggtataacagctctccagcacctcccccagcggcggaagcaccttttccgccaccgcttcccggtaggtttcgctgtctgccagacccgcggtatgggtgagcagatgccgcagggtgatgggcgcatcgggataacgggaaaccacctcgcaccgtcccaacctgggcagcggggcttcggggtcaatcttcccctcgctggcaagatccagcgccagcagggcagtcacacacttggagaccgatgctgcccggtagatggtatcctccccggcggggattcccgcctccacatcggcatagccatagctctgccggtaaaagacaccctcctcatcgaacacagccaggctcatgcccaccacctgatacttccggcagatctcctccatctcggcgtgcagcacttccccggcctggcggcggcgttcctcctgccgggcccggcgctcggcttcctcctgacgcagggcttcctcctgctgggccagcagtgcctgttccgcttccgcctgcatggcagctcggtcggcaacacagccggtggtcagacagagcgcggctgtcagcagcagacaaagcccccgtcgcaacatgtcagtccctccctagcgatattctgatttccattatccggcatcggtccggaaatgtcaatagttgtaaattgcccgaattttacacacttctcttgtgaccttgccagaaatccccaggtctggtatgataaaaacagtgaaatttgtccattgggggaaggagaatcatcatggttcctgtcaaacgattccttgcagcagcggctgtctgtgtgatgctgggcggctgtgcgtcagccggtcccgaaaaccgggaaactcccggctctcccgcctcagaaccggtatccgctccggagccggtaagccgtcaggtgacgctggtggctgccggggacaacctgatccacgatgtgatctggatgcaagcatcccggcgtgccggcggcaatggctatgacttcgccccggcctatgaagccatcgcccccattgttgccgaggcggactttgcctttgtcaaccaggagacagtgctggcaggcgcggaactgcccctctccaactatccccggttctgctccccgcctgaggtgggcgaaaccatgctggacttgggcttcaatctcattgccactgccaacaaccactgcttcgaccagggagaagccggggtgcggctgtcccaggagttctgggacagccatccggaagctgccgttgccggaagctatgccgatgccgcccaccgggaccgcatcgctgtgactgagaatgaggacggcgtgcgggtggctctgattgccgctaccgagctcaccaacggactctcactgccggcagacagcgaaggcggcgtactgcgccttggcgacaaggaggcgatcctcgaaaagctggcagcagcccgggaacaggcggacattgtggtgctgagcctgcactggggcgccgagggagccagtgtccccaccgaagcccagaagcagctggcagcggaattggcggagggcggcgccgatgtgatcctgggacatcactcccatgtgcttcagggcggcgaatggatcaagaccagccggggacggagctatgtggcctattccctggggaatttcatctcagcccaggtaggggcggagaatatgctcgccggactgctgcagctggagatcacggtcccggcggagggggctcctgtgcttgagtcggtggagttcattcccacggtcacccattatggcagcgggttctcggggctgtgtatcctgccgctggagggctatgccgacgcccaggcgctctcccatggggtgcgccagcatgacagccggttcagcctcagttatctccaggcccagctggcagccctggacttcggggaaacatctcaggaggagtgatgccgatgagcaggcgtttccggaaaattcttgggattgccgccctgctggggctggtttttctgaccggctttttcatcaacgccttttacg

SEQ ID NO: 611 - DNA, 7805 bp, Unknown
  16S sequences of unknown bacteria
tgcggacaaacggttttcaagaccgcctcgttatgaccacttcgatatctctccatagcgctctccacaagcgacaatcgttattctaacagcatggccctcatttgtcaactgtattttttcatttttttacgtttttttcacagtttctttataagtgcctgaaatcaacggtttttacgtcgaaggaaagtctctgcaatctccagatcttccggtgtagtgagcttcatattttcataagagccttctgtcagacgtactttgcgtccacagatctcctctaccaccatggcatcatcagtaatctggattccgcgatccagcaattccttctcccgtctgcccagctcttcatatgcatagcagatcaatgacgcagaaaatacctgtggtgtctgaatctgccatacgagactgcgctttggcgtctccttgataaagccatctgtatcagcgatcttgatcgtatcttttaccggcatgccaaccacacatgcctcatatttacacacatctgcatagacccgctccagcataggttcatccacaaaaggtcttgccccgtcatgaatgaatacatacccgtcttcacaggcatttttttccatggcacgtagtccgttcagaacagagtgatagcgttctgctcctcctgccacaattttacagatcttacgaaatccatatttttctacaaattccgtccggcagtaatcaatctgatcttctcccgtcaccaggatcatatcatcaatcacagccgactcttcaaatgtatgaaggcaatgccagagtaccgggtaaccgcaaagattcagatactgcttctgtgtcttagtccccatccgctttccctggcctgccgccagcacaatggctgtacatctttttttctccatcatcgctctcccagcttcagattcggaacagcattaagatccagccctgctctggaaccattcatatactcatagtaagccgccgcaccgatcatggccgcattatccgtacacagaatcggagacggataataaaatggaatattcctcttctcacatgctgtcttcatagcttctctgagtgctgagttggatgccactccacctgccatggcaagtttcggaatcttatagtcctttaccgcctgaatcgcatgatccaccagcacatcacagactgccttctggaaggatgctgcaacatctgcttccacaacaggttctcccttcatctgacaaccattcaaatagttcagcactgctgattttacaccgctgaagctgaaatcataaggagcatcttccacttttgcccgcggaaaatgaattgcatctggatttccctcttttgccagtttatcaatctttggtccgcccggatagccaagtccgatggcacgggccactttatcaaaggcttcacccgccgcatcatctctggtccggccaatgatctcatactttccatagtctttgactactaccagatgcgtatgtccaccagacaccaccagacagataaatggcggctccagctctttattttcaatataattagccgaaatatgaccttcaatatgatgaacgcctactaatggcagttttgccgcataggcaattgccttcgcctcagcaactccaaccaggagcgcaccaaccagacccggtccataagtcacgccaatggcatccaggtcttccagtgtcacatgtgcctgatccagtgcctcctgaattacgtaattgatcttctctatatgttttctggatgcaatctccggaaccactcctccataaagggtgtgcagcgcaatctgagaagagatcacattagaaagcacttctcgcccatttttcactacggctgcagctgtctcatcgcaggaactctcgattgccagaatcaacacatctttcttttcttccatatctatcactcgtccttttcaaaatccaattccacggatttccggtcttttcctgccttggcagccgggaaaatcttgcggacatcgtccatgtactcttccggtctcgtcagagacggactgtaatgcgtcagccacatctcccccacctgtgcatctcttgccagtttcgctgcttcataaaaggtcatatgcttatgctccctggccttggcatccttatctttctctccatacataccttcacagatgaacagatccgatccgctcgcattttccacgatggccggtacgggtcttgtgtcagtacagtaagtcagtttgatacctttccgcggtggtccaagcaccatatccggtgtatagactgcctgttcgtcagtaatagtctcacccttctgcagacggctccaatactgctttggaatctcctgctccatggctttctgaagctgaaatttgcctgcccgatccagttccagggtatatccgtaacacaggattccatgattcacccggaacgctttcagacggtaaccgtctgccagttcaaaagtctcttcatttccattgatctctttataaatgataggaaacggcaattccggtgcgatcacacgcaatgcattaaccacacgttccagccccttgggaccgatcaatgtcaaaggctccgtacgttctgcatttcccatggtcagcaaaagtcccggcagaccactgatatgatctccatgataatgagtaaaacagatcacatcaataggtttgaagctccaacccttttccttgatcgcaatctgtgttccttctccgcagtcaatcagaagactgctcccattgtaacgcaccatcaatgccgtcagccagcgatagggaagcggcatcataccaccgcttccaagcaagcaaatatctaacatattctctcctatatcaattctgtctgctcctcgatctgtaccggaacctgaaatgtatggattattttctcataacaagcctcacacagatcgaaggaatgtcgttccccgtccctgtctgaaaaatatccccacagaacagaagcttcaaatactccttcctgaaggattccgcctaccactttcatttcccgtccgcatcgattgcagatcactttttctaatttattttctgattgtttttcataactccgcatggttttctcctcctcgtccgttgtacaggctgattataaaccagcacatgtactcctgaaaacaggggattactgggcaggcatctgtctgcgccacatgatcagagcatcttcttttggtttttcataaaatccttttcggactcccgccgggacaaatcccagcttttcataaatatggatcgcagccgcatttcccacacggacctccagtgtgaaagcatggatcgcacgctgctcaccggcttctataagtgcatgggtcagcgccgttcctatccctttttttctgacagacggtaatactgctatattcgtgatatcgccctcatccaacacctgatacagccctgcgtatcctacaacctgatcaccttctgtagctgtcacaaacagatactccggccttgcaaagctttcccgcaggccctgctccgtccacggttcagaaaagcacacctgctccaatgcagctacctgcggaatctcttcctctttcatcagagagatcagcatgtgccttctccctttgcaagcttctccgcccgctctctctctgcctgtgccattcttaaatattccggctgatgctcttctgcagtctctgtcttaccttcttccagataccgaagggccagtgcaccaactgcgccggcgcgctgcttattcacatgggctggtgcgaaataaaattcttttccacaatcatgtagcttgtccatcaagccattgcacaatttatccttaaataccggaactccatctccaagaaagatcacatcccgctgtctctcgcaaagcttttctgcaatcacttcaatatccactgccatctgtggctccagcacttccatggtatttccacgaaattcataaatgcctgtatacacctgatttcttctggcatccatgattgggcagatcaaccggtccgtcccgtagagattgtatgccagagcatccactgtaggaatggagatcaacggttttttcaatgccagtcccagaccctttgctgtggcagatccaatcctcagtccggtaaaggaacccggacctgctgcaatcgcaattgcgtcaatggttgtcagatccagctctgtcatattcgcaatttcatccagcatgggaagcagggtctgagaatgtgtctttttataattcacagtatattctgccagcagattactatatgtgctgttaccttccacaaccgccacactggctaccagtcctgaactatccagtgcaagtatttttttggatgtctccattcggttatgcctcctgttcttcgatccccttgaatccttccagggtgatctttctgtaatcaaaacctttttccagatctttttcaatagtcacgcggcacatctgttccggcaggatctctctgatcagatctgcccactcgatcaggcatacgccctctccatagaaataatcctcataaccgatctcgtccatctcttcaatatcgccaatccgatatacatcaaaatgatacatggggagccgccctttctcatacacctgcacgatcgtaaatgtaggactgttgactggttcttcaatgcccagcccttttgcaagtccctgggtaaatacagtctttcccactcccagatcaccagtcagcgagatcaccatccccggctttgccatctgtcctattttttctccaagttcatacgtatcttttgcgcaaaatgaatctatcacagccatgaaattctctcctatctgccgccaatgtgctcattttaacacacgcccttgatttttacaatgaatctgacaaaaagaacgggcagaccgttcctttttcttagaaaacgatctgccctgttcatccaggttggatattcatttatttgatcagttctgccggatctttatattctaatccaaaactgtctgccacattcctacaggtgatcatgccatcatacgtgttaatcgaagaatacatcacgctgttctttctgcatgcttcctccagaccagctgctgcaatctgaaggccatagctctgggttgcgttagtcagtgcgatagtggaagtatacggaactgctcccggcatatttcctacacagtaatgaaccactccatccactacgaaagtcgggtcatcatggtaggtaactttggtggtctcacagcatccgccctgatccacagccacatccacgatcacgctgcccggtttcatatgtttcagatattctttcttcatcagcttcggtgccgccttaccaggaatcaatacacagccgatcacaagatctgcattggaaactgctgcttccacggccgcatcggtacttaccagcgtctggatccgtgcaccaaaaatatcatccagatatgccagtctcttcagattgatatccatgatcgttacatctgcgcccatgccgactgcgatcttgcaggcattggttccaacagaacctgcgccgaggataacaacctttgccttcggagttcccggaacaccacttaacagaacaccagaaccaccgaacggcttctccagatattttgcaccttcctgaatactgagtcttcctgcgatctgactcatgggcgccagcaacggaatacttccatcacgctcgatcagggtctcatacgcaacaccctttactttgcttgccagcatagcatccatcagttctctgtctgctgccagatggagataagtatagaggatcagtccctcatggaagaagccatactcttctttcaacggctcctttaccttgatcatcatctcactcttatcccatacatcctttgcctgatccagaatatgagctcccgctttctcatattgttccgtggtaaaaccagatccaactcctgcgtcacgttcgatatacacctcatgacccgctctcacataattcttcacgttgtcaggtgtcatacctactcgaaattcattgtttttgatttcttttacgcagccaactctcatgtgttttcccccttgtgtctctttatttttgtttcttcccctgaagaaaccccacgtctttgatagattcattatcgcagatttctatctgtttttctagtatgattttttactattttttatcaattttgatatccttgtattattttcagatattttatcttgttcaataatacgcataaaataaaacgctgaacggcagctatcttctgtcgttcagcgtttttatgttatacgtatatgatctacagatttcctttcaggatcggactgatatgtttgtacagcagtacggtgatcacagacaccagcacacctttgatcagattgaatggtgccactgccagaactacgaacgtccacagactgttgatcgccggattgatggctgatcccatctccacgaatgcatcaatcggcattccaaatgcctttgcataagccggaagcaatacaagtgcattgataaacactgcaaccactgacatagtcacagttcctgctgccagtccgatgactgcatgctttctggatttcttcatcttgtagatcagcgaagccggaagtacaaacatacaacccattacaaagttggcaaattcaccgacaaacgctgtctgagttccattgactaccagattgagaagtacctttaccagctctgtgagcacgcctgccaccggccctaatgcaaatgctccgatcaagatcggcacttcactaaaatccagctcgtaaaatcccggtgcaagaaatggcagtgggaattcaaaaagcataagaatggtggagatcgctgccagcattcccacgcagacgatcattctggttgccgctcttcctgatcttacagttgcggttgttgatgttgttttcatgataattctcctttcagattagcagagatcctgtaactggagaaacgcatataaaaaccccggatcacaacaatccggggcatcttcatacactgcaatactacttgtttcctctcccatccagactataactgtcggtaccggaatcacaccggttcagccgctttacgcgggtcgcggacttacctgctgtcttttgttcctgacagcctgaataccgccggtggggaattacgccccgccccgaagatctcttttatttttacacagaatattatacgcttatatgtaccgtgatgcaagaattattttattccgatttctccggctccttacatacattgatccagccttttgctcccgcgatcttctccagttccggcactgccagacgcactgcgctgtgatcatttcccgctgccggatagactgtatcaaactgtctcagactttcatccagatacacatccacaccttcgttaattccaaatggacacacaccacccggtgcatggccgatgtactgctccacctcgtcaaatggaatcatctttgcttttatatgaaatgtatctttgtattttcgattgtctacccgggcagttccctccgcaaggatcaatattgctttatctcccaccagaaaggacatggtctttgcgatcattgccggttccactccaacagcctctgctgcttccgcaacagttgctgttgattctgcaaattcgatcactcgatcctcataaccaacggattttaaatattcttttgcttttataatagacatgtctgcttctccttttgtatgttgtttacccaatcatc
